United States Patent Application Publication US 2017/0114356 A1 - sequence listing, part 11

SEQ ID NO: 13635 - DNA, 2113 bp, Zea Mays
tcacatttcatagacctagctggacccataattcatacacacaatggtaattataataagaagacaacattatgagtggcaaaaatccaattatctccgtatttgcaatctgaagcaccctgttcgcaaaacctctcctgctcctgccgccgccgccatggagagtgcgccgcaaacccccaccatggcggccgccggcgatgtccttcgcgtggccgacctcccgggacgaggtcgcggtctcgtggccgcccgcaacgtccgcgagggtgaggtgctcctctccgagcctcccgtcctcctctacccgtcgaccctctcctccctccgctcatactgctccgcctgcttccgctccctcccccccgccgccacgattccctgcgtttcctgccgcgccgctgccttctgctccccggcctgcgccgccgcttcgcacccgcacctcctctgtgccgcgctctcccacggcggcggcgctggcctcgccgccgccgctcccaccgaggcgatccaagagccgctcctcttccttctctccgcctactccctcccggagtcaaccatgcgctccatgctctctctctcctcggcgccgcccccgcccccgggcgcgcaggacgccgcggggctccatgctgctgtggcagccctagcgccgccgcacatgcttccccagggattgtcgccagacctaacggcggctctcctcgccaaggaccggggcaacagcttcgccatcatggagccgtaccgacacgggatgtcgctcgagctcctgaaggcgcgggcctacgcagtctacccccgtgcttcgctgttcaaccatgactgcctgcccaatgcgtgccatttcgattaccccgacaggcctgggccagggaacactgacattgtggtgcgtgcactccatgacatacccgaggggagggaggtctgcatcagctactttgcggctaattggaggtatgctgataggcagcgcaggctgctggaggattatgggttccggtgcgagtgtgatcgctgtcaggtggagagtcagtggaaggatgatgatgataacaatggagatgatggggatgacaccatggaagaggagggtgaggatgatgttggagatagaggtgatgatgggattgaggaggaagagggggatggtgctaccaatggcggtgatgatgatttcccacatgcctacttctttgtcaggtacttatgtgacaatgagggttgttggggtatgcttgctccattgccaccctcaccaaacggcgacctgtcccatgtgtttgaatgcaatctctgtgggaagctgaggaaggaagaggatgtcattcctgatgagggcacttctggcatggtccattagtttgatgaaaacatactgatccgtgtgctgcttcttttagtgggagtcagggaagtctgttgtttaaatctactgactgaagtatcccagctccaatgagaggccgcataataaaaaatccaaaaggttaagaagtatgaacttacgacatgagcctttcaatcaaaggggagaaagttggaagatgatgtctagccatgtaaagagaatgagaattggccaatgtccataactcttccaagatttgagccagagggcagggggtgggggtggagttaaagagttcattgctggcaaaccatttagccttaggggatgatcattgctgctaatctccaccttaatttagtagtgttcatgttaattaggctacaaatcctgtggcgaaggtctaacacaagcttggataagtaagagaagtgagtgtcaaaatggcacattatttcatttttagtttcatggagatacccagtttgagcagtatctaggtacgaggagttacaaatttgtttatgttatgtattgtgctcttgcgtcatactgataagagaaccgtgatgacaaaatccacctgttttggtgtttaccttgagccttgtaaaggttttcattaacatttcatcatgcttcacaatcagatgtgtttcattttcaaggaaaatgactacattacatattttacatgattgtgaactgaatcagaaccgaatgtttgtgtcactgattttctgatgtgcaaac

SEQ ID NO: 13636 - DNA, 3431 bp, Zea Mays
caatctgaagcaccctgttcgcaaaacctctcctgctcctgccgccgccgccatggagagtgcgccgcaaacccccaccatggcggccgccggcgatgtccttcgcgtggccgacctcccgggacgaggtcgcggtctcgtggccgcccgcaacgtccgcgagggtgaggtgctcctctccgagcctcccgtcctcctctacccgtcgaccctctcctccctccgctcatactgctccgcctgcttccgctccctcccccccgccgccacgattccctgcgtttcctgccgcgccgctgccttctgctccccggcctgcgccgccgcttcgcacccgcacctcctctgtgccgcgctctcccacggcggcggcgctggcctcgccgccgccgctcccaccgaggcgatccaagagccgctcctcttccttctctccgcctactccctcccggagtcaaccatgcgctccatgctctctctctcctcggcgccgcccccgcccccgggcgcgcaggacgccgcggggctccatgctgctgtggcagccctagcgccgccgcacatgcttccccagggattgtcgccagacctaacggcggctctcctcgccaaggaccggggcaacagcttcgccatcatggagccgtaccgacacgggatgtcgctcgagctcctgaaggcgcgggcctacgcagtctacccccgtgcttcgctgttcaaccatgactgcctgcccaatgcgtgccatttcgattaccccgacaggcctgggccagggaacactgacattgtggtgcgtgcactccatgacatacccgaggggagggaggtctgcatcagctactttgcggctaattggaggtatgctgataggcagcgcaggctgctggaggattatgggttccggtgcgagtgtgatcgctgtcaggtggagagtcagtggaaggatgatgatgataacaatggagatgatggggatgacaccatggaagaggagggtgaggatgatgttggagatagaggtgatgatgggattgaggaggaagagggggatggtgctaccaatggcggtgatgatgatttcccacatgcctacttctttgtcaggtacttatgtgacaatgagggttgttggggtatgcttgctccattgccaccctcaccaaacggcgacctgtcccatgtgtttgaatgcaatctctgtgggaagctgaggaaggaagaggatgtcattcctgatgagggcacttctggcatggtccattagtttgatgaaaacatactgatccgtgtgctgcttcttttagtggatatcttgtttggtggtttctcttaattccctggttgaattcaggaaagggggacaatgtcagtactcaggagttaagttatactaataatttgcagtttggcacttattttctttagaataatgaaatgtttagaaacttacccttcagaatatccccttgttggatcctttgattatgattattccttggatcaagattatagtcgtgtggatattgattacactcactttgtgatccaatattttttgttagcaagtaaataagtcaccaccatcagctctttgctatcactattcacttgtttgtgctactttctccggtttgcatatttgtacgggtgagctattgatgtaacgttgtttctaaatttaagctacatcgtcctctgcttttagattgttagttctgccatacacttcgtgcttcaaatcattcttggcgaagttttccttgtgtgagctagttttttactggagtgtgtagattacattgtttttataggaggctatgcccaggggccagggccaatgttgaaaagggatttgacattgcatgaataagctaccagccttagcatgttagaaacaaaagactttggccatagagtctctagcctaattaacatgaacactactctccccgttttaaactgtaagtcattttgttttttctaggtacatagatttatgcacctagatatacactatgtctaagatacatagtaaaactatgtttgtagaaaagccaagacgttaatttaggacaaagggagtacaaaattaaggtggactagcagtctagcaccactaattgtgccgttggtgtaaatgtccattatagtataggagggtcatagtagtaaatttccactcatgtcacaaataaagggaccatatcggtcaaagctaattatttttaggagcctaagaactctatgaagctcctctcacacttatttgacacaatttttctttatacaaatgtaggagtcagggaagtctgttgtttaaatctactgactgaagtatcccagctccaatgagaggccgcataataaaaaatccaaaaggttaagagtgagtatggtcctaataaggcatcaaaatgtctttttttgtagagaagatagccatatgcagactgtaatagcttgaaactagtttccaaagaaggataattatgactcaattttaattaatgaatccctttatgttcatatacttggatgatcaactctgcagattactaattcttcatgggggactgtttatttatttactatgccgatgctggcaatagggcgaatttaaaatgttgatgaagccctaagcagtctactctcctgttgttattagttaatgtttgttttagatcaaatacataatctatgtccctagcatgagagaaacactactgtagtttatttattagctaatgatgatctattatacctttggtggcgacatcatttttcctgcttaaacaaggcattgtacggatccctgtgcagagtatgaacttacgacatgagcctttcaatcaaaggggagaaagttggaagatgatgtctagccatgtaaagagaatgagaattggccaatgtccataactcttccaagatttgagccagagggcagggggtgggggtggagttaaagagttcattgctggcaaaccatttagccttaggggatgatcattgctgctaatctccaccttaatttagtagtgttcatgttaattaggctacaaatcctgtggcgaaggtctaacacaagcttggataagtaagagaagtgagtgtcaaaatggcacattatttcatttttagtttcatggagatacccagtttgagcagtatctaggtacgaggagttacaaatttgtttatgttatgtattgtgctcttgcgtcatactgataagagaaccgtgatgacaaaatccacctgttttggtgtttaccttgagccttgtaaaggttttcattaacatttcatcatgcttcacaatcagatgtgtttcattttcaaggaaaatgactacattacatattttacatgattgtgaactgaatcagaaccgaatgtttgtgtcactgattttctgatgtgcaaac

SEQ ID NO: 13637 - DNA, 2440 bp, Zea Mays
atctgaagcaccctgttcgcaaaacctctcctgctcctgccgccgccgccatggagagtgcgccgcaaacccccaccatggcggccgccggcgatgtccttcgcgtggccgacctcccgggacgaggtcgcggtctcgtggccgcccgcaacgtccgcgagggtgaggtgctcctctccgagcctcccgtcctcctctacccgtcgaccctctcctccctccgctcatactgctccgcctgcttccgctccctcccccccgccgccacgattccctgcgtttcctgccgcgccgctgccttctgctccccggcctgcgccgccgcttcgcacccgcacctcctctgtgccgcgctctcccacggcggcggcgctggcctcgccgccgccgctcccaccgaggcgatccaagagccgctcctcttccttctctccgcctactccctcccggagtcaaccatgcgctccatgctctctctctcctcggcgccgcccccgcccccgggcgcgcaggacgccgcggggctccatgctgctgtggcagccctagcgccgccgcacatgcttccccagggattgtcgccagacctaacggcggctctcctcgccaaggaccggggcaacagcttcgccatcatggagccgtaccgacacgggatgtcgctcgagctcctgaaggcgcgggcctacgcagtctacccccgtgcttcgctgttcaaccatgactgcctgcccaatgcgtgccatttcgattaccccgacaggcctgggccagggaacactgacattgtggtgcgtgcactccatgacatacccgaggggagggaggtctgcatcagctactttgcggctaattggaggtatgctgataggcagcgcaggctgctggaggattatgggttccggtgcgagtgtgatcgctgtcaggtggagagtcagtggaaggatgatgatgataacaatggagatgatggggatgacaccatggaagaggagggtgaggatgatgttggagatagaggtgatgatgggattgaggaggaagagggggatggtgctaccaatggcggtgatgatgatttcccacatgcctacttctttgtcaggtacttatgtgacaatgagggttgttggggtatgcttgctccattgccaccctcaccaaacggcgacctgtcccatgtgtttgaatgcaatctctgtgggaagctgaggaaggaagaggatgtcattcctgatgagggcacttctggcatggtccattagtttgatgaaaacatactgatccgtgtgctgcttcttttagtgggagtcagggaagtctgttgtttaaatctactgactgaagtatcccagctccaatgagaggccgcataataaaaaatccaaaaggttaagagtgagtatggtcctaataaggcatcaaaatgtctttttttgtagagaagatagccatatgcagactgtaatagcttgaaactagtttccaaagaaggataattatgactcaattttaattaatgaatccctttatgttcatatacttggatgatcaactctgcagattactaattcttcatgggggactgtttatttatttactatgccgatgctggcaatagggcgaatttaaaatgttgatgaagccctaagcagtctactctcctgttgttattagttaatgtttgttttagatcaaatacataatctatgtccctagcatgagagaaacactactgtagtttatttattagctaatgatgatctattatacctttggtggcgacatcatttttcctgcttaaacaaggcattgtacggatccctgtgcagagtatgaacttacgacatgagcctttcaatcaaaggggagaaagttggaagatgatgtctagccatgtaaagagaatgagaattggccaatgtccataactcttccaagatttgagccagagggcagggggtgggggtggagttaaagagttcattgctggcaaaccatttagccttaggggatgatcattgctgctaatctccaccttaatttagtagtgttcatgttaattaggctacaaatcctgtggcgaaggtctaacacaagcttggataagtaagagaagtgagtgtcaaaatggcacattatttcatttttagtttcatggagatacccagtttgagcagtatctaggtacgaggagttacaaatttgtttatgttatgtattgtgctcttgcgtcatactgataagagaaccgtgatgacaaaatccacctgttttggtgtttaccttgagccttgtaaaggttttcattaacatttcatcatgcttcacaatcagatgtgtttcattttcaaggaaaatgactacattacatattttacatgattgtgaactgaatcagaaccgaatgtttgtgtcactgattttctgatgtgcaaac

SEQ ID NO: 13638 - DNA, 1999 bp, Zea Mays
atctgaagcaccctgttcgcaaaacctctcctgctcctgccgccgccgccatggagagtgcgccgcaaacccccaccatggcggccgccggcgatgtccttcgcgtggccgacctcccgggacgaggtcgcggtctcgtggccgcccgcaacgtccgcgagggtgaggtgctcctctccgagcctcccgtcctcctctacccgtcgaccctctcctccctccgctcatactgctccgcctgcttccgctccctcccccccgccgccacgattccctgcgtttcctgccgcgccgctgccttctgctccccggcctgcgccgccgcttcgcacccgcacctcctctgtgccgcgctctcccacggcggcggcgctggcctcgccgccgccgctcccaccgaggcgatccaagagccgctcctcttccttctctccgcctactccctcccggagtcaaccatgcgctccatgctctctctctcctcggcgccgcccccgcccccgggcgcgcaggacgccgcggggctccatgctgctgtggcagccctagcgccgccgcacatgcttccccagggattgtcgccagacctaacggcggctctcctcgccaaggaccggggcaacagcttcgccatcatggagccgtaccgacacgggatgtcgctcgagctcctgaaggcgcgggcctacgcagtctacccccgtgcttcgctgttcaaccatgactgcctgcccaatgcgtgccatttcgattaccccgacaggcctgggccagggaacactgacattgtggtgcgtgcactccatgacatacccgaggggagggaggtctgcatcagctactttgcggctaattggaggtatgctgataggcagcgcaggctgctggaggattatgggttccggtgcgagtgtgatcgctgtcaggtggagagtcagtggaaggatgatgatgataacaatggagatgatggggatgacaccatggaagaggagggtgaggatgatgttggagatagaggtgatgatgggattgaggaggaagagggggatggtgctaccaatggcggtgatgatgatttcccacatgcctacttctttgtcaggtacttatgtgacaatgagggttgttggggtatgcttgctccattgccaccctcaccaaacggcgacctgtcccatgtgtttgaatgcaatctctgtgggaagctgaggaaggaagaggatgtcattcctgatgagggcacttctggcatggtccattagtttgatgaaaacatactgatccgtgtgctgcttcttttagtgggagtcagggaagtctgttgtttaaatctactgactgaagtatcccagctccaatgagaggccgcataataaaaaatccaaaagagtatgaacttacgacatgagcctttcaatcaaaggggagaaagttggaagatgatgtctagccatgtaaagagaatgagaattggccaatgtccataactcttccaagatttgagccagagggcagggggtgggggtggagttaaagagttcattgctggcaaaccatttagccttaggggatgatcattgctgctaatctccaccttaatttagtagtgttcatgttaattaggctacaaatcctgtggcgaaggtctaacacaagcttggataagtaagagaagtgagtgtcaaaatggcacattatttcatttttagtttcatggagatacccagtttgagcagtatctaggtacgaggagttacaaatttgtttatgttatgtattgtgctcttgcgtcatactgataagagaaccgtgatgacaaaatccacctgttttggtgtttaccttgagccttgtaaaggttttcattaacatttcatcatgcttcacaatcagatgtgtttcattttcaaggaaaatgactacattacatattttacatgattgtgaactgaatcagaaccgaatgtttgtgtcactgattttctgatgtgcaaac

SEQ ID NO: 13639 - DNA, 1464 bp, Zea Mays
atctgaagcaccctgttcgcaaaacctctcctgctcctgccgccgccgccatggagagtgcgccgcaaacccccaccatggcggccgccggcgatgtccttcgcgtggccgacctcccgggacgaggtcgcggtctcgtggccgcccgcaacgtccgcgagggtgaggtgctcctctccgagcctcccgtcctcctctacccgtcgaccctctcctccctccgctcatactgctccgcctgcttccgctccctcccccccgccgccacgattccctgcgtttcctgccgcgccgctgccttctgctccccggcctgcgccgccgcttcgcacccgcacctcctctgtgccgcgctctcccacggcggcggcgctggcctcgccgccgccgctcccaccgaggcgatccaagagccgctcctcttccttctctccgcctactccctcccggagtcaaccatgcgctccatgctctctctctcctcggcgccgcccccgcccccgggcgcgcaggacgccgcggggctccatgctgctgtggcagccctagcgccgccgcacatgcttccccagggattgtcgccagacctaacggcggctctcctcgccaaggaccggggcaacagcttcgccatcatggagccgtaccgacacgggatgtcgctcgagctcctgaaggcgcgggcctacgcagtctacccccgtgcttcgctgttcaaccatgactgcctgcccaatgcgtgccatttcgattaccccgacaggcctgggccagggaacactgacattgtggtgcgtgcactccatgacatacccgaggggagggaggtctgcatcagctactttgcggctaattggaggtatgctgataggcagcgcaggctgctggaggattatgggttccggtgcgagtgtgatcgctgtcaggtggagagtcagtggaaggatgatgatgataacaatggagatgatggggatgacaccatggaagaggagggtgaggatgatgttggagatagaggtgatgatgggattgaggaggaagagggggatggtgctaccaatggcggtgatgatgatttcccacatgcctacttctttgtcaggtacttatgtgacaatgagggttgttggggtatgcttgctccattgccaccctcaccaaacggcgacctgtcccatgtgtttgaatgcaatctctgtgggaagctgaggaaggaagaggatgtcattcctgatgagggcacttctggcatggtccattagtttgatgaaaacatactgatccgtgtgctgcttcttttagtggagctcttggtgaaggaagcctgttaattccttggctgttcggcagaaagggcatgggttcgattcatctggacgttggaattgttcatgtaataccatctcggccaaccaatccttcagctctggatcattctccgaaatatattcttcgggttct

SEQ ID NO: 13640 - DNA, 3606 bp, Zea Mays
ctcacccgctgcatcagcaggaccagtgagcgccagacctgctgtaaatttgctcgtggtgactcaaaaccagcgtgcggatgaatttctactcgtgttggagttttcagttgaagtgccaattccaatttgttcttgtggtgggctcctcacctacctcccgccgtactccagccaagcggccatccagctcttcctgcaccttcctttatgaacgtgcggagccagagagcaggctgctctctctctcccccctctcttctatctctctatctctacagtctacacaaatcatatttccccagcgtacaccttctgtctgctggattactgtggatttgaccatcgtacggcagcccacatcgctgcttctcccccggtcggttactgtagcaccaaagtttgatcttgccggggtttggaggaggtgaaaggttggggttttcttggtcctgggaatctgtccaggttcgtctctctatgtgaagattctgagaggttggctgtgagtcaagattttcggctcggcggtggcgaatcctctgctcctgactccgatttgggtattctcgttcttgattcctgactcttggcccgaaacttctgttctgttcttgccgaaatcgaagggaaacagctccattctggttgcaagttctttgtaaagattcgaggtggcattcagatttcggttacctgtgcttgtgctgttggttttgcttcgaaaatttgctgtttgggtagaccaaggttactgacggcctccgccgccgcagatgtgcggatttgagatggaatcgcagtgagagggttgaagagttgttcctgtccctgattctggtggcttagtttctggtgctctgtttggcaacttaagcgcttccattttcggttcatgcaagggtcgctttcggccatcggggagctctcagccgtgaggttttgaggtgggattgtgtcattgtgacctcaaggttgaaggagatgcttatggcgtcgatgtcagatagcgagacgaccaaccgaggcagcatgtgggaactggatcagaaccttgatcagcccatggacgaggaggccagtcaactgaagaacatgtacaaagaaaagaaattttcgtcaattttgttactgcggctcgcgtttcaaagtcttggggtagtgtttggggacttaggtacatcaccattgtatgttttctacaatatctttccacatggtgttgacgaagacgaggatgtaattggagctctatccttgatcatttacacactcaccctcatccctctgatgaagtatgtttttgtcgtcttgcgagctaacgacaatggtcaaggtggcacgtttgctctttattctctactgtgccggcatgcaaagcaaaagtgaagaaatggctagaggggcatgcatataaaaagaactgccttcttattcttgttctcattggtacctgtaccgccatcggagatgggattcttactcctgcaatctcagttctttctgcggcaggtggaataagggtccagaatcagaacatgagtacagatgtggtcgtaatcgtcgcggtgtttatattaattggcttattctgcatgcaacactatgggacagataaagttgggtggctctttgcacctttggtgctcctttggtttattctaatcgggagcgttgggttagtgaacatacgcaaatacaacagttctgttctaaaagcatacaatccagtctacatcttccggtattttagacgaggcaagtctgagatttggacatctcttggaggagtcatgcttagcatcacagggactgaagcattgtatgcagatctatgtcacttccctgtattggctattcagtggtgttcccctgccttctactggcgtacactgggcaggctgcctacatcattgacaacaaggatcatgtagttgatgccttctaccgctccattccagaggccatatactggccagccttcatcatagcaactcttgcggcagtagttgcaagtcaagcaaccatatctgctacctactcgataattaagcaagcccttgcactgggctgtttcccccgtgtcaatgttgtgcatacctcgaagaaatttctggggcagatttacatccctgacatcaattgggtacttatgattctttgcattgctgtaactgctggattcaagaatcaaagccagataggaaatgcatatggcactgcagtggtgattgttatgctagttacaacatttctcatggtcccagtgatgctgctggtatggaaaagccactggatacttgttgtcatcttcctcgtgctctccttgacggttgagctcccatacttcacggcgtgcataaataaagtggatcaaggtggctgggttccactagtcatcgcaataaccttcttcgtcatcatgcacgtgtggcatttctgcactgtgaagcgctacgaatttgagatgcacagcaaggtctccatggcgtggattctggggctagggccgagccttggccttgtcagggtccctgggataggcttcgtgtacacagagctggcgagtggcgtcccgcacatcttctcccatttcgtcaccaacctccctgccatccactcggtggttgtctttgtctgcgtcaagtacctcccggtctacacggtgccagccgaggaacgattcatcatgaagaggatcgggccaaagaactaccacatgttccgctgcgtcgcaaggtatggatacaaggacatccacaagaaagacgacaacttcgagaagatgctcctggacaggctcttgatcttcgtcaggctggagagcatgatggacggctactccgactccgaggacctcaccgtgatggagcacaaggccaagaggtccaccagatcacttcagctgatcgagaaggctgggggtaataacacgatgagctccaccggtgacctgagctactcatcgtcgcaggactccattgttttggccaagtcacccctgacagggaacagcctgacgagatactcaagccagacacccggcgacgagctggagttcctgaaccgaagcaaggatgccggcgtcgtgcacttcctcgggaacaccgtcgtgcaggcgcgcagggactcggggatcttgaagaaggtcgccgtgaattatgtgtatgccttccttcggaagatgtgcagggagaacagtgtgatcttcaacgttccacatgaaagcctcctgaatgtagggcagatatactatatatgaatatttttgttttagattcttctgttcggactcgaagtgaacattgtacatggtgatcagtcctagagtaaagcttttagtcaggtctgcggcttttagtcagttctgcgactttcttgagcacatagattactggtattgccattggcacattctcgatgaggcttgctgactgctgtatccgaatgccatttctcccaactgtcaaccattgctgctgctgctgctgcatacatcatataaccgtccggcttagaaaaatgatgtcatgtatatctccagattagtttttttcggccgtatgtgcagcgttcaggaatgcattatcgtatcacaaaaggaag

SEQ ID NO: 13641 - DNA, 3597 bp, Zea Mays
gtgagcgccagacctgctgtaaatttgctcgtggtgactcaaaaccagcgtgcggatgaatttctactcgtgttggagttttcagttgaagtgccaattccaatttgttcttgtggtgggctcctcacctacctcccgccgtactccagccaagcggccatccagctcttcctgcaccttcctttatgaacgtgcggagccagagagcaggctgctctctctctcccccctctcttctatctctctatctctacagtctacacaaatcatatttccccagcgtacaccttctgtctgctggattactgtggatttgaccatcgtacggcagcccacatcgctgcttctcccccggtcggttactgtagcaccaaagtttgatcttgccggggtttggaggaggtgaaaggttggggttttcttggtcctgggaatctgtccaggttcgtctctctatgtgaagattctgagaggttggctgtgagtcaagattttcggctcggcggtggcgaatcctctgctcctgactccgatttgggtattctcgttcttgattcctgactcttggcccgaaacttctgttctgttcttgccgaaatcgaagggaaacagctccattctggttgcaagttctttgtaaagattcgaggtggcattcagatttcggttacctgtgcttgtgctgttggttttgcttcgaaaatttgctgtttgggtagaccaaggttactgacggcctccgccgccgcagatgtgcggatttgagatggaatcgcagtgagagggttgaagagttgttcctgtccctgattctggtggcttagtttctggtgctctgtttggcaacttaagcgcttccattttcggttcatgcaagggtcgctttcggccatcggggagctctcagccgtgaggttttgaggtgggattgtgtcattgtgacctcaaggttgaaggagatgcttatggcgtcgatgtcagatagcgagacgaccaaccgaggcagcatgtgggaactggatcagaaccttgatcagcccatggacgaggaggccagtcaactgaagaacatgtacaaagaaaagaaattttcgtcaattttgttactgcggctcgcgtttcaaagtcttggggtagtgtttggggacttaggtacatcaccattgtatgttttctacaatatctttccacatggtgttgacgaagacgaggatgtaattggagctctatccttgatcatttacacactcaccctcatccctctgatgaagtatgtttttgtcgtcttgcgagctaacgacaatggtcaaggtggcacgtttgctctttattctctactgtgccggcatgcaaagcaaaagtgaagaaatggctagaggggcatgcatataaaaagaactgccttcttattcttgttctcattggtacctgtaccgccatcggagatgggattcttactcctgcaatctcagttctttctgcggcaggtggaataagggtccagaatcagaacatgagtacagatgtggtcgtaatcgtcgcggtgtttatattaattggcttattctgcatgcaacactatgggacagataaagttgggtggctctttgcacctttggtgctcctttggtttattctaatcgggagcgttgggttagtgaacatacgcaaatacaacagttctgttctaaaagcatacaatccagtctacatcttccggtattttagacgaggcaagtctgagatttggacatctcttggaggagtcatgcttagcatcacagggactgaagcattgtatgcagatctatgtcacttccctgtattggctattcagtttgcgttcaccttagtggtgttcccctgccttctactggcgtacactgggcaggctgcctacatcattgacaacaaggatcatgtagttgatgccttctaccgctccattccagaggccatatactggccagccttcatcatagcaactcttgcggcagtagttgcaagtcaagcaaccatatctgctacctactcgataattaagcaagcccttgcactgggctgtttcccccgtgtcaatgttgtgcatacctcgaagaaatttctggggcagatttacatccctgacatcaattgggtacttatgattctttgcattgctgtaactgctggattcaagaatcaaagccagataggaaatgcatatggcactgcagtggtgattgttatgctagttacaacatttctcatggtcccagtgatgctgctggtatggaaaagccactggatacttgttgtcatcttcctcgtgctctccttgacggttgagctcccatacttcacggcgtgcataaataaagtggatcaaggtggctgggttccactagtcatcgcaataaccttcttcgtcatcatgcacgtgtggcatttctgcactgtgaagcgctacgaatttgagatgcacagcaaggtctccatggcgtggattctggggctagggccgagccttggccttgtcagggtccctgggataggcttcgtgtacacagagctggcgagtggcgtcccgcacatcttctcccatttcgtcaccaacctccctgccatccactcggtggttgtctttgtctgcgtcaagtacctcccggtctacacggtgccagccgaggaacgattcatcatgaagaggatcgggccaaagaactaccacatgttccgctgcgtcgcaaggtatggatacaaggacatccacaagaaagacgacaacttcgagaagatgctcctggacaggctcttgatcttcgtcaggctggagagcatgatggacggctactccgactccgaggacctcaccgtgatggagcacaaggccaagaggtccaccagatcacttcagctgatcgagaaggctgggggtaataacacgatgagctccaccggtgacctgagctactcatcgtcgcaggactccattgttttggccaagtcacccctgacagggaacagcctgacgagatactcaagccagacacccggcgacgagctggagttcctgaaccgaagcaaggatgccggcgtcgtgcacttcctcgggaacaccgtcgtgcaggcgcgcagggactcggggatcttgaagaaggtcgccgtgaattatgtgtatgccttccttcggaagatgtgcagggagaacagtgtgatcttcaacgttccacatgaaagcctcctgaatgtagggcagatatactatatatgaatatttttgttttagattcttctgttcggactcgaagtgaacattgtacatggtgatcagtcctagagtaaagcttttagtcaggtctgcggcttttagtcagttctgcgactttcttgagcacatagattactggtattgccattggcacattctcgatgaggcttgctgactgctgtatccgaatgccatttctcccaactgtcaaccattgctgctgctgctgctgcatacatcatataaccgtccggcttagaaaaatgatgtcatgtatatctccagattagtttttttcggccgtatgtgcagcgttcaggaatgcattatcgtatcacaaaaggaag

SEQ ID NO: 13642 - DNA, 3558 bp, Zea Mays
cttgtggtgggctcctcacctacctcccgccgtactccagccaagcggccatccagctcttcctgcaccttcctttatgaacgtgcggagccagagagcaggctgctctctctctcccccctctcttctatctctctatctctacagtctacacaaatcatatttccccagcgtacaccttctgtctgctggattactgtggatttgaccatcgtacggcagcccacatcgctgcttctcccccggtcggttactgtagcaccaaagtttgatcttgccggggtttggaggaggtgaaaggttggggttttcttggtcctgggaatctgtccaggttcgtctctctatgtgaagattctgagaggttggctgtgagtcaagattttcggctcggcggtggcgaatcctctgctcctgactccgatttgggtattctcgttcttgattcctgactcttggcccgaaacttctgttctgttcttgccgaaatcgaagggaaacagctccattctggttgcaagttctttgtaaagattcgaggtggcattcagatttcggttacctgtgcttgtgctgttggttttgcttcgaaaatttgctgtttgggtagaccaaggttactgacggcctccgccgccgcagatgtgcggatttgagatggaatcgcagtgagagggttgaagagttgttcctgtccctgattctggtggcttagtttctggtgctctgtttggcaacttaagcgcttccattttcggttcatgcaagggtcgctttcggccatcggggagctctcagccgtgaggttttgaggtgggattgtgtcattgtgacctcaaggttgaaggagatgcttatggcgtcgatgtcagatagcgagacgaccaaccgaggcagcatgtgggaactggatcagaaccttgatcagcccatggacgaggaggccagtcaactgaagaacatgtacaaagaaaagaaattttcgtcaattttgttactgcggctcgcgtttcaaagtcttggggtagtgtttggggacttaggtacatcaccattgtatgttttctacaatatctttccacatggtgttgacgaagacgaggatgtaattggagctctatccttgatcatttacacactcaccctcatccctctgatgaagtatgtttttgtcgtcttgcgagctaacgacaatggtcaaggtggcacgtttgctctttattctctactgtgccggcatgcaaaggtcagcactatacccaaccaacataagacagatgaagaattaacaacttatagtcggcaaacttatgaggagaattcacttgcagcaaaagtgaagaaatggctagaggggcatgcatataaaaagaactgccttcttattcttgttctcattggtacctgtaccgccatcggagatgggattcttactcctgcaatctcaggtggaataagggtccagaatcagaacatgagtacagatgtggtcgtaatcgtcgcggtgtttatattaattggcttattctgcatgcaacactatgggacagataaagttgggtggctctttgcacctttggtgctcctttggtttattctaatcgggagcgttgggttagtgaacatacgcaaatacaacagttctgttctaaaagcatacaatccagtctacatcttccggtattttagacgaggcaagtctgagatttggacatctcttggaggagtcatgcttagcatcacagggactgaagcattgtatgcagatctatgtcacttccctgtattggctattcagtttgcgttcaccttagtggtgttcccctgccttctactggcgtacactgggcaggctgcctacatcattgacaacaaggatcatgtagttgatgccttctaccgctccattccagaggccatatactggccagccttcatcatagcaactcttgcggcagtagttgcaagtcaagcaaccatatctgctacctactcgataattaagcaagcccttgcactgggctgtttcccccgtgtcaatgttgtgcatacctcgaagaaatttctggggcagatttacatccctgacatcaattgggtacttatgattctttgcattgctgtaactgctggattcaagaatcaaagccagataggaaatgcatatggcactgcagtggtgattgttatgctagttacaacatttctcatggtcccagtgatgctgctggtatggaaaagccactggatacttgttgtcatcttcctcgtgctctccttgacggttgagctcccatacttcacggcgtgcataaataaagtggatcaaggtggctgggttccactagtcatcgcaataaccttcttcgtcatcatgcacgtgtggcatttctgcactgtgaagcgctacgaatttgagatgcacagcaaggtctccatggcgtggattctggggctagggccgagccttggccttgtcagggtccctgggataggcttcgtgtacacagagctggcgagtggcgtcccgcacatcttctcccatttcgtcaccaacctccctgccatccactcggtggttgtctttgtctgcgtcaagtacctcccggtctacacggtgccagccgaggaacgattcatcatgaagaggatcgggccaaagaactaccacatgttccgctgcgtcgcaaggtatggatacaaggacatccacaagaaagacgacaacttcgagaagatgctcctggacaggctcttgatcttcgtcaggctggagagcatgatggacggctactccgactccgaggacctcaccgtgatggagcacaaggccaagaggtccaccagatcacttcagctgatcgagaaggctgggggtaataacacgatgagctccaccggtgacctgagctactcatcgtcgcaggactccattgttttggccaagtcacccctgacagggaacagcctgacgagatactcaagccagacacccggcgacgagctggagttcctgaaccgaagcaaggatgccggcgtcgtgcacttcctcgggaacaccgtcgtgcaggcgcgcagggactcggggatcttgaagaaggtcgccgtgaattatgtgtatgccttccttcggaagatgtgcagggagaacagtgtgatcttcaacgttccacatgaaagcctcctgaatgtagggcagatatactatatatgaatatttttgttttagattcttctgttcggactcgaagtgaacattgtacatggtgatcagtcctagagtaaagcttttagtcaggtctgcggcttttagtcagttctgcgactttcttgagcacatagattactggtattgccattggcacattctcgatgaggcttgctgactgctgtatccgaatgccatttctcccaactgtcaaccattgctgctgctgctgctgcatacatcatataaccgtccggcttagaaaaatgatgtcatgtatatctccagattagtttttttcggccgtatgtgcagcgttcaggaatgcattatcgtatcacaaaaggaag

SEQ ID NO: 13643 - DNA, 3310 bp, Zea Mays
gggctcctcacctacctcccgccgtactccagccaagcggccatccagctcttcctgcaccttcctttatgaacgtgcggagccagagagcaggctgctctctctctcccccctctcttctatctctctatctctacagtctacacaaatcatatttccccagcgtacaccttctgtctgctggattactgtggatttgaccatcgtacggcagcccacatcgctgcttctcccccggtcggttactgtagcaccaaagtttgatcttgccggggtttggaggaggtgaaaggttggggttttcttggtcctgggaatctgtccaggttcgtctctctatgtgaagattctgagaggttggctgtgagtcaagattttcggctcggcggtggcgaatcctctgctcctgactccgatttgggtattctcgttcttgattcctgactcttggcccgaaacttctgttctgttcttgccgaaatcgaagggaaacagctccattctggttgcaagttctttgtaaagattcgaggtggcattcagatttcggttacctgtgcttgtgctgttggttttgcttcgaaaatttgctgtttgggtagaccaaggttactgacggcctccgccgccgcagatgtgcggatttgagatggaatcgcagtgagagggttgaagagttgttcctgtccctgattctggtggcttagtttctggtgctctgtttggcaacttaagcgcttccattttcggttcatgcaagggtcgctttcggccatcggggagctctcagccgtgaggttttgaggtgggattgtgtcattgtgacctcaaggttgaaggagatgcttatggcgtcgatgtcagatagcgagacgaccaaccgaggcagcatgtgggaactggatcagaaccttgatcagcccatggacgaggaggccagtcaactgaagaacatgtacaaagaaaagaaattttcgtcaattttgttactgcggctcgcgtttcaaagtcttggggtagtgtttggggacttaggtacatcaccattgtatgttttctacaatatctttccacatggtgttgacgaagacgaggatgtaattggagctctatccttgatcatttacacactcaccctcatccctctgatgaagtatgtttttgtcgtcttgcgagctaacgacaatggtcaaggtggcacgtttgctctttattctctactgtgccggcatgcaaaggtcagcactatacccaaccaacataagacagatgaagaattaacaacttatagtcggcaaacttatgaggagaattcacttgcagcaaaagtgaagaaatggctagaggggcatgcatataaaaagaactgccttcttattcttgttctcattggtacctgtaccgccatcggagatgggattcttactcctgcaatctcagttctttctgcggcaggtggaataagggtccagaatcagaacatgagtacagatgtggtcgtaatcgtcgcggtgtttatattaattggcttattctgcatgcaacactatgggacagataaagttgggtggctctttgcacctttggtgctcctttggtttattctaatcgggagcgttgggttagtgaacatacgcaaatacaacagttctgttctaaaagcatacaatccagtctacatcttccggtattttagacgaggcaagtctgagatttggacatctcttggaggagtcatgcttagcatcacagggactgaagcattgtatgcagatctatgtcacttccctgtattggctattcagtttgcgttcaccttagtggtgttcccctgccttctactggcgtacactgggcaggctgcctacatcattgacaacaaggatcatgtagttgatgccttctaccgctccattccaggcactgcagtggtgattgttatgctagttacaacatttctcatggtcccagtgatgctgctggtatggaaaagccactggatacttgttgtcatcttcctcgtgctctccttgacggttgagctcccatacttcacggcgtgcataaataaagtggatcaaggtggctgggttccactagtcatcgcaataaccttcttcgtcatcatgcacgtgtggcatttctgcactgtgaagcgctacgaatttgagatgcacagcaaggtctccatggcgtggattctggggctagggccgagccttggccttgtcagggtccctgggataggcttcgtgtacacagagctggcgagtggcgtcccgcacatcttctcccatttcgtcaccaacctccctgccatccactcggtggttgtctttgtctgcgtcaagtacctcccggtctacacggtgccagccgaggaacgattcatcatgaagaggatcgggccaaagaactaccacatgttccgctgcgtcgcaaggtatggatacaaggacatccacaagaaagacgacaacttcgagaagatgctcctggacaggctcttgatcttcgtcaggctggagagcatgatggacggctactccgactccgaggacctcaccgtgatggagcacaaggccaagaggtccaccagatcacttcagctgatcgagaaggctgggggtaataacacgatgagctccaccggtgacctgagctactcatcgtcgcaggactccattgttttggccaagtcacccctgacagggaacagcctgacgagatactcaagccagacacccggcgacgagctggagttcctgaaccgaagcaaggatgccggcgtcgtgcacttcctcgggaacaccgtcgtgcaggcgcgcagggactcggggatcttgaagaaggtcgccgtgaattatgtgtatgccttccttcggaagatgtgcagggagaacagtgtgatcttcaacgttccacatgaaagcctcctgaatgtagggcagatatactatatatgaatatttttgttttagattcttctgttcggactcgaagtgaacattgtacatggtgatcagtcctagagtaaagcttttagtcaggtctgcggcttttagtcagttctgcgactttcttgagcacatagattactggtattgccattggcacattctcgatgaggcttgctgactgctgtatccgaatgccatttctcccaactgtcaaccattgctgctgctgctgctgcatacatcatataaccgtccggcttagaaaaatgatgtcatgtatatctccagattagtttttttcggccgtatgtgcagcgttcaggaatgcattatcgtatcacaaaaggaag

SEQ ID NO: 13644 - DNA, 3567 bp, Zea Mays
cggccatccagctcttcctgcaccttcctttatgaacgtgcggagccagagagcaggctgctctctctctcccccctctcttctatctctctatctctacagtctacacaaatcatatttccccagcgtacaccttctgtctgctggattactgtggatttgaccatcgtacggcagcccacatcgctgcttctcccccggtcggttactgtagcaccaaagtttgatcttgccggggtttggaggaggtgaaaggttggggttttcttggtcctgggaatctgtccaggttcgtctctctatgtgaagattctgagaggttggctgtgagtcaagattttcggctcggcggtggcgaatcctctgctcctgactccgatttgggtattctcgttcttgattcctgactcttggcccgaaacttctgttctgttcttgccgaaatcgaagggaaacagctccattctggttgcaagttctttgtaaagattcgaggtggcattcagatttcggttacctgtgcttgtgctgttggttttgcttcgaaaatttgctgtttgggtagaccaaggttactgacggcctccgccgccgcagatgtgcggatttgagatggaatcgcagtgagagggttgaagagttgttcctgtccctgattctggtggcttagtttctggtgctctgtttggcaacttaagcgcttccattttcggttcatgcaagggtcgctttcggccatcggggagctctcagccgtgaggttttgaggtgggattgtgtcattgtgacctcaaggttgaaggagatgcttatggcgtcgatgtcagatagcgagacgaccaaccgaggcagcatgtgggaactggatcagaaccttgatcagcccatggacgaggaggccagtcaactgaagaacatgtacaaagaaaagaaattttcgtcaattttgttactgcggctcgcgtttcaaagtcttggggtagtgtttggggacttaggtacatcaccattgtatgttttctacaatatctttccacatggtgttgacgaagacgaggatgtaattggagctctatccttgatcatttacacactcaccctcatccctctgatgaagtatgtttttgtcgtcttgcgagctaacgacaatggtcaagaatctcatgacaaaacagtgctctagtgaaacaaaggatttgtgtcgagtatcaccacggtttaaatatgagatgtcagagtgattgctatgcatcactttactaaccatgaaatctgtagaaggtggcacgtttgctctttattctctactgtgccggcatgcaaagcaaaagtgaagaaatggctagaggggcatgcatataaaaagaactgccttcttattcttgttctcattggtacctgtaccgccatcggagatgggattcttactcctgcaatctcagttctttctgcggcaggtggaataagggtccagaatcagaacatgagtacagatgtggtcgtaatcgtcgcggtgtttatattaattggcttattctgcatgcaacactatgggacagataaagttgggtggctctttgcacctttggtgctcctttggtttattctaatcgggagcgttgggttagtgaacatacgcaaatacaacagttctgttctaaaagcatacaatccagtctacatcttccggtattttagacgaggcaagtctgagatttggacatctcttggaggagtcatgcttagcatcacagggactgaagcattgtatgcagatctatgtcacttccctgtattggctattcagtttgcgttcaccttagtggtgttcccctgccttctactggcgtacactgggcaggctgcctacatcattgacaacaaggatcatgtagttgatgccttctaccgctccattccagaggccatatactggccagccttcatcatagcaactcttgcggcagtagttgcaagtcaagcaaccatatctgctacctactcgataattaagcaagcccttgcactgggctgtttcccccgtgtcaatgttgtgcatacctcgaagaaatttctggggcagatttacatccctgacatcaattgggtacttatgattctttgcattgctgtaactgctggattcaagaatcaaagccagataggaaatgcatatggcactgcagtggtgattgttatgctagttacaacatttctcatggtcccagtgatgctgctggtatggaaaagccactggatacttgttgtcatcttcctcgtgctctccttgacggttgagctcccatacttcacggcgtgcataaataaagtggatcaaggtggctgggttccactagtcatcgcaataaccttcttcgtcatcatgcacgtgtggcatttctgcactgtgaagcgctacgaatttgagatgcacagcaaggtctccatggcgtggattctggggctagggccgagccttggccttgtcagggtccctgggataggcttcgtgtacacagagctggcgagtggcgtcccgcacatcttctcccatttcgtcaccaacctccctgccatccactcggtggttgtctttgtctgcgtcaagtacctcccggtctacacggtgccagccgaggaacgattcatcatgaagaggatcgggccaaagaactaccacatgttccgctgcgtcgcaaggtatggatacaaggacatccacaagaaagacgacaacttcgagaagatgctcctggacaggctcttgatcttcgtcaggctggagagcatgatggacggctactccgactccgaggacctcaccgtgatggagcacaaggccaagaggtccaccagatcacttcagctgatcgagaaggctgggggtaataacacgatgagctccaccggtgacctgagctactcatcgtcgcaggactccattgttttggccaagtcacccctgacagggaacagcctgacgagatactcaagccagacacccggcgacgagctggagttcctgaaccgaagcaaggatgccggcgtcgtgcacttcctcgggaacaccgtcgtgcaggcgcgcagggactcggggatcttgaagaaggtcgccgtgaattatgtgtatgccttccttcggaagatgtgcagggagaacagtgtgatcttcaacgttccacatgaaagcctcctgaatgtagggcagatatactatatatgaatatttttgttttagattcttctgttcggactcgaagtgaacattgtacatggtgatcagtcctagagtaaagcttttagtcaggtctgcggcttttagtcagttctgcgactttcttgagcacatagattactggtattgccattggcacattctcgatgaggcttgctgactgctgtatccgaatgccatttctcccaactgtcaaccattgctgctgctgctgctgcatacatcatataaccgtccggcttagaaaaatgatgtcatgtatatctccagattagtttttttcggccgtatgtgcagcgttcaggaatgcattatcgtatcacaaaaggaag

SEQ ID NO: 13645 - DNA, 1142 bp, Zea Mays
ctcgctttagccctcaaaagtctcctacccctttctctgtgccagaaaagggacgggaaggtgccaataaattgcgaggatgccgctttatctcttctcctctcccgccgccgccaagctcgccaccggcccacacgcgtccctgcaccggcggcgccagttcctcttccgagttccccaccgccccagccgccgcgccccactgctaacttcggcggctgagcgtccagcagggcgcaccatggctactgcggataccggagcgtccacggtgaccgattcgaggctccgaggagtgaagcaagcactgatatcattgtcagataaaacagacctggctaatcttggaaatggtcttcagcgtttggggttttctattatttccactggtggcacggcatcaagtttggaagcatctggtgttaatgttacaaaagttgaagaaattacacagtttcctgaaatgcttgatggaagagtaaaaacattgcaccccagtatacatggtggtattcttgcgcgaagagaccaggagcaccatctgaaagcactgaaagagcatggcattgggacatttgatgtggttgtagtgaatttgtatccattctatgataaggtcacctcaggtgcaatatcttttgaggatggcattgaaaatattgatattggtgggcctacattgatccgagctgctgccaagaatcataaggacgttcttgtcgttgttgatcataaagactatcctgctctactggaatatctagaagggaaacaagatgaccctgatttccgcaggacacttgcatggaaagcattccaacatgttgcttcctatgattctgctatctcggagtggttgtggaagcaatctaataaaggtgttgtcatttttctggtaaatgtgatgcttgtctaatagttttatcagccaattttcatagatgtttcgtctcatgcagcagattcatttcctcccagctttactgtgcccctcacaatgaagtctacacttcgctatggtgagaatcctcatcaaaaggctgccttttatggtgacaggagtctttctctagtaaatgctggcggtattgcaacagcaattcagcaccatggaaaggtgcaaaaatttagcagagggaaac

SEQ ID NO: 13646 - DNA, 2278 bp, Zea Mays
ctcgctttagccctcaaaagtctcctacccctttctctgtgccagaaaagggacgggaaggtgccaataaattgcgaggatgccgctttatctcttctcctctcccgccgccgccaagctcgccaccggcccacacgcgtccctgcaccggcggcgccagttcctcttccgagttccccaccgccccagccgccgcgccccactgctaacttcggcggctgagcgtccagcagggcgcaccatggctactgcggataccggagcgtccacggtgaccgattcgaggctccgagctacaggagtgaagcaagcactgatatcattgtcagataaaacagacctggctaatcttggaaatggtcttcagcgtttggggttttctattatttccactggtggcacggcatcaagtttggaagcatctggtgttaatgttacaaaagttgaagaaattacacagtttcctgaaatgcttgatggaagagtaaaaacattgcaccccagtatacatggtggtattcttgcgcgaagagaccaggagcaccatctgaaagcactgaaagagcatggcattgggacatttgatgtggttgtagtgaatttgtatccattctatgataaggtcacctcaggtgcaatatcttttgaggatggcattgaaaatattgatattggtgggcctacattgatccgagctgctgccaagaatcataaggacgttcttgtcgttgttgatcataaagactatcctgctctactggaatatctagaagggaaacaagatgaccctgatttccgcaggacacttgcatggaaagcattccaacatgttgcttcctatgattctgctatctcggagtggttgtggaagcaatctaataaagattcatttcctcccagctttactgtgcccctcacaatgaagtctacacttcgctatggtgagaatcctcatcaaaaggctgccttttatggtgacaggagtctttctctagtaaatgctggcggtattgcaacagcaattcagcaccatggaaaggaaatgtcctacaacaactatctggacgcggacgctgcgtggaactgcgtctcggagtttgagagcccgacttgcgtcgtggttaagcacacaaatccgtgtggcgtagcgtctcggcacgacatcctggaagcgtacaggttggctgtgagggcagaccccgtgagcgcgttcggaggcatagtcgccttcaacacgacggtcgacgaggatctcgcgagggagatccgggagttcaggaggccgacggacggcgagacgaggatgttctacgagatcgtggtggcgcctgggtacacggcggagggcctggaggtgctgaaagggaagtcgaagacgctgaggatactggaggcgaagcggaggaggagcgggaagggcacgctgctgtcgctgcggcaggtcggcggcggctggctggcccaggagcccgacgacgtgaccccggaggacgtggccttcacgaacgtgtccgagagggctcccgacgcccgtgagctctcggacgccaagttcgcgtgcctctgcgtcaagcacgtgaagagcaacgccattgtgatcgccaagaacagttgcatgctgggcatgggcagtggccagccgaaccggctggagagcctgaggatcgctttcaggaaggcaggggaggaggccaagggagctgctttggccagcgacgccttcttcccgttcgcttggaacgacgcggtggaggaggcgtgccagcgcggcgtggcggtgatcgcagagcccggcggcagcatccgggaccaggacgccgtggagtgctgcaacaagtacggggtggccctcgtcttcaccggcgtccggcacttcaggcactgatcgacggcgacggtggcagcggagaccgtgacgacggacgatgggagggacctctatatagctgcgtcgatctggccggtggctggaaggaaggatctggcgtttcatcccagcgctgatgccggctggcgtttcttggctactagggagactctgatggtgctgatacaaccaaatgtcgcctctcgagaggatgggtcggtgggtcccggtttgtatatatgacgtcgtcagcctggcaagaggttgattgagcttaatactaactcttgcggtggatggaaatcggaaacggtcgctgaccggtgggatcgcacagtctgctgctagaagcatgcaaaggctacatgccgtgttattattgttattaatatttattgctgtcacgttaca

SEQ ID NO: 13647 - DNA, 2286 bp, Zea Mays
ctcctacccctttctctgtgccagaaaagggacgggaaggtgccaataaattgcgaggatgccgctttatctcttctcctctcccgccgccgccaagctcgccaccggcccacacgcgtccctgcaccggcggcgccagttcctcttccgagttccccaccgccccagccgccgcgccccactgctaacttcggcggctgagcgtccagcagggcgcaccatggctactgcggataccggagcgtccacggtgaccgattcgaggctccgaggagtgaagcaagcactgatatcattgtcagataaaacagacctggctaatcttggaaatggtcttcagcgtttggggttttctattatttccactggtggcacggcatcaagtttggaagcatctggtgttaatgttacaaaagttgaagaaattacacagtttcctgaaatgcttgatggaagagtaaaaacattgcaccccagtatacatggtggtattcttgcgcgaagagaccaggagcaccatctgaaagcactgaaagagcatggcattgggacatttgatgtggttgtagtgaatttgtatccattctatgataaggtcacctcaggtgcaatatcttttgaggatggcattgaaaatattgatattggtgggcctacattgatccgagctgctgccaagaatcataaggacgttcttgtcgttgttgatcataaagactatcctgctctactggaatatctagaagggaaacaagatgaccctgatttccgcaggacacttgcatggaaagcattccaacatgttgcttcctatgattctgctatctcggagtggttgtggaagcaatctaataaagcagattcatttcctcccagctttactgtgcccctcacaatgaagtctacacttcgctatggtgagaatcctcatcaaaaggctgccttttatggtgacaggagtctttctctagtaaatgctggcggtattgcaacagcaattcagcaccatggaaagggctttgcaattttacgtacgtcgtcttacaggaaatgtcctacaacaactatctggacgcggacgctgcgtggaactgcgtctcggagtttgagagcccgacttgcgtcgtggttaagcacacaaatccgtgtggcgtagcgtctcggcacgacatcctggaagcgtacaggttggctgtgagggcagaccccgtgagcgcgttcggaggcatagtcgccttcaacacgacggtcgacgaggatctcgcgagggagatccgggagttcaggaggccgacggacggcgagacgaggatgttctacgagatcgtggtggcgcctgggtacacggcggagggcctggaggtgctgaaagggaagtcgaagacgctgaggatactggaggcgaagcggaggaggagcgggaagggcacgctgctgtcgctgcggcaggtcggcggcggctggctggcccaggagcccgacgacgtgaccccggaggacgtggccttcacgaacgtgtccgagagggctcccgacgcccgtgagctctcggacgccaagttcgcgtgcctctgcgtcaagcacgtgaagagcaacgccattgtgatcgccaagaacagttgcatgctgggcatgggcagtggccagccgaaccggctggagagcctgaggatcgctttcaggaaggcaggggaggaggccaagggagctgctttggccagcgacgccttcttcccgttcgcttggaacgacgcggtggaggaggcgtgccagcgcggcgtggcggtgatcgcagagcccggcggcagcatccgggaccaggacgccgtggagtgctgcaacaagtacggggtggccctcgtcttcaccggcgtccggcacttcaggcactgatcgacggcgacggtggcagcggagaccgtgacgacggacgatgggagggacctctatatagctgcgtcgatctggccggtggctggaaggaaggatctggcgtttcatcccagcgctgatgccggctggcgtttcttggctactagggagactctgatggtgctgatacaaccaaatgtcgcctctcgagaggatgggtcggtgggtcccggtttgtatatatgacgtcgtcagcctggcaagaggttgattgagcttaatactaactcttgcggtggatggaaatcggaaacggtcgctgaccggtgggatcgcacagtctgctgctagaagcatgcaaaggctacatgccgtgttattattgttattaatatttattgctgtcacgttaca

SEQ ID NO: 13648 - DNA, 1026 bp, Zea Mays
cagaaaagggacgggaaggtgccaataaattgcgaggatgccgctttatctcttctcctctcccgccgccgccaagctcgccaccggcccacacgcgtccctgcaccggcggcgccagttcctcttccgagttccccaccgccccagccgccgcgccccactgctaacttcggcggctgagcgtccagcagggcgcaccatggctactgcggataccggagcgtccacggtgaccgattcgaggctccgagctacaggagtgaagcaagcactgatatcattgtcagataaaacagacctggctaatcttggaaatggtcttcagcgtttggggttttctattatttccactggtggcacggcatcaagtttggaagcatctggtgttaatgttacaaaagttgaagaaattacacagtttcctgaaatgcttgatggaagagtaaaaacattgcaccccagtatacatggtggtattcttgcgcgaagagaccaggagcaccatctgaaagcactgaaagagcatggcattgggacatttgatgtggttgtagtgaatttgtatccattctatgataaggtcacctcaggtgcaatatcttttgaggatggcattgaaaatattgatattggtgggcctacattgatccgagctgctgccaagaatcataaggacgttcttgtcgttgttgatcataaagactatcctgctctactggaatatctagaagggaaacaagatgaccctgatttccgcaggacacttgcatggaaagcattccaacatgttgcttcctatgattctgctatctcggagtggttgtggaagcaatctaataaagcagattcatttcctcccagctttactgtgcccctcacaatgaagtctacacttcgctatggtgagaatcctcatcaaaaggctgccttttatggtgacaggagtctttctctagtaaatgctggcggtattgcaacagcaattcagcaccatggaaagggctttgcaattttacgtacgtcgtc

SEQ ID NO: 13649 - DNA, 2220 bp, Zea Mays
cagaaaagggacgggaaggtgccaataaattgcgaggatgccgctttatctcttctcctctcccgccgccgccaagctcgccaccggcccacacgcgtccctgcaccggcggcgccagttcctcttccgagttccccaccgccccagccgccgcgccccactgctaacttcggcggctgagcgtccagcagggcgcaccatggctactgcggataccggagcgtccacggtgaccgattcgaggctccgagctacaggagtgaagcaagcactgatatcattgtcagataaaacagacctggctaatcttggaaatggtcttcagcgtttggggttttctattatttccactggtggcacggcatcaagtttggaagcatctggtgttaatgttacaaaagttgaagaaattacacagtttcctgaaatgcttgatggaagagtaaaaacattgcaccccagtatacatggtggtattcttgcgcgaagagaccaggagcaccatctgaaagcactgaaagagcatggcattgggacatttgatgtggttgtagtgaatttgtatccattctatgataaggtcacctcaggtgcaatatcttttgaggatggcattgaaaatattgatattggtgggcctacattgatccgagctgctgccaagaatcataaggacgttcttgtcgttgttgatcataaagactatcctgctctactggaatatctagaagggaaacaagatgaccctgatttccgcaggacacttgcatggaaagcattccaacatgttgcttcctatgattctgctatctcggagtggttgtggaagcaatctaataaagctttactgtgcccctcacaatgaagtctacacttcgctatggtgagaatcctcatcaaaaggctgccttttatggtgacaggagtctttctctagtaaatgctggcggtattgcaacagcaattcagcaccatggaaaggaaatgtcctacaacaactatctggacgcggacgctgcgtggaactgcgtctcggagtttgagagcccgacttgcgtcgtggttaagcacacaaatccgtgtggcgtagcgtctcggcacgacatcctggaagcgtacaggttggctgtgagggcagaccccgtgagcgcgttcggaggcatagtcgccttcaacacgacggtcgacgaggatctcgcgagggagatccgggagttcaggaggccgacggacggcgagacgaggatgttctacgagatcgtggtggcgcctgggtacacggcggagggcctggaggtgctgaaagggaagtcgaagacgctgaggatactggaggcgaagcggaggaggagcgggaagggcacgctgctgtcgctgcggcaggtcggcggcggctggctggcccaggagcccgacgacgtgaccccggaggacgtggccttcacgaacgtgtccgagagggctcccgacgcccgtgagctctcggacgccaagttcgcgtgcctctgcgtcaagcacgtgaagagcaacgccattgtgatcgccaagaacagttgcatgctgggcatgggcagtggccagccgaaccggctggagagcctgaggatcgctttcaggaaggcaggggaggaggccaagggagctgctttggccagcgacgccttcttcccgttcgcttggaacgacgcggtggaggaggcgtgccagcgcggcgtggcggtgatcgcagagcccggcggcagcatccgggaccaggacgccgtggagtgctgcaacaagtacggggtggccctcgtcttcaccggcgtccggcacttcaggcactgatcgacggcgacggtggcagcggagaccgtgacgacggacgatgggagggacctctatatagctgcgtcgatctggccggtggctggaaggaaggatctggcgtttcatcccagcgctgatgccggctggcgtttcttggctactagggagactctgatggtgctgatacaaccaaatgtcgcctctcgagaggatgggtcggtgggtcccggtttgtatatatgacgtcgtcagcctggcaagaggttgattgagcttaatactaactcttgcggtggatggaaatcggaaacggtcgctgaccggtgggatcgcacagtctgctgctagaagcatgcaaaggctacatgccgtgttattattgttattaatatttattgctgtcacgttaca

SEQ ID NO: 13650 - DNA, 2233 bp, Zea Mays
cagaaaagggacgggaaggtgccaataaattgcgaggatgccgctttatctcttctcctctcccgccgccgccaagctcgccaccggcccacacgcgtccctgcaccggcggcgccagttcctcttccgagttccccaccgccccagccgccgcgccccactgctaacttcggcggctgagcgtccagcagggcgcaccatggctactgcggataccggagcgtccacggtgaccgattcgaggctccgaggagtgaagcaagcactgatatcattgtcagataaaacagacctggctaatcttggaaatggtcttcagcgtttggggttttctattatttccactggtggcacggcatcaagtttggaagcatctggtgttaatgttacaaaagttgaagaaattacacagtttcctgaaatgcttgatggaagagtaaaaacattgcaccccagtatacatggtggtattcttgcgcgaagagaccaggagcaccatctgaaagcactgaaagagcatggcattgggacatttgatgtggttgtagtgaatttgtatccattctatgataaggtcacctcaggtgcaatatcttttgaggatggcattgaaaatattgatattggtgggcctacattgatccgagctgctgccaagaatcataaggacgttcttgtcgttgttgatcataaagactatcctgctctactggaatatctagaagggaaacaagatgaccctgatttccgcaggacacttgcatggaaagcattccaacatgttgcttcctatgattctgctatctcggagtggttgtggaagcaatctaataaagcagattcatttcctcccagctttactgtgcccctcacaatgaagtctacacttcgctatggtgagaatcctcatcaaaaggctgccttttatggtgacaggagtctttctctagtaaatgctggcggtattgcaacagcaattcagcaccatggaaaggaaatgtcctacaacaactatctggacgcggacgctgcgtggaactgcgtctcggagtttgagagcccgacttgcgtcgtggttaagcacacaaatccgtgtggcgtagcgtctcggcacgacatcctggaagcgtacaggttggctgtgagggcagaccccgtgagcgcgttcggaggcatagtcgccttcaacacgacggtcgacgaggatctcgcgagggagatccgggagttcaggaggccgacggacggcgagacgaggatgttctacgagatcgtggtggcgcctgggtacacggcggagggcctggaggtgctgaaagggaagtcgaagacgctgaggatactggaggcgaagcggaggaggagcgggaagggcacgctgctgtcgctgcggcaggtcggcggcggctggctggcccaggagcccgacgacgtgaccccggaggacgtggccttcacgaacgtgtccgagagggctcccgacgcccgtgagctctcggacgccaagttcgcgtgcctctgcgtcaagcacgtgaagagcaacgccattgtgatcgccaagaacagttgcatgctgggcatgggcagtggccagccgaaccggctggagagcctgaggatcgctttcaggaaggcaggggaggaggccaagggagctgctttggccagcgacgccttcttcccgttcgcttggaacgacgcggtggaggaggcgtgccagcgcggcgtggcggtgatcgcagagcccggcggcagcatccgggaccaggacgccgtggagtgctgcaacaagtacggggtggccctcgtcttcaccggcgtccggcacttcaggcactgatcgacggcgacggtggcagcggagaccgtgacgacggacgatgggagggacctctatatagctgcgtcgatctggccggtggctggaaggaaggatctggcgtttcatcccagcgctgatgccggctggcgtttcttggctactagggagactctgatggtgctgatacaaccaaatgtcgcctctcgagaggatgggtcggtgggtcccggtttgtatatatgacgtcgtcagcctggcaagaggttgattgagcttaatactaactcttgcggtggatggaaatcggaaacggtcgctgaccggtgggatcgcacagtctgctgctagaagcatgcaaaggctacatgccgtgttattattgttattaatatttattgctgtcacgttaca

SEQ ID NO: 13651 - DNA, 2214 bp, Zea Mays
cagaaaagggacgggaaggtgccaataaattgcgaggatgccgctttatctcttctcctctcccgccgccgccaagctcgccaccggcccacacgcgtccctgcaccggcggcgccagttcctcttccgagttccccaccgccccagccgccgcgccccactgctaacttcggcggctgagcgtccagcagggcgcaccatggctactgcggataccggagcgtccacggtgaccgattcgaggctccgaggagtgaagcaagcactgatatcattgtcagataaaacagacctggctaatcttggaaatggtcttcagcgtttggggttttctattatttccactggtggcacggcatcaagtttggaagcatctggtgttaatgttacaaaagttgaagaaattacacagtttcctgaaatgcttgatggaagagtaaaaacattgcaccccagtatacatggtggtattcttgcgcgaagagaccaggagcaccatctgaaagcactgaaagagcatggcattgggacatttgatgtggttgtagtgaatttgtatccattctatgataaggtcacctcaggtgcaatatcttttgaggatggcattgaaaatattgatattggtgggcctacattgatccgagctgctgccaagaatcataaggacgttcttgtcgttgttgatcataaagactatcctgctctactggaatatctagaagggaaacaagatgaccctgatttccgcaggacacttgcatggaaagcattccaacatgttgcttcctatgattctgctatctcggagtggttgtggaagcaatctaataaagctttactgtgcccctcacaatgaagtctacacttcgctatggtgagaatcctcatcaaaaggctgccttttatggtgacaggagtctttctctagtaaatgctggcggtattgcaacagcaattcagcaccatggaaaggaaatgtcctacaacaactatctggacgcggacgctgcgtggaactgcgtctcggagtttgagagcccgacttgcgtcgtggttaagcacacaaatccgtgtggcgtagcgtctcggcacgacatcctggaagcgtacaggttggctgtgagggcagaccccgtgagcgcgttcggaggcatagtcgccttcaacacgacggtcgacgaggatctcgcgagggagatccgggagttcaggaggccgacggacggcgagacgaggatgttctacgagatcgtggtggcgcctgggtacacggcggagggcctggaggtgctgaaagggaagtcgaagacgctgaggatactggaggcgaagcggaggaggagcgggaagggcacgctgctgtcgctgcggcaggtcggcggcggctggctggcccaggagcccgacgacgtgaccccggaggacgtggccttcacgaacgtgtccgagagggctcccgacgcccgtgagctctcggacgccaagttcgcgtgcctctgcgtcaagcacgtgaagagcaacgccattgtgatcgccaagaacagttgcatgctgggcatgggcagtggccagccgaaccggctggagagcctgaggatcgctttcaggaaggcaggggaggaggccaagggagctgctttggccagcgacgccttcttcccgttcgcttggaacgacgcggtggaggaggcgtgccagcgcggcgtggcggtgatcgcagagcccggcggcagcatccgggaccaggacgccgtggagtgctgcaacaagtacggggtggccctcgtcttcaccggcgtccggcacttcaggcactgatcgacggcgacggtggcagcggagaccgtgacgacggacgatgggagggacctctatatagctgcgtcgatctggccggtggctggaaggaaggatctggcgtttcatcccagcgctgatgccggctggcgtttcttggctactagggagactctgatggtgctgatacaaccaaatgtcgcctctcgagaggatgggtcggtgggtcccggtttgtatatatgacgtcgtcagcctggcaagaggttgattgagcttaatactaactcttgcggtggatggaaatcggaaacggtcgctgaccggtgggatcgcacagtctgctgctagaagcatgcaaaggctacatgccgtgttattattgttattaatatttattgctgtcacgttaca

SEQ ID NO: 13652 - DNA, 3646 bp, Zea Mays
atcaagagagtgcttgcgtgcgctgttttggtaaagtggagaggaaggcgagtagagccagctgacgagtgacgccacgcgtgcgtgcgtgctgtgcctgcctggcgggcttctggccttctcctccctctctgcacggggaaaagaatagaaaggagccttccgctctcacgacgtctcgacccgtcgaccgcttcgccaccacaaccccgccggaaccctaaccctagcagcgggagccccatccgccgggccgtaccgatgggacggtctgtgaattgaagtagcttggaagagcggtgttatgcactgggatgggagacaatgtcctaaaattcagggtggggttgttaggataaactgcattatggattctggcaacagttcgtgctctagaacacgaagtgggctttgatgtttcgagttccagaactcgaagtggccttctaaggataaagagctttctggattcccatgatggttcattttcgaggtcacaaagtgaccatgtaggaggtagccctcctattgttgaggctataaatgatgaatcagttttgaaggagtctcctgatagattgatgaaagaagagatgcctgttacaactccaaatgggcttgttagacagagctttactgaacaggctgtaaccaaggacaagtcaggcatgaggacacttctcgatggatgtttgagtgaagatatgccttctagaacacggagtggacttgtcagaagaagccctactgttaagactctaagcaaggacaaatcagtcattaaggggctggcagatgggtgtctgaaagaagacaagcctcttggaacacgaagtggccttgtgagtggaagccttgctgccaaggttccaatcaaggctgaagtactcacaaaggggcagcatgatagatggctgaaaaatgacaaggctgctgcaatgcggagtgaccatggtggcagaagattggctgccaagactgtaagcgaggacaaaagaggcgttgagggtttgcctgatggatggcaaaaagaatacagacccaggaagaatggtccatgttcagatccgtactacattgatccagtcagtggatatgaattccgctctttgaaggatgtgcacaactatcttgaaactggagatattagccaatgcgctgtgacaccaaagaagagcaccatctgcgaagatataacagaaagtcaaactcatactagtacatcaccgcagcacatgaggcctggtactgcgaataagggtattcagtgtgaaatattaacttcggatggtatcatggcgccatgggaggataatggaaatgatactgaacataccatgttaccagagcctgagagcttgaaagcaactcaagggtatggcaacaagcttgaaacttcagaacccacgagggttcaaccggtttctccacataatggttcaagacaaaccaaatctgttaaaaggaaagaatcaaatgcagaggtcaaatccaagaagcgtaaaaccagttctgctgtgactcgtgttcgagcgtcgccccgcttagctgcattaaatgctcatcttgatgtaagcatcgaacatgaagatgacatggttagcacaaatcatgtggactgggtacagactattgaagagagagccatcgatcaggcacagaaaagccaatcaggctcttttgatcagatacatggtaatctggaaagcactttcagtcagttacagttgagccaagcagaccctgctaatggaatgcaggttatacaggcaaacactaccattcattcacaaccaagccaattggatactctgagtcctacacagaaaaaacaggaaaacagttccaaacagttacaatctgtggtcacagattcttcgattccaaaacgaaccacacagaaatgcactatagatcagccaagccagccagacataaatcatatacgcacagatcaggaattcactgggaatcagttcccctcgagcctaccagttgacactgttatttcattaggggatactgaagaattcacagcgggtcactcacagccaagaaatagtgacactgcaggacaaattcaggccaatgaggaaaatactgccgatcaagtacagttgagcctggcagagacagtcattctggtaccggctattcaagaatatgctgctggttattcactgctgagcaaagctgacactactgatcaaacacaggccaatcaggaatacattgctgatcaagtacaatcgtgcctaacagacgcactcattccagtaaaagctattgaggaatacacaactgattattcacatattagtaaagctgacattacaaatcaaatacaggtcaatcaggaaagcactgatgatcacttatatttacgtcaagtagactgtctcgctgaaatgcagataattgagcaaaatttgtccaagcaacctcagctgagccaaccagacactggggatcaaatacgaattgatctggaaagcactaccaatcacttgcaaccaaactacgatgaaaattctatgctgcaatctggtttctcttgggctcctgaacagaacagaggagcccctactacagatttctggaaaaatgttgaaagtcaggcgtcatcggtttccatgccaataaatggagcgcctctttcaagctttccagcaaatgtcagattccaaaatgcagcagcagcagcagcagcagcagaacctgctttgccaccacaggttgctccaaccgaaacaggttccgatcagtctgggttggccttccaatcccttttcggaaacatctggtcagatccttgcatcgagtttgctttcaagacccttacaggcgacattcctgttctcgacgacacaacggctgtcacagactacttcccagagcaacaagacttgaataaagacccagcgccaaactgtgcaggctctgtgtttgacagttcaagaaaccacacacaagtcgacgtcaaccttccaccgcctgctccggatggtttctacgatggcagctggttccctccccaatgaatttgagtgcagggaggggaaaaatgcaataacattttgtacctgtgaaaaggcaaatcagagaaggctagtggccgaaacataaaagcaatagtcgcactcttgttagggctctgatctgaatgtctaatcccacaggacacattttgtaaaaaggcggtagcttctttagccttattagactgttaatacactcaactgaatgatgtccagttccatcaacaaggcttcaccgagactgtcgagtgactgatcaggatcatgttttttttttcacgttttgcttctgtgcagttgcctaataaacccattcgttgtaaacaagccagttctaactttaaaaaaaagggcctgtgcatggcgctctaggttattgtgcagatggaactgttcttgatattttgaacacgcaaatgtagaggctttgctgtcacagttcttcagcggaattgcgaagaggtgatccgctgtttgtgtagtgtttgctgaatcttgattttgtagttggctacttgaatctgtgtatgttttggctcgcttgtagtaattgctgggctgctggctggtaaatgcgtcgagacattagagagaatggtagatagctg

SEQ ID NO: 13653 - DNA, 3644 bp, Zea Mays
gacgccacgcgtgcgtgcgtgctgtgcctgcctggcgggcttctggccttctcctccctctctgcacggggaaaagaatagaaaggagccttccgctctcacgacgtctcgacccgtcgaccgcttcgccaccacaaccccgccggaaccctaaccctagcagcgggagccccatccgccgggccgtaccgatgggacggtctgtgaattgaagtagcttggaagagcggtgttatgcactgggatgggagacaatgtcctaaaattcagggtggggttgttaggataaactgcattatggattctggcaacagttcgtgctctagaacacgaagtgggcttgtaaggaaaaaagacacatttgctctcagtagatcttcatgttcaagaactcgaagtggacttctaagagtaaagagctctgtggattccagtgatgtttcgagttccagaactcgaagtggccttctaaggataaagagctttctggattcccatgatggttcattttcgaggtcacaaagtgaccatgtaggaggtagccctcctattgttgaggctataaatgatgaatcagttttgaaggagtctcctgatagattgatgaaagaagagatgcctgttacaactccaaatgggcttgttagacagagctttactgaacaggctgtaaccaaggacaagtcaggcatgaggacacttctcgatggatgtttgagtgaagatatgccttctagaacacggagtggacttgtcagaagaagccctactgttaagactctaagcaaggacaaatcagtcattaaggggctggcagatgggtgtctgaaagaagacaagcctcttggaacacgaagtggccttgttccaatcaaggctgaagtactcacaaaggggcagcatgatagatggctgaaaaatgacaaggctgctgcaatgcggagtgaccatggtggcagaagattggctgccaagactgtaagcgaggacaaaagaggcgttgagggtttgcctgatggatggcaaaaagaatacagacccaggaagaatggtccatgttcagatccgtactacattgatccagtcagtggatatgaattccgctctttgaaggatgtgcacaactatcttgaaactggagatattagccaatgcgctgtgacaccaaagaagagcaccatctgcgaagatataacagaaagtcaaactcatactagtacatcaccgcagcacatgaggcctggtactgcgaataagggtattcagtgtgaaatattaacttcggatggtatcatggcgccatgggaggataatggaaatgatactgaacataccatgttaccagagcctgagagcttgaaagcaactcaagggtatggcaacaagcttgaaacttcagaacccacgagggttcaaccggtttctccacataatggttcaagacaaaccaaatctgttaaaaggaaagaatcaaatgcagaggtcaaatccaagaagcgtaaaaccagttctgctgtgactcgtgttcgagcgtcgccccgcttagctgcattaaatgctcatcttgatgtaagcatcgaacatgaagatgacatggttagcacaaatcatgtggactgggtacagactattgaagagagagccatcgatcaggcacagaaaagccaatcaggctcttttgatcagatacatggtaatctggaaagcactttcagtcagttacagttgagccaagcagaccctgctaatggaatgcaggttatacaggcaaacactaccattcattcacaaccaagccaattggatactctgagtcctacacagaaaaaacaggaaaacagttccaaacagttacaatctgtggtcacagattcttcgattccaaaacgaaccacacagaaatgcactatagatcagccaagccagccagacataaatcatatacgcacagatcaggaattcactgggaatcagttcccctcgagcctaccagttgacactgttatttcattaggggatactgaagaattcacagcgggtcactcacagccaagaaatagtgacactgcaggacaaattcaggccaatgaggaaaatactgccgatcaagtacagttgagcctggcagagacagtcattctggtaccggctattcaagaatatgctgctggttattcactgctgagcaaagctgacactactgatcaaacacaggccaatcaggaatacattgctgatcaagtacaatcgtgcctaacagacgcactcattccagtaaaagctattgaggaatacacaactgattattcacatattagtaaagctgacattacaaatcaaatacaggtcaatcaggaaagcactgatgatcacttatatttacgtcaagtagactgtctcgctgaaatgcagataattgagcaaaatttgtccaagcaacctcagctgagccaaccagacactggggatcaaatacgaattgatctggaaagcactaccaatcacttgcaaccaaactacgatgaaaattctatgctgcaatctggtttctcttgggctcctgaacagaacagaggagcccctactacagatttctggaaaaatgttgaaagtcaggcgtcatcggtttccatgccaataaatggagcgcctctttcaagctttccagcaaatgtcagattccaaaatgcagcagcagcagcagcagcagcagaacctgctttgccaccacaggttgctccaaccgaaacaggttccgatcagtctgggttggccttccaatcccttttcggaaacatctggtcagatccttgcatcgagtttgctttcaagacccttacaggcgacattcctgttctcgacgacacaacggctgtcacagactacttcccagagcaacaagacttgaataaagacccagcgccaaactgtgcaggctctgtgtttgacagttcaagaaaccacacacaagtcgacgtcaaccttccaccgcctgctccggatggtttctacgatggcagctggttccctccccaatgaatttgagtgcagggaggggaaaaatgcaataacattttgtacctgtgaaaaggcaaatcagagaaggctagtggccgaaacataaaagcaatagtcgcactcttgttagggctctgatctgaatgtctaatcccacaggacacattttgtaaaaaggcggtagcttctttagccttattagactgttaatacactcaactgaatgatgtccagttccatcaacaaggcttcaccgagactgtcgagtgactgatcaggatcatgttttttttttcacgttttgcttctgtgcagttgcctaataaacccattcgttgtaaacaagccagttctaactttaaaaaaaagggcctgtgcatggcgctctaggttattgtgcagatggaactgttcttgatattttgaacacgcaaatgtagaggctttgctgtcacagttcttcagcggaattgcgaagaggtgatccgctgtttgtgtagtgtttgctgaatcttgattttgtagttggctacttgaatctgtgtatgttttggctcgcttgtagtaattgctgggctgctggctggtaaatgcgtcgagacattagagagaatggtagatagctg

SEQ ID NO: 13654 - DNA, 3483 bp, Zea Mays
ccgctctcacgacgtctcgacccgtcgaccgcttcgccaccacaaccccgccggaaccctaaccctagcagcgggagccccatccgccgggccgtaccgatgggacggtctgtgaattgaagtagcttggaagagcggtgttatgcactgggatgggagacaatgtcctaaaattcagggtggggttgttaggataaactgcattatggattctggcaacagttcgtgctctagaacacgaagtgggcttgtaaggaaaaaagacacatttgctctcagtagatcttcatgttcaagaactcgaagtggacttctaagagtaaagagctctgtggattccagtgatgtttcgagttccagaactcgaagtggccttctaaggataaagagctttctggattcccatgatggttcattttcgaggtcacaaagtgaccatgtaggaggtagccctcctattgttgaggctataaatgatgaatcagttttgaaggagtctcctgatagattgatgaaagaagagatgcctgttacaactccaaatgggcttgttagacagagctttactgaacaggctgtaaccaaggacaagtcaggcatgaggacacttctcgatggatgtttgagtgaagatatgccttctagaacacggagtggacttgtcagaagaagccctactgttaagactctaagcaaggacaaatcagtcattaaggggctggcagatgggtgtctgaaagaagacaagcctcttggaacacgaagtggccttgtgagtggaagccttgctgccaaggttccaatcaaggctgaagtactcacaaaggggcagcatgatagatggctgaaaaatgacaaggctgctgcaatgcggagtgaccatggtggcagaagattggctgccaagtactacattgatccagtcagtggatatgaattccgctctttgaaggatgtgcacaactatcttgaaactggagatattagccaatgcgctgtgacaccaaagaagagcaccatctgcgaagatataacagaaagtcaaactcatactagtacatcaccgcagcacatgaggcctggtactgcgaataagggtattcagtgtgaaatattaacttcggatggtatcatggcgccatgggaggataatggaaatgatactgaacataccatgttaccagagcctgagagcttgaaagcaactcaagggtatggcaacaagcttgaaacttcagaacccacgagggttcaaccggtttctccacataatggttcaagacaaaccaaatctgttaaaaggaaagaatcaaatgcagaggtcaaatccaagaagcgtaaaaccagttctgctgtgactcgtgttcgagcgtcgccccgcttagctgcattaaatgctcatcttgatgtaagcatcgaacatgaagatgacatggttagcacaaatcatgtggactgggtacagactattgaagagagagccatcgatcaggcacagaaaagccaatcaggctcttttgatcagatacatggtaatctggaaagcactttcagtcagttacagttgagccaagcagaccctgctaatggaatgcaggttatacaggcaaacactaccattcattcacaaccaagccaattggatactctgagtcctacacagaaaaaacaggaaaacagttccaaacagttacaatctgtggtcacagattcttcgattccaaaacgaaccacacagaaatgcactatagatcagccaagccagccagacataaatcatatacgcacagatcaggaattcactgggaatcagttcccctcgagcctaccagttgacactgttatttcattaggggatactgaagaattcacagcgggtcactcacagccaagaaatagtgacactgcaggacaaattcaggccaatgaggaaaatactgccgatcaagtacagttgagcctggcagagacagtcattctggtaccggctattcaagaatatgctgctggttattcactgctgagcaaagctgacactactgatcaaacacaggccaatcaggaatacattgctgatcaagtacaatcgtgcctaacagacgcactcattccagtaaaagctattgaggaatacacaactgattattcacatattagtaaagctgacattacaaatcaaatacaggtcaatcaggaaagcactgatgatcacttatatttacgtcaagtagactgtctcgctgaaatgcagataattgagcaaaatttgtccaagcaacctcagctgagccaaccagacactggggatcaaatacgaattgatctggaaagcactaccaatcacttgcaaccaaactacgatgaaaattctatgctgcaatctggtttctcttgggctcctgaacagaacagaggagcccctactacagatttctggaaaaatgttgaaagtcaggcgtcatcggtttccatgccaataaatggagcgcctctttcaagctttccagcaaatgtcagattccaaaatgcagcagcagcagcagcagcagcagaacctgctttgccaccacaggttgctccaaccgaaacaggttccgatcagtctgggttggccttccaatcccttttcggaaacatctggtcagatccttgcatcgagtttgctttcaagacccttacaggcgacattcctgttctcgacgacacaacggctgtcacagactacttcccagagcaacaagacttgaataaagacccagcgccaaactgtgcaggctctgtgtttgacagttcaagaaaccacacacaagtcgacgtcaaccttccaccgcctgctccggatggtttctacgatggcagctggttccctccccaatgaatttgagtgcagggaggggaaaaatgcaataacattttgtacctgtgaaaaggcaaatcagagaaggctagtggccgaaacataaaagcaatagtcgcactcttgttagggctctgatctgaatgtctaatcccacaggacacattttgtaaaaaggcggtagcttctttagccttattagactgttaatacactcaactgaatgatgtccagttccatcaacaaggcttcaccgagactgtcgagtgactgatcaggatcatgttttttttttcacgttttgcttctgtgcagttgcctaataaacccattcgttgtaaacaagccagttctaactttaaaaaaaagggcctgtgcatggcgctctaggttattgtgcagatggaactgttcttgatattttgaacacgcaaatgtagaggctttgctgtcacagttcttcagcggaattgcgaagaggtgatccgctgtttgtgtagtgtttgctgaatcttgattttgtagttggctacttgaatctgtgtatgttttggctcgcttgtagtaattgctgggctgctggctggtaaatgcgtcgagacattagagagaatggtagatagctg

SEQ ID NO: 13655 - DNA, 1487 bp, Zea Mays
agttgttgctgctggaacttgctccttggaagcaacagcttggtcagatcacgcatagattctgacaacgacctgaaaaggattttccaactatgaaatgctgtggttgtgcaggctgcgttgagcggcgtcttaaccttgaagaaaagagatagattgtttgcaaggcaatgcaattcaagctgcttggcgcggtgcatttcatcatgttaaaatacccccaaatccaacgaccaaatagtgagctcagttcatgtatgcagatgagcgccaagaccattgtggcagcagcagctgctgcatttcttttctatactcacctctacttcccaaccgctgctcatctctactcctcaaccactccgttggctggaaccctctttgatctcacaatgcctcccccattgtacccactttcggctgattccacctctatccatcatcagtatggctgtagatacaacccgctgtgcgatgacttcccaccggatttccccccggccgacacgccagcactgtcgatcttctgcgtcgaccccaatggctgctgtgacttcacgaccgtgcaggcggcagtcaatgcggtcccgaaccacagcagcaagaggaatgttgtgtggatcaacaggggcatctactttgagaaggtgacagtcccggcatccaagcccaacatcacattccaggggcaggggttccacctgacagcgatcgcgtggaacgatactgccaagtccgcgaacgggacattctacagcgcctcagtctctgttttcgcatcaggattcatcggcaagaacataagcttcattaatgtagcaccgattccgaggcccggtgctgtcgatgcacaggcagtggcaatcaggatcaatggtgaccaagcagcattctggggttgtggcttctttggagcgcaagacacactccatgacgacagaggccgacattacttcaaggaatgtttcatccagggctccattgactttatctttggagatgctaggtcactctatgaaaattgcagattgatatccattgcagatccagtgccttcagggcaaagatcaattactggttcagtcactgcacatgcccgggaatcagaagatgacaacactggctactcatttgtcaattgtagcataggtggcaccggttccatatggcttggacgagcatggagaccatattctcgggtcatctttgcctacacatcaatgtcagacatcatagcttctgaaggatggaatgactggaatgaccaaacaagagatcagactgtattttatggagagtacaagtgtacaggtgatggtgcaaacctggcagatagagtgccttatgctcagaagcttagtgatgtgcaagtgttaccttacctaaacacatctttcatcgatggagatcaatggttaaaaccatactgtgactcactaatatctgcttgaagcaattctagttaccacgcaaaagagaaacagaaa

SEQ ID NO: 13656 - DNA, 2636 bp, Zea Mays
cttttggcctctaattagggggtggtaattgatcgcgatctaaatggttcttcataaaattactacattgatccagtcagtggatatgaattccgctctttgaaggatgtgcacaactatcttgaaactggagatattagccaatgcgctgtgacaccaaagaagagcaccatctgcgaagatataacagaaagtcaaactcatactagtacatcaccgcagcacatgaggcctggtactgcgaataagggtattcagtgtgaaatattaacttcggatggtatcatggcgccatgggaggataatggaaatgatactgaacataccatgttaccagagcctgagagcttgaaagcaactcaagggtatggcaacaagcttgaaacttcagaacccacgagggttcaaccggtttctccacataatggttcaagacaaaccaaatctgttaaaaggaaagaatcaaatgcagaggtcaaatccaagaagcgtaaaaccagttctgctgtgactcgtgttcgagcgtcgccccgcttagctgcattaaatgctcatcttgatgtaagcatcgaacatgaagatgacatggttagcacaaatcatgtggactgggtacagactattgaagagagagccatcgatcaggcacagaaaagccaatcaggctcttttgatcagatacatggtaatctggaaagcactttcagtcagttacagttgagccaagcagaccctgctaatggaatgcaggttatacaggcaaacactaccattcattcacaaccaagccaattggatactctgagtcctacacagaaaaaacaggaaaacagttccaaacagttacaatctgtggtcacagattcttcgattccaaaacgaaccacacagaaatgcactatagatcagccaagccagccagacataaatcatatacgcacagatcaggaattcactgggaatcagttcccctcgagcctaccagttgacactgttatttcattaggggatactgaagaattcacagcgggtcactcacagccaagaaatagtgacactgcaggacaaattcaggccaatgaggaaaatactgccgatcaagtacagttgagcctggcagagacagtcattctggtaccggctattcaagaatatgctgctggttattcactgctgagcaaagctgacactactgatcaaacacaggccaatcaggaatacattgctgatcaagtacaatcgtgcctaacagacgcactcattccagtaaaagctattgaggaatacacaactgattattcacatattagtaaagctgacattacaaatcaaatacaggtcaatcaggaaagcactgatgatcacttatatttacgtcaagtagactgtctcgctgaaatgcagataattgagcaaaatttgtccaagcaacctcagctgagccaaccagacactggggatcaaatacgaattgatctggaaagcactaccaatcacttgcaaccaaactacgatgaaaattctatgctgcaatctggtttctcttgggctcctgaacagaacagaggagcccctactacagatttctggaaaaatgttgaaagtcaggcgtcatcggtttccatgccaataaatggagcgcctctttcaagctttccagcaaatgtcagattccaaaatgcagcagcagcagcagcagcagcagaacctgctttgccaccacaggttgctccaaccgaaacaggttccgatcagtctgggttggccttccaatcccttttcggaaacatctggtcagatccttgcatcgagtttgctttcaagacccttacaggcgacattcctgttctcgacgacacaacggctgtcacagactacttcccagagcaacaagacttgaataaagacccagcgccaaactgtgcaggctctgtgtttgacagttcaagaaaccacacacaagtcgacgtcaaccttccaccgcctgctccggatggtttctacgatggcagctggttccctccccaatgaatttgagtgcagggaggggaaaaatgcaataacattttgtacctgtgaaaaggcaaatcagagaaggctagtggccgaaacataaaagcaatagtcgcactcttgttagggctctgatctgaatgtctaatcccacaggacacattttgtaaaaaggcggtagcttctttagccttattagactgttaatacactcaactgaatgatgtccagttccatcaacaaggcttcaccgagactgtcgagtgactgatcaggatcatgttttttttttcacgttttgcttctgtgcagttgcctaataaacccattcgttgtaaacaagccagttctaactttaaaaaaaagggcctgtgcatggcgctctaggttattgtgcagatggaactgttcttgatattttgaacacgcaaatgtagaggctttgctgtcacagttcttcagcggaattgcgaagaggtgatccgctgtttgtgtagtgtttgctgaatcttgattttgtagttggctacttgaatctgtgtatgttttggctcgcttgtagtaattgctgggctgctggctggtaaatgcgtcgagacattagagagaatggtagatagctg

SEQ ID NO: 13657 - DNA, 1625 bp, Zea Mays
ttcttctctcggcgtcttcgaacttcctggtttccccaaaatacccctctcttaaaccctccgccgccgccctctctcctccgccgtcgaggagcaggatgaggagcactcgcgggacgtggcgctcgcgctgctcgatgcggcgctggagccgcccgacgaggacgaagatgatctcggggaggtcaaggaagaagaccagatgtcgctttccgttggcattgtcggcgcgcccaacgccggcaagtcctcgctcacaaataccatggttgggacaaaagtggctgcagtttcccgcaagacaaatactacgactcacgaaattttgggggtgctaacaaaagggaacacacagattggatgtcacagttcgtgtggagagtgcctggagctcaattaacctatatgatttactaatagtcatgttcgatgtcaataggcatcttaatttgcctgattcacgtgttataaagttaatcaaacgttttggtacagaggtgaacccaaaccagcggcgaatattgtgcatgaataaggttgacctggtggaagacaagaaggacctccttaaagttgcaaaagaatttgaagatcttcctggatatgaaaggtacttcatggtatctgggctaaaaggcaagggggtgaaagaccttatacagtacttgatggaccaggcagtaagaagaccttgggatgaagaaccaactgtaatgactgaagaggtaatgaaaaccatatcattggaggttgtgcgggagaagatgctgcatcacatccaccaagaaatcccctatgtaattgagcatcgtctgatgggctggaaggagctaaaagatggttctcttagggtggagcagcacttcattgccccaaagcaaagccaacgtcagattcttgttggtaaaaatggctctaagatagggagaatcggtattgaggccaatgaagaactgaggtccatattcaagagagatgtccatctaatcctccaagttagagttgcgaagaagagaagtgcttgaacagattttttttagtgcctgtatagactgctagtgatatgggaagtgcagttcagtgttggcacaatgtattaacgagaatggttagtaagtggtgcttgggtgcatcagttccggggactgagttgatagaactttggattgaggatctaatggaggcactgagctgtacgggtgtgtggagccaagatttctgaagaaaggatatattggcggcaattcacatgccagtagtgacaaggaaacggcttgcggcatgtagcccttctctttccaggtctcagcctgtattttctgtaggttatttaaacagtgttgtaataataatctgatgtccgggcatgccccgtcttgaggacgtctagaggacgttctcgaaggcaaagtttgctgctgatcttccagtgttctgagcactacaaattccaggatggaatctggtgatctaccttgtaaagtgcacgaacgttgtgcaagggaaatctatcacttgcggcccttttgttgggtttgatgattttattctgtcacatcgaagcattgaagatcttgcattgcaattctactactaaaagctgcatgcaatggccatgaccagtg

SEQ ID NO: 13658 - DNA, 2242 bp, Zea Mays
ttcttctctcggcgtcttcgaacttcctggtttccccaaaatacccctctcttaaaccctccgccgccgccctctctcctccgccgtcgaggagcaggatgaggagcactcgcgggacgtggcgctcgcgctgctcgatgcggcgctggagccgcccgacgaggacgaagatgatctcggggaggtcaaggaagaagaccagatgtcgctttccgttggcattgtcggcgcgcccaacgccggcaagtcctcgctcacaaataccatggttgggacaaaagtggctgcagtttcccgcaagacaaatactacgactcacgaaattttgggggtgctaacaaaagggaacacacagattgtatgtcatattatcaagttcatttattcttctgctggcagatgactaggaaatgaaaccacattttcaacttttgacttaaccatatatatactttccttgaatttttttaaacatagctagggcgttttgtgtttgctgttaactggatttggacatttgttgcctcaaaagatatatgaactagctgtgttttatttttgctttggaagatatttattgcgtaacaaatcctctcatgtcagatagtggtgcatcttattggcttgatctgtctttattgagttctgtctaaattgacaaaattctaggcctaatgatgtgttcttaatttatccatcgtagaaccattaatataacacacaaaaacaagaacctgctgctaatttgtatgcctatctgtactagttgtacagttgtattgtattcagctaataaaattctctgcagtgcttttttgacaccccagggctcatgttagggcaccatggatttccttatagggatgtcacagttcgtgtggagagtgcctggagctcaattaacctatatgatttactaatagtcatgttcgatgtcaataggcatcttaatttgcctgattcacgtgttataaagttaatcaaacgttttggtacagaggtgaacccaaaccagcggcgaatattgtgcatgaataaggttgacctggtggaagacaagaaggacctccttaaagttgcaaaagaatttgaagatcttcctggatatgaaaggtacttcatggtatctgggctaaaaggcaagggggtgaaagaccttatacagtacttgatggaccaggcagtaagaagaccttgggatgaagaaccaactgtaatgactgaagaggtaatgaaaaccatatcattggaggttgtgcgggagaagatgctgcatcacatccaccaagaaatcccctatgtaattgagcatcgtctgatgggctggaaggagctaaaagatggttctcttagggtggagcagcacttcattgccccaaagcaaagccaacgtcagattcttgttggtaaaaatggctctaagatagggagaatcggtattgaggccaatgaagaactgaggtccatattcaagagagatgtccatctaatcctccaagttagagttgcgaagaagagaagtgcttgaacagattgtgattttttagtgcctgtatagactgctagtgatatgggaagtgcagttcagtgttggcacaatgtattaacgagaatggttagtaagtggtgcttgggtgcatcagttccggggactgagttgatagaactttggattgaggatctaatggaggcactgagctgtacgggtgtgtggagccaagatttctgaagaaaggatatattggcggcaattcacatgccagtagtgacaaggaaacggcttgcggcatggtgagctgccgcacctcctggcgaatcttgtttttgtgatacttgataatatagatacgtctatgctagaccactgacacccttttttacctactttctgattcgaaaagtagcccttctctttccaggtctcagcctgtattttctgtaggttatttaaacagtgttgtaataataatctgatgtccgggcatgccccgtcttgaggacgtctagaggacgttctcgaaggcaaagtttgctgctgatcttccagtgttctgagcactacaaattccaggatggaatctggtgatctaccttgtaaagtgcacgaacgttgtgcaagggaaatctatcacttgcggcccttttgttgggtttgatgattttattctgtcacatcgaagcattgaagatcttgcattgcaattctactactaaaagctgcatgcaatggccatgaccagtg

SEQ ID NO: 13659 - DNA, 1908 bp, Zea Mays
ttcttctctcggcgtcttcgaacttcctggtttccccaaaatacccctctcttaaaccctccgccgccgccctctctcctccgccgtcgaggagcaggatgaggagcactcgcgggacgtggcgctcgcgctgctcgatgcggcgctggagccgcccgacgaggacgaagatgatctcggggaggtcaaggaagaagaccagatgtcgctttccgttggcattgtcggcgcgcccaacgccggcaagtcctcgctcacaaataccatggttgggacaaaagtggctgcagtttcccgcaagacaaatactacgactcacgaaattttgggggtgctaacaaaagggaacacacagatttgcttttttgacaccccagggctcatgttagggcaccatggatttccttatagggatgtcacagttcgtgtggagagtgcctggagctcaattaacctatatgatttactaatagtcatgttcgatgtcaataggcatcttaatttgcctgattcacgtgttataaagttaatcaaacgttttggtacagaggtgaacccaaaccagcggcgaatattgtgcatgaataaggttgacctggtggaagacaagaaggacctccttaaagttgcaaaagaatttgaagatcttcctggatatgaaaggtacttcatggtatctgggctaaaaggcaagggggtgaaagaccttatacagtacttgatggaccaggcagtaagaagaccttgggatgaagaaccaactgtaatgactgaagaggtaatgaaaaccatatcattggaggttgtgcgggagaagatgctgcatcacatccaccaagaaatcccctatgtaattgagcatcgtctgatgggctggaaggagctaaaagatggttctcttagggtggagcagcacttcattgccccaaagcaaagccaacgtcagattcttgttggtaaaaatggctctaagatagggagaatcggtattgaggccaatgaagaactgaggtccatattcaagagagatgtccatctaatcctccaagttagagttgcgaagaagagaagtgcttgaacagattttttttagtgcctgtatagactgctagtgatatgggaagtgcagttcagtgttggcacaatgtattaacgagaatggttagtaagtggtgcttgggtgcatcagttccggggactgagttgatagaactttggattgaggatctaatggaggcactgagctgtacgggtgtgtggagccaagatttctgaagaaaggatatattggcggcaattcacatgccagtagtgacaaggaaacggcttgcggcatgtagcccttctctttccaggtctcagcctgtattttctgtaggttatttaaacagtgttgtaataataatctgatgtccgggcatgccccgtcttgaggacgtctagaggacgttctcgaaggcaaagtttgctgctgatcttccagtgttctgagcactacaaattccaggatggaatctggtgatctaccttgtaaagtgcacgaacgttgtgcaagggaaatctatcacttgcggcccttttgttgggtttgatgattttattctgtcacatcgaagcattgaagatcttgcattgcaattctactactaaaagctgcatgcaatggccatgaccagtgacatctgcgtgcgggcggctacggctccattgcaaaaactgggaagactaaactacagggccgaagagttcaaaaagaggatcaagtccatcgtcaaggtcagcattgtcgaaggggtactcggtatcttgcaaattttgactttggcaaggatgcctagaaatgttaccattatctgctttgcacggaaccacacaggaagctccctcctgaacttacagaaaaaaaat

SEQ ID NO: 13660 - DNA, 504 bp, Zea Mays
attatttacacgtatacaacgattattatttgacggtttctgaaaaaaatgatttggtgctacgtaccaatgatgagatcaaagggcgggatctcgagaggcttggtgggcaggccgaccatgatcatcttgccgttgggcttgagcaggcccatgtacggggccaaggtgaggttcgccgacaccgtgttgatgatgccgtccatggtgctcgcagccgccttcatttcttcggcgtccttgctgacgacgaaggcgtcggcgccaagccggtcgagcgcctcctgcttcttcccaggcgacgtgctgatgaccgtgaccttggccccgaacgccttggcgaacttgacggcgacgtggcccaggcctcccagccccatcacgccgacgtgcttccccggcacgttcaggccgtggtacttcatggggctgtacactgtgatgcccgcgcacagcagcggcgccccccgatccagcggcatcgcgtcggggaaccggaccacg

SEQ ID NO: 13661 - DNA, 2623 bp, Zea Mays
ccagactccaaaagtcccaagtcccagcatccctcccccgtggcgttggcgtgccccgtcccctcgtccccgtctcggtctcaaaagcctcgcacaccagtgcaccaccaccacgggccacggcaccatctccagactcccgaggggaccatcaccgccgcctgcccttccttctcccacctgcaccgccgcctccaattcccgcccgccccactgccattgtgcgcccccggaatggcgtcacgcggaggagatccggtaaaccaactctagctgaagtgacgagtggcagcattgttcaaccgtgcggcttctgcttggctggaattgtgatggatccagaaaaacaaaatgaaatgagcttgatggacaagagacaactagtatacgaagttgcaagatggccgcaaggtgccgtggagattcttaagtgctggactcgaagggaacttcttgagcttatctgtgttgagttgggcaaagagaggaagtataccaatgtcccaaaagctaagatgatcgcttatctcttgaaattagtttcacgaaagagtggaaagaatgggcaactcaaggatgataatgcaaatgttatgttattagagcaggataacaaagatgaaacacaaatgaaggaatctgaggaacaagaacaatcacgaccactcaaaactgcaaactctgactcatcaatacgtagagaggctcatgcctgttgttcagtggtgtgcagcaatgttgcatgccaagccacacggaatgcaggagataattattgcaaacgttgctcttgctgcatttgcaataaatatgatgataacaaagaccctagcttgtggttggtttgcagctctgataatccatacagtggttgttcatgtggtgtctcttgtcacctaaactgtgctctaaagaataaaaaggctggcattgtcaataatggctgcaacaagttagactgtagtttctactgtgttagctgtgggaaaatcaactggctaatgaggagtttgcagaaacaacttgcaattgctagggaggcaagaagagttgatgtgctttgtgagaggctgtcattgagccataaaatggtaaaaggatctgaacgttataaggaaataacgagcataatcagctcagctgcgaaaacacttgaaaaagaagttggtggtgcattagatcaggtttctgcgatcacggggcgtggcattgttaaccggcttacttgtggtgctgaagttcagaagctttgttcaagtgcattagaaattgtagactctacagtggatagcatcttggagttcgagtcaaataatagtccaaaactcttaggatagcatcggtaaggagcaggttgatggttccaaagtttggcaccgaagtgccaaggtttgcaactattcatcggagcccacatgccacatattgaggccaaatactaggagcctggtttctggtctgagcccttcaactgaatacttcttcaaggttttgccttttagcagcgtacaggggtttactgagtgggaggcaaaatgcagtacacgcagcctggaccatggcagcagccagtgctcaactcagaactctgagagcatgtgcctcaaagtggatccaatgcagcatcagaaaaaggatttgaatgtgcagaatcatcagagaactattcaatatgattcacctaaggggtctacaaattcaagtgagaacaatttattgtgtgaccggtattccaagcgggctaaggttgcaaggctagatggtgcaagtgacaatgatgaaagccagttgccgccaacttctgaagttttaccgtttgcaagctccaactactctccttccgaagctccaagtaaacctgacttgcttattggcaccccagattcggcatccaagaactatgtggagcagcagtacgagtactgtgtgaaggtggtcagatggttggagcatgaagggcacatggacaatgacttccgtgtgaagttcctcacttggttcagtctgaaggcaacagcgcaggacaggcgaatcgttggcgccttagtagatgttcttatcggtgatcctgcaagcttggttgcccaactggttgatgcattcaaggatatcatctacaccaaggagaagccctttcaaacacaacagaaggatgcacgctgcaagatttggcactagaaaccttcataactgctctgtgtcgctgtgtgacatcatttttctggtaattttctggcgactgaatgatgaactactgaagttatatcacctagcagattgcgtgcggattctgttgagatggatattgtgcactctcttaaaggttataagatgctgtagatgcttcatttggcattcaggtccatcagatctctcatttgttcattcaaattcagtcggtaggcagactattaatccatgaagacaatcatggtggaaccatgtgctggtaatcatgaatcggttctgagtttaggtttcgactagtaagtagttgaagcttgttagcagacaagcaactgtattcatatgtggaatgctatggtggatctgcaagctaactattgtgaattcatatcatgacttaagagatgtttattattattagttgacttattttttt

SEQ ID NO: 13662 - DNA, 2618 bp, Zea Mays
ccagactccaaaagtcccaagtcccagcatccctcccccgtggcgttggcgtgccccgtcccctcgtccccgtctcggtctcaaaagcctcgcacaccagtgcaccaccaccacgggccacggcaccatctccagactcccgaggggaccatcaccgccgcctgcccttccttctcccacctgcaccgccgcctccaattcccgcccgccccactgccattgtgcgcccccggaatggcgtcacgcggaggagatccggtaaaccaactctagctgaagtgacgagtggcagcattgttcaaccgtgcggcttctgcttggctggaattgtgatggatccagaaaaacaaaatgaaatgagcttgatggacaagagacaactagtatacgaagttgcaagatggccgcaaggtgccgtggagattcttaagtgctggactcgaagggaacttcttgagcttatctgtgttgagttgggcaaagagaggaagtataccaatgtcccaaaagctaagatgatcgcttatctcttgaaattagtttcacgaaagagtggaaagaatgggcaactcaaggatgataatgcaaatgttatgttattagagcaggataacaaagatgaaacacaaatgaaggaatctgaggaacaagaacaatcacgaccactcaaaactgcaaactctgactcatcaatacgtagagaggctcatgcctgttgttcagtggtgtgcagcaatgttgcatgccaagccacacggaatgcaggagataattattgcaaacgttgctcttgctgcatttgcaataaatatgatgataacaaagaccctagcttgtggttggtttgcagctctgataatccatacagtggttgttcatgtggtgtctcttgtcacctaaactgtgctctaaagaataaaaaggctggcattgtcaataatggctgcaacaagttagactgtagtttctactgtgttagctgtgggaaaatcaactggctaatgaggagtttgcagaaacaacttgcaattgctagggaggcaagaagagttgatgtgctttgtgagaggctgtcattgagccataaaatggtaaaaggatctgaacgttataaggaaataacgagcataatcagctcagctgcgaaaacacttgaaaaagaagttggtggtgcattagatcaggtttctgcgatcacggggcgtggcattgttaaccggcttacttgtggtgctgaagttcagaagctttgttcaagtgcattagaaattgtagactctacagtggatagcatcttggagttcgagtcaaataatagtccaaaactcttagcatcggtaaggagcaggttgatggttccaaagtttggcaccgaagtgccaaggtttgcaactattcatcggagcccacatgccacatattgaggccaaatactaggagcctggtttctggtctgagcccttcaactgaatacttcttcaaggttttgccttttagcagcgtacaggggtttactgagtgggaggcaaaatgcagtacacgcagcctggaccatggcagcagccagtgctcaactcagaactctgagagcatgtgcctcaaagtggatccaatgcagcatcagaaaaaggatttgaatgtgcagaatcatcagagaactattcaatatgattcacctaaggggtctacaaattcaagtgagaacaatttattgtgtgaccggtattccaagcgggctaaggttgcaaggctagatggtgcaagtgacaatgatgaaagccagttgccgccaacttctgaagttttaccgtttgcaagctccaactactctccttccgaagctccaagtaaacctgacttgcttattggcaccccagattcggcatccaagaactatgtggagcagcagtacgagtactgtgtgaaggtggtcagatggttggagcatgaagggcacatggacaatgacttccgtgtgaagttcctcacttggttcagtctgaaggcaacagcgcaggacaggcgaatcgttggcgccttagtagatgttcttatcggtgatcctgcaagcttggttgcccaactggttgatgcattcaaggatatcatctacaccaaggagaagccctttcaaacacaacagaaggatgcacgctgcaagatttggcactagaaaccttcataactgctctgtgtcgctgtgtgacatcatttttctggtaattttctggcgactgaatgatgaactactgaagttatatcacctagcagattgcgtgcggattctgttgagatggatattgtgcactctcttaaaggttataagatgctgtagatgcttcatttggcattcaggtccatcagatctctcatttgttcattcaaattcagtcggtaggcagactattaatccatgaagacaatcatggtggaaccatgtgctggtaatcatgaatcggttctgagtttaggtttcgactagtaagtagttgaagcttgttagcagacaagcaactgtattcatatgtggaatgctatggtggatctgcaagctaactattgtgaattcatatcatgacttaagagatgtttattattattagttgacttattttttt

SEQ ID NO: 13663 - DNA, 2129 bp, Zea Mays
tggcgtgccccgtcccctcgtccccgtctcggtctcaaaagcctcgcacaccagtgcaccaccaccacgggccacggcaccatctccagactcccgaggggaccatcaccgccgcctgcccttccttctcccacctgcaccgccgcctccaattcccgcccgccccactgccattgtgcgcccccggaatggcgtcacgcggaggagatccggtaaaccaactctagctgaagtgacgagtggcagcattgttcaaccgtgcggcttctgcttggctggaattgtgatggatccagaaaaacaaaatgaaatgagcttgatggacaagagacaactagtatacgaagttgcaagatggccgcaaggtgccgtggagattcttaagtgctggactcgaagggaacttcttgagcttatctgtgttgagttgggcaaagagaggaagagtttgcagaaacaacttgcaattgctagggaggcaagaagagttgatgtgctttgtgagaggctgtcattgagccataaaatggtaaaaggatctgaacgttataaggaaataacgagcataatcagctcagctgcgaaaacacttgaaaaagaagttggtggtgcattagatcaggtttctgcgatcacggggcgtggcattgttaaccggcttacttgtggtgctgaagttcagaagctttgttcaagtgcattagaaattgtagactctacagtggatagcatcttggagttcgagtcaaataatagtccaaaactcttaggtccccagccccaaatcctttttgatgaaatcactccattttctgtggtaattgtgttgaactatcaggatagcatcggtaaggagcaggttgatggttccaaagtttggcaccgaagtgccaaggtttgcaactattcatcggagcccacatgccacatattgaggccaaatactaggagcctggtttctggtctgagcccttcaactgaatacttcttcaaggttttgccttttagcagcgtacaggggtttactgagtgggaggcaaaatgcagtacacgcagcctggaccatggcagcagccagtgctcaactcagaactctgagagcatgtgcctcaaagtggatccaatgcagcatcagaaaaaggatttgaatgtgcagaatcatcagagaactattcaatatgattcacctaaggggtctacaaattcaagtgagaacaatttattgtgtgaccggtattccaagcgggctaaggttgcaaggctagatggtgcaagtgacaatgatgaaagccagttgccgccaacttctgaagttttaccgtttgcaagctccaactactctccttccgaagctccaagtaaacctgacttgcttattggcaccccagattcggcatccaagaactatgtggagcagcagtacgagtactgtgtgaaggtggtcagatggttggagcatgaagggcacatggacaatgacttccgtgtgaagttcctcacttggttcagtctgaaggcaacagcgcaggacaggcgaatcgttggcgccttagtagatgttcttatcggtgatcctgcaagcttggttgcccaactggttgatgcattcaaggatatcatctacaccaaggagaagccctttcaaacacaacagaaggatgcacgctgcaagatttggcactagaaaccttcataactgctctgtgtcgctgtgtgacatcatttttctggtaattttctggcgactgaatgatgaactactgaagttatatcacctagcagattgcgtgcggattctgttgagatggatattgtgcactctcttaaaggttataagatgctgtagatgcttcatttggcattcaggtccatcagatctctcatttgttcattcaaattcagtcggtaggcagactattaatccatgaagacaatcatggtggaaccatgtgctggtaatcatgaatcggttctgagtttaggtttcgactagtaagtagttgaagcttgttagcagacaagcaactgtattcatatgtggaatgctatggtggatctgcaagctaactattgtgaattcatatcatgacttaagagatgtttattattattagttgacttattttttt

SEQ ID NO: 13664 - DNA, 2045 bp, Zea Mays
tgccccgtcccctcgtccccgtctcggtctcaaaagcctcgcacaccagtgcaccaccaccacgggccacggcaccatctccagactcccgaggggaccatcaccgccgcctgcccttccttctcccacctgcaccgccgcctccaattcccgcccgccccactgccattgtgcgcccccggaatggcgtcacgcggaggagatccggtaaaccaactctagctgaagtgacgagtggcagcattgttcaaccgtgcggcttctgcttggctggaattgtgatggatccagaaaaacaaaatgaaatgagcttgatggacaagagacaactagtatacgaagttgcaagatggccgcaaggagtttgcagaaacaacttgcaattgctagggaggcaagaagagttgatgtgctttgtgagaggctgtcattgagccataaaatggtaaaaggatctgaacgttataaggaaataacgagcataatcagctcagctgcgaaaacacttgaaaaagaagttggtggtgcattagatcaggtttctgcgatcacggggcgtggcattgttaaccggcttacttgtggtgctgaagttcagaagctttgttcaagtgcattagaaattgtagactctacagtggatagcatcttggagttcgagtcaaataatagtccaaaactcttaggtccccagccccaaatcctttttgatgaaatcactccattttctgtggtaattgtgttgaactatcaggatagcatcggtaaggagcaggttgatggttccaaagtttggcaccgaagtgccaaggtttgcaactattcatcggagcccacatgccacatattgaggccaaatactaggagcctggtttctggtctgagcccttcaactgaatacttcttcaaggttttgccttttagcagcgtacaggggtttactgagtgggaggcaaaatgcagtacacgcagcctggaccatggcagcagccagtgctcaactcagaactctgagagcatgtgcctcaaagtggatccaatgcagcatcagaaaaaggatttgaatgtgcagaatcatcagagaactattcaatatgattcacctaaggggtctacaaattcaagtgagaacaatttattgtgtgaccggtattccaagcgggctaaggttgcaaggctagatggtgcaagtgacaatgatgaaagccagttgccgccaacttctgaagttttaccgtttgcaagctccaactactctccttccgaagctccaagtaaacctgacttgcttattggcaccccagattcggcatccaagaactatgtggagcagcagtacgagtactgtgtgaaggtggtcagatggttggagcatgaagggcacatggacaatgacttccgtgtgaagttcctcacttggttcagtctgaaggcaacagcgcaggacaggcgaatcgttggcgccttagtagatgttcttatcggtgatcctgcaagcttggttgcccaactggttgatgcattcaaggatatcatctacaccaaggagaagccctttcaaacacaacagaaggatgcacgctgcaagatttggcactagaaaccttcataactgctctgtgtcgctgtgtgacatcatttttctggtaattttctggcgactgaatgatgaactactgaagttatatcacctagcagattgcgtgcggattctgttgagatggatattgtgcactctcttaaaggttataagatgctgtagatgcttcatttggcattcaggtccatcagatctctcatttgttcattcaaattcagtcggtaggcagactattaatccatgaagacaatcatggtggaaccatgtgctggtaatcatgaatcggttctgagtttaggtttcgactagtaagtagttgaagcttgttagcagacaagcaactgtattcatatgtggaatgctatggtggatctgcaagctaactattgtgaattcatatcatgacttaagagatgtttattattattagttgacttattttttt

SEQ ID NO: 13665 - DNA, 2395 bp, Zea Mays
gatccataatccctgaaaggctgccaaggaattgtgatggatccagaaaaacaaaatgaaatgagcttgatggacaagagacaactagtatacgaagttgcaagatggccgcaaggtgccgtggagattcttaagtgctggactcgaagggaacttcttgagcttatctgtgttgagttgggcaaagagaggaagtataccaatgtcccaaaagctaagatgatcgcttatctcttgaaattagtttcacgaaagagtggaaagaatgggcaactcaaggatgataatgcaaatgttatgttattagagcaggataacaaagatgaaacacaaatgaaggaatctgaggaacaagaacaatcacgaccactcaaaactgcaaactctgactcatcaatacgtagagaggctcatgcctgttgttcagtggtgtgcagcaatgttgcatgccaagccacacggaatgcaggagataattattgcaaacgttgctcttgctgcatttgcaataaatatgatgataacaaagaccctagcttgtggttggtttgcagctctgataatccatacagtggttgttcatgtggtgtctcttgtcacctaaactgtgctctaaagaataaaaaggctggcattgtcaataatggctgcaacaagttagactgtagtttctactgtgttagctgtgggaaaatcaactggctaatgaggagtttgcagaaacaacttgcaattgctagggaggcaagaagagttgatgtgctttgtgagaggctgtcattgagccataaaatggtaaaaggatctgaacgttataaggaaataacgagcataatcagctcagctgcgaaaacacttgaaaaagaagttggtggtgcattagatcaggtttctgcgatcacggggcgtggcattgttaaccggcttacttgtggtgctgaagttcagaagctttgttcaagtgcattagaaattgtagactctacagtggatagcatcttggagttcgagtcaaataatagtccaaaactcttaggtccccagccccaaatcctttttgatgaaatcactccattttctgtggtaattgtgttgaactatcaggatagcatcggtaaggagcaggttgatggttccaaagtttggcaccgaagtgccaaggtttgcaactattcatcggagcccacatgccacatattgaggccaaatactaggagcctggtttctggtctgagcccttcaactgaatacttcttcaaggttttgccttttagcagcgtacaggggtttactgagtgggaggcaaaatgcagtacacgcagcctggaccatggcagcagccagtgctcaactcagaactctgagagcatgtgcctcaaagtggatccaatgcagcatcagaaaaaggatttgaatgtgcagaatcatcagagaactattcaatatgattcacctaaggggtctacaaattcaagtgagaacaatttattgtgtgaccggtattccaagcgggctaaggttgcaaggctagatggtgcaagtgacaatgatgaaagccagttgccgccaacttctgaagttttaccgtttgcaagctccaactactctccttccgaagctccaagtaaacctgacttgcttattggcaccccagattcggcatccaagaactatgtggagcagcagtacgagtactgtgtgaaggtggtcagatggttggagcatgaagggcacatggacaatgacttccgtgtgaagttcctcacttggttcagtctgaaggcaacagcgcaggacaggcgaatcgttggcgccttagtagatgttcttatcggtgatcctgcaagcttggttgcccaactggttgatgcattcaaggatatcatctacaccaaggagaagccctttcaaacacaacagaaggatgcacgctgcaagatttggcactagaaaccttcataactgctctgtgtcgctgtgtgacatcatttttctggtaattttctggcgactgaatgatgaactactgaagttatatcacctagcagattgcgtgcggattctgttgagatggatattgtgcactctcttaaaggttataagatgctgtagatgcttcatttggcattcaggtccatcagatctctcatttgttcattcaaattcagtcggtaggcagactattaatccatgaagacaatcatggtggaaccatgtgctggtaatcatgaatcggttctgagtttaggtttcgactagtaagtagttgaagcttgttagcagacaagcaactgtattcatatgtggaatgctatggtggatctgcaagctaactattgtgaattcatatcatgacttaagagatgtttattattattagttgacttattttttt

SEQ ID NO: 13666 - DNA, 1163 bp, Zea Mays
aaaaccgcttaaattaaagaaaaaactgtgcttgcacacaatactagttgttcgttcccaccgcaagcaaagcattttcagccgccccaccgcagcagcagagaagaggccgccgccgccgcgaccaagagccgatggatccgaagatgacagaggtgacccagatgttcgcccgcttcaaggcggcctacacccgcaacgacctcgacgcctgcgtcaccctcctctcacagctcaaggtccatctcaccaaattccccagccttccgccctcatttgagcagacacctaaagccgtggaggagctcaaacttgcaatggcataattcccccctcaccagaggagtacccaattttgggactcaatcttctgaggctgttggttcagaatagaattgctgagttccatactgagctggagcttttacctgtcaaggcacttgagcacccttgcatcaagcatgctgtagagcttgagcaatccttcatggagggtgcctacaaccgagtgttaagcgctcggcaagctgtgccacatgagacctatgtttacttcatggaccttctcgccaagacagttagagatgagatcgctgggtgcagcgaaaaggggtatgattccctatctgtaagtgatgcaaaacaaatgcttatgttcagttctgaccaagatctgcacgagtacatcacagaggagcacccggaatgggagcttaagaacggtgccgtcttcttccagaaggcaaaggagtcacagccctacaaggagatcccatccttgcagctcatcaaccagacgctcagctatgcgagggagctggagcgtattgtatgatttaatttcacagtaatccctggttgatgtttatttctgtggtcacttggcatggcatgtactgtcctttacatttgagatcagctctgatcgcagctcatgtcagctctgatcaatctctgaagggcttgatctctgcggcattgtttcaccacattaactgcattgcttgaaagatgcctgtcatccattgctgctgttaacttttgatgggcttaatattgaattattacatcgaaattgcactgattgtctttttttatttaaaaaaagacaaattatgttgacaagattagtcatactggaaaacagagattgctcattcaag

SEQ ID NO: 13667 - DNA, 1732 bp, Zea Mays
ggcataatgcaagttccatggatgcttcaaatgttagatatgtcctaagacttagtaaagtgactgagttaagctcaactatgttctttgattaaggacgcaattcttcccatggttgtggctccagtcacgataggataaagaagaagacacagttaaacaccattctcgataggatagctaccacattggctagtacaagagctacataagatagctatgtgattgacaaactttataagataaattatggacttctttatattttatgatatatttttcaattacttagttatttcctagtttgttataagtatggaatattataatggtgaaaattatgtcagccatcacgaataatgttacgccatggtcaatttggcaacaaatcatatatatctacaatgtcacagcagtttaaaacaaacgactttcaacttttcagcaacagacagctaactacagccttttcacagtacacaacagaaagcaacttttctcacagcaaacagcacaaccaaaagcaccttttatagagtatttcatttattcatggtagattaactctgcagcaactattcatcttgcaaactctctacaagggttccatacaagccaaaggcttccaagtggccagaacaattagaatagccaacgaaattgaaggggcgtccaaagccattgaacatttacctctatcattagatgatggttttgtattgtttcttacatatgtcttatttctaacttgatttcagttttaagtgaagaaagaataggcgaccagaggaggtgaaagggagccaatcaaattcggttgcttaaaaatggaacctgagaacttaacttcgatggagatgaagatatcgctcaaaccaaaaacacatcaaccaaccagtgatctcataatttgaaaatgctcctaggactcacacgagaccaacaaaacaaacagatcgcaaatcaaacacctaaaactccaaaacagcccaaaattgtatcgctgtctagtgttgttttgagcggcacgaaattcatttttcgaatgcgaaactaattcaaacaaactccaattgagctaaaacgagacatgatctgaacaaacgttgcatcgcggatggttacagccacacttcctctcaaaatcacaagcacacaaatgtggagtttacaaaacacctacggatctcagggctaaaaactagagcaacctaggaaatgaaactacggttttctaaacaagagtctaatgatatagagaccaaagagatagttgcacacaatagtcatccgacctatttatagagggttatttcacaagactaaactacccttagatacatagagcttatccacttaaccaggggcaaaatagaccaactcctaggatatgcatatgatggccacgagctacacacgaagttgcttcgcttcaacacaacctttgcgatgacaacatgcgccgcttctgattccggtcggcactgatttcaagtcgggcgaccagctagtcgtcccagaggaccgaccaggcgcctaatcgcgattagggtgacgattaggacgcctaatcggtcttggtcgaccttaggtcgtccctagtcgtcctatgtaatttctagcatatagccatataccatatatatacaagcaatgcagtccttgccaacagtccaacaaggaatatggctgcaaataggcactatataagtctagcagtactgcaggctag

SEQ ID NO: 13668 - DNA, 1780 bp, Zea Mays
ccagaaccccagtaaacccaaacccaactcctccctccccacttccccagtccccagtcctcgcggccgaaacccttgctcccttccgcgatggccggccggggcgcctccccggccgcggcggccgccgtccaggtgcgctgcgccggctgccgcggcgtgctcgccgtggctcccggcatgaccgagttcatctgccccaagtgtcgcatggcgcagcgcctcccgccggagctcatgccgccctccccgcccaaggcctccccgactccgcctccctcaggtccaactccgcctccaccacctccaccttcgctgccgcctccgcctccgcctccgcctcagccagtgccgcaccctctgacccgccgctccgctccccgggcgcagggcgtggaccccaccaagatccagctcccctgcgcgcgctgcaaggccgtcctcaacgtgccccacggcctcgatcgcttccgctgcccgcagtgcggcgtcgacctcgctgttgacttgtccaagctccgccatttccttgcatctgctggcccaggcttttttccgcccccactcccacctcccccacccccgcaacccccagtgccaatgcctcatctgccctttctgccgatgatgccacgccttccattgcccatgctgccgatgctctctcctgctgagctaccggaggagatcaatgaggttgcagttgatgttgagcgcgacgaagatgaaagtggcacttttggggaaactttcattgattatagacctcccaagctatcttttggttttcctcatcctgaccctgtagtagaaacatcctccttgtcagcagtgcaacctccagaacctacttacaagttgactatcatgaaagaattggatgaaaccaatgcattatcttccttacagattgaaacaatagtgtatgcttgtcagaggcatcatcatcatcttccaactggagctagagcaggtttcttcatcggtgatggggctggtgttggtaaaggacgtaccgttgctggattgatctgggaaaattggcagcagggaaggcataaagctttgtggatatcaattggttcagacctgaaatatgacgctcgcagagatctggatgatgttggtgcaaaatgtgtggaagtgcacgctttaaataagcttccatattctaagctagactctaaaacctttgggatcacagatggagttgtttttgtaacttatagcagcttgatagcatcctctgagaaccgttcccgtttgcaacagttggtacagtggtgcgggtctgagtttgatggtcttctggtgttcgacgagtgccacaaggccaaaaatctgattcctgaggcagggagccagcccacccgcactggtaaagctgttcttgagattcaggatatgttacctcaagcacgggttgtttattgttcagcgactggtgcatctgagcctcgaaatttaggttatatggttcggcttggtctctggggagatggaacatcgtttgagaatttcaaccaatttttaggtgctcttgagaaaggaggtgtgggtgctcttgaacttgttgctatggacatgaaagccaggggaatgtatgtttgccgtactctaagttacaagggtgctaactttgatatcctagaatcacttctggaggaaagaatgatggatatttttgttagtatgattgctcattgacatgaagtagtattcttttaaatttaattaacttggcgagaacaaagtggtagaaactgaaaggagacaatgt

SEQ ID NO: 13669 - DNA, 2041 bp, Zea Mays
cccaaacccaactcctccctccccacttccccagtccccagtcctcgcggccgaaacccttgctcccttccgcgatggccggccggggcgcctccccggccgcggcggccgccgtccaggtgcgctgcgccggctgccgcggcgtgctcgccgtggctcccggcatgaccgagttcatctgccccaagtgtcgcatggcgcagcgcctcccgccggagctcatgccgccctccccgcccaaggcctccccgactccgcctccctcaggtccaactccgcctccaccacctccaccttcgctgccgcctccgcctccgcctccgcctcagccagtgccgcaccctctgacccgccgctccgctccccgggcgcagggcgtggaccccaccaagatccagctcccctgcgcgcgctgcaaggccgtcctcaacgtgccccacggcctcgatcgcttccgctgcccgcagtgcggcgtcgacctcgctgttgacttgtccaagctccgccatttccttgcatctgctggcccaggcttttttccgcccccactcccacctcccccacccccgcaacccccagtgccaatgcctcatctgccctttctgccgatgatgccacgccttccattgcccatgctgccgatgctctctcctgctgagctaccggaggagatcaatgaggttgcagttgatgttgagcgcgacgaagatgaaagtggcacttttggggaaactttcattgattatagacctcccaagctatcttttggttttcctcatcctgaccctgtagtagaaacatcctccttgtcagcagtgcaacctccagaacctacttacaagttgactatcatgaaagaattggatgaaaccaatgcattatcttccttacagattgaaacaatagtgtatgcttgtcagaggcatcatcatcatcttccaactggagctagagcaggtttcttcatcggtgatggggctggtgttggtaaaggacgtaccgttgctggattgatctgggaaaattggcagcagggaaggcataaagctttgtggatatcaattggttcagacctgaaatatgacgctcgcagagatctggatgatgttggtgcaaaatgtgtggaagtgcacgctttaaataagcttccatattctaagctagactctaaaacctttgggatcacagatggagttgtttttgtaacttatagcagcttgatagcatcctctgagaaccgttcccgtttgcaacagttggtacagtggtgcgggtctgagtttgatggtcttctggtgttcgacgagtgccacaaggccaaaaatctgattcctgaggcagggagccagcccacccgcactggtaaagctgttcttgagattcaggatatgttacctcaagcacgggttgtttattgttcagcgactggtgcatctgagcctcgaaatttaggttatatggttcggcttggtctctggggagatggaacatcgtttgagaatttcaaccaatttttaggtgctcttgagaaaggaggtgtgggtgctcttgaacttgttgctatggacatgaaagccaggggaatgtatgtttgccgtactctaagttacaagggtgctaactttgatatcctagaatcacttctggaggaaagaatgatggaaatgaccatcaaagagggtatttggaaggaagaagatgacacaatcaacatgtgggagaagatgacaacctgcatttggaaggtggcctcaaaggtgtgttgatggtggtatgaggaagtccaaagggctattaaggagaagaaagaatgctacaaagactgtaccatgacaggagtgtggacaacgtaaagaagtacaagattgcaaagcgagctataagtgtggcaaatgatagagcctatgaggatctttacagtacagtacgaacggagagaacatatataggatgattagggtttgtgagaggaagataagggactttaaccaagttaagggcattaaggatgaaacaaagcacctcttagtgaatgaggatg

SEQ ID NO: 13670 - DNA, 1913 bp, Zea Mays
ccaactcctccctccccacttccccagtccccagtcctcgcggccgaaacccttgctcccttccgcgatggccggccggggcgcctccccggccgcggcggccgccgtccaggtgcgctgcgccggctgccgcggcgtgctcgccgtggctcccggcatgaccgagttcatctgccccaagtgtcgcatggcgcagcgcctcccgccggagctcatgccgccctccccgcccaaggcctccccgactccgcctccctcaggtccaactccgcctccaccacctccaccttcgctgccgcctccgcctccgcctccgcctcagccagtgccgcaccctctgacccgccgctccgctccccgggcgcagggcgtggaccccaccaagatccagctcccctgcgcgcgctgcaaggccgtcctcaacgtgccccacggcctcgatcgcttccgctgcccgcagtgcggcgtcgacctcgctgttgacttgtccaagctccgccatttccttgcatctgctggcccaggcttttttccgcccccactcccacctcccccacccccgcaacccccagtgccaatgcctcatctgccctttctgccgatgatgccacgccttccattgcccatgctgccgatgctctctcctgctgagctaccggaggagatcaatgaggcaatatcatatgagaatttgttgcgtgcatgtttggatgctattattctggttatcagttgtctacggatgcaagaattagctaagctaacctttgattttgttcgtcatacatccatgatgatggatggttccctttgtgaccttgacttctatgttgcagttgatgttgagcgcgacgaagatgaaagtggcacttttggggaaactttcattgattatagacctcccaagctatcttttggttttcctcatcctgaccctgtagtagaaacatcctccttgtcagcagtgcaacctccagaacctacttacaagttgactatcatgaaagaattggatgaaaccaatgcattatcttccttacagattgaaacaatagtgtatgcttgtcagaggcatcatcatcatcttccaactggagctagagcaggtttcttcatcggtgatggggctggtgttggtaaaggacgtaccgttgctggattgatctgggaaaattggcagcagggaaggcataaagctttgtggatatcaattggttcagacctgaaatatgacgctcgcagagatctggatgatgttggtgcaaaatgtgtggaagtgcacgctttaaataagcttccatattctaagctagactctaaaacctttgggatcacagatggagttgtttttgtaacttatagcagcttgatagcatcctctgagaaccgttcccgtttgcaacagttggtacagtggtgcgggtctgagtttgatggtcttctggtgttcgacgagtgccacaaggccaaaaatctgattcctgaggcagggagccagcccacccgcactggtaaagctgttcttgagattcaggatatgttacctcaagcacgggttgtttattgttcagcgactggtgcatctgagcctcgaaatttaggttatatggttcggcttggtctctggggagatggaacatcgtttgagaatttcaaccaatttttaggtgctcttgagaaaggaggtgtgggtgctcttgaacttgttgctatggacatgaaagccaggggaatgtatgtttgccgtactctaagttacaagggtgctaactttgatatcctagaatcacttctggaggaaagaatgatggatatttttgttagtatgattgctcattgacatgaagtagtattcttttaaatttaattaacttggcgagaacaaagtggtagaaactgaaaggagacaatgt

SEQ ID NO: 13671 - DNA, 1623 bp, Zea Mays
cctccctccccacttccccagtccccagtcctcgcggccgaaacccttgctcccttccgcgatggccggccggggcgcctccccggccgcggcggccgccgtccaggtgcgctgcgccggctgccgcggcgtgctcgccgtggctcccggcatgaccgagttcatctgccccaagtgtcgcatggcgcagcgcctcccgccggagctcatgccgccctccccgcccaaggcctccccgactccgcctccctcaggtccaactccgcctccaccacctccaccttcgctgccgcctccgcctccgcctccgcctcagccagtgccgcaccctctgacccgccgctccgctccccgggcgcagggcgtggaccccaccaagatccagctcccctgcgcgcgctgcaaggccgtcctcaacgtgccccacggcctcgatcgcttccgctgcccgcagtgcggcgtcgacctcgctgttgacttgtccaagctccgccatttccttgcatctgctggcccaggcttttttccgcccccactcccacctcccccacccccgcaacccccagtgccaatgcctcatctgccctttctgccgatgatgccacgccttccattgcccatgctgccgatgctctctcctgctgagctaccggaggagatcaatgaggttgcagttgatgttgagcgcgacgaagatgaaagtggcacttttggggaaactttcattgattatagacctcccaagctatcttttggttttcctcatcctgaccctgtagtagaaacatcctccttgtcagcagtgcaacctccagaacctacttacaagttgactatcatgaaagaattggatgaaaccaatgcattatcttccttacagattgaaacaatagtgtatgcttgtcagaggcatcatcatcatcttccaactggagctagagcaggtttcttcatcggtgatggggctggtgttggtaaaggacgtaccgttgctggattgatctgggaaaattggcagcagggaaggcataaagctttgtggatatcaattggttcagacctgaaatatgacgctcgcagagatctggatgatgttggtgcaaaatgtgtggaagttggtacagtggtgcgggtctgagtttgatggtcttctggtgttcgacgagtgccacaaggccaaaaatctgattcctgaggcagggagccagcccacccgcactggtaaagctgttcttgagattcaggatatgttacctcaagcacgggttgtttattgttcagcgactggtgcatctgagcctcgaaatttaggttatatggttcggcttggtctctggggagatggaacatcgtttgagaatttcaaccaatttttaggtgctcttgagaaaggaggtgtgggtgctcttgaacttgttgctatggacatgaaagccaggggaatgtatgtttgccgtactctaagttacaagggtgctaactttgatatcctagaatcacttctggaggaaagaatgatggatatttttgttagtatgattgctcattgacatgaagtagtattcttttaaatttaattaacttggcgagaacaaagtggtagaaactgaaaggagacaatgt

SEQ ID NO: 13672 - DNA, 1089 bp, Zea Mays
atggccggccggggcgcctccccggccgcggcggccgccgtccaggtgcgctgcgccggctgccgcggcgtgctcgccgtggctcccggcatgaccgagttcatctgccccaagtgtcgcatggcgcagcgcctcccgccggagctcatgccgccctccccgcccaaggcctccccgactccgcctccctcaggtccaactccgcctccaccacctccaccttcgctgccgcctccgcctccgcctccgcctcagccagtgccgcaccctctgacccgccgctccgctccccgggcgcagggcgtggaccccaccaagatccagctcccctgcgcgcgctgcaaggccgtcctcaacgtgccccacggcctcgatcgcttccgctgcccgcagtgcggcgtcgacctcgctgttgacttgtccaagctccgccatttccttgcatctgctggcccaggcttttttccgcccccactcccacctcccccacccccgcaacccccagtgccaatgcctcatctgccctttctgccgatgatgccacgccttccattgcccatgctgccgatgctctctcctgctgagctaccggaggagatcaatgaggttgcagttgatgttgagcgcgacgaagatgaaagtggcacttttggggaaactttcattgattatagacctcccaagctatcttttggttttcctcatcctgaccctgtagtagaaacatcctccttgtcagcagtgcaacctccagaacctacttacaagttgactatcatgaaagaattggatgaaaccaatgcattatcttccttacagattgaaacaatagtgtatgcttgtcagaggcatcatcatcatcttccaactggagctagagcaggtttcttcatcggtgatggggctggtgttggtaaaggacgtaccgttgctggattgatctgggaaaattggcagcagggaaggcataaagctttgtggatatcaattggttcagacctgaaatatgacgctcgcagagatctggatgatgttggtgcaaaatgtgtggaaggactgcagggcttttgccaaccgtttcaacttgat

SEQ ID NO: 13673 - DNA, 1667 bp, Zea Mays
atggccggccggggcgcctccccggccgcggcggccgccgtccaggtgcgctgcgccggctgccgcggcgtgctcgccgtggctcccggcatgaccgagttcatctgccccaagtgtcgcatggcgcagcgcctcccgccggagctcatgccgccctccccgcccaaggcctccccgactccgcctccctcaggtccaactccgcctccaccacctccaccttcgctgccgcctccgcctccgcctccgcctcagccagtgccgcaccctctgacccgccgctccgctccccgggcgcagggcgtggaccccaccaagatccagctcccctgcgcgcgctgcaaggccgtcctcaacgtgccccacggcctcgatcgcttccgctgcccgcagtgcggcgtcgacctcgctgttgacttgtccaagctccgccatttccttgcatctgctggcccaggcttttttccgcccccactcccacctcccccacccccgcaacccccagtgccaatgcctcatctgccctttctgccgatgatgccacgccttccattgcccatgctgccgatgctctctcctgctgagctaccggaggagatcaatgaggttgcagttgatgttgagcgcgacgaagatgaaagtggcacttttggggaaactttcattgattatagacctcccaagctatcttttggttttcctcatcctgaccctgtagtagaaacatcctccttgtcagcagtgcaacctccagaacctacttacaagttgactatcatgaaagaattggatgaaaccaatgcattatcttccttacagattgaaacaatagtgtatgcttgtcagaggcatcatcatcatcttccaactggagctagagcaggtttcttcatcggtgatggggctggtgttggtaaaggacgtaccgttgctggattgatctgggaaaattggcagcagggaaggcataaagctttgtggatatcaattggttcagacctgaaatatgacgctcgcagagatctggatgatgttggtgcaaaatgtgtggaagtgcacgctttaaataagcttccatattctaagctagactctaaaacctttgggatcacagatggagttgtttttgtaacttatagcagcttgatagcatcctctgagaaccgttcccgtttgcaacagttggtacagtggtgcgggtctgagtttgatggtcttctggtgttcgacgagtgccacaaggccaaaaatctgattcctgaggcagggagccagcccacccgcactggatatgttacctcaagcacgggttgtttattgttcagcgactggtgcatctgagcctcgaaatttaggttatatggttcggcttggtctctggggagatggaacatcgtttgagaatttcaaccaatttttaggtgctcttgagaaaggaggtgtgggtgctcttgaacttgttgctatggacatgaaagccaggggaatgtatgtttgccgtactctaagttacaagggtgctaactttgatatcctagaatcacttctggaggaaagaatgatggatatttttgttagtatgattgctcattgacatgaagtagtattcttttaaatttaattaacttggcgagaacaaagtggtagaaactgaaaggagacaatgt

SEQ ID NO: 13674 - DNA, 1594 bp, Zea Mays
atggccggccggggcgcctccccggccgcggcggccgccgtccaggtgcgctgcgccggctgccgcggcgtgctcgccgtggctcccggcatgaccgagttcatctgccccaagtgtcgcatggcgcagcgcctcccgccggagctcatgccgccctccccgcccaaggcctccccgactccgcctccctcaggtccaactccgcctccaccacctccaccttcgctgccgcctccgcctccgcctccgcctcagccagtgccgcaccctctgacccgccgctccgctccccgggcgcagggcgtggaccccaccaagatccagctcccctgcgcgcgctgcaaggccgtcctcaacgtgccccacggcctcgatcgcttccgctgcccgcagtgcggcgtcgacctcgctgttgacttgtccaagctccgccatttccttgcatctgctggcccaggcttttttccgcccccactcccacctcccccacccccgcaacccccagtgccaatgcctcatctgccctttctgccgatgatgccacgccttccattgcccatgctgccgatgctctctcctgctgagctaccggaggagatcaatgaggttgcagttgatgttgagcgcgacgaagatgaaagtggcacttttggggaaactttcattgattataaacatcctccttgtcagcagtgcaacctccagaacctacttacaagttgactatcatgaaagaattggatgaaaccaatgcattatcttccttacagattgaaacaatagtgtatgcttgtcagaggcatcatcatcatcttccaactggagctagagcaggtttcttcatcggtgatggggctggtgttggtaaaggacgtaccgttgctggattgatctgggaaaattggcagcagggaaggcataaagctttgtaagaacttagcaaggaaaaggaattctctaaccccctatacatttttttgttgtacttgcattatttatcgcctgtttgcatttttaatgagttataacttattcaggtggatatcaattggttcagacctgaaatatgacgctcgcagagatctggatgatgttggtgcaaaatgtgtggaagtgcacgctttaaataagcttccatattctaagctagactctaaaacctttgggatcacagatggagttgtttttgtaacttatagcagcttgatagcatcctctgagaaccgttcccgtttgcaacagttggtacagtggtgcgggtctgagtttgatggtcttctggtgttcgacgagtgccacaaggccaaaaatctgattcctgaggcagggagccagcccacccgcactggtgctcttgagaaaggaggtgtgggtgctcttgaacttgttgctatggacatgaaagccaggggaatgtatgtttgccgtactctaagttacaagggtgctaactttgatatcctagaatcacttctggaggaaagaatgatggatatttttgttagtatgattgctcattgacatgaagtagtattcttttaaatttaattaacttggcgagaacaaagtggtagaaactgaaaggagacaatgt

SEQ ID NO: 13675 - DNA, 1539 bp, Zea Mays
atggccggccggggcgcctccccggccgcggcggccgccgtccaggtgcgctgcgccggctgccgcggcgtgctcgccgtggctcccggcatgaccgagttcatctgccccaagtgtcgcatggcgcagcgcctcccgccggagctcatgccgccctccccgcccaaggcctccccgactccgcctccctcaggtccaactccgcctccaccacctccaccttcgctgccgcctccgcctccgcctccgcctcagccagtgccgcaccctctgacccgccgctccgctccccgggcgcagggcgtggaccccaccaagatccagctcccctgcgcgcgctgcaaggccgtcctcaacgtgccccacggcctcgatcgcttccgctgcccgcagtgcggcgtcgacctcgctgttgacttgtccaagctccgccatttccttgcatctgctggcccaggcttttttccgcccccactcccacctcccccacccccgcaacccccagtgccaatgcctcatctgccctttctgccgatgatgccacgccttccattgcccatgctgccgatgctctctcctgctgagctaccggaggagatcaatgaggttgcagttgatgttgagcgcgacgaagatgaaagtggcacttttggggaaactttcattgattatagacctcccaagctatcttttggttttcctcatcctgaccctgtagtagaaacatcctccttgtcagcagtgcaacctccagaacctacttacaagttgactatcatgaaagaattggatgaaaccaatgcattatcttccttacagattgaaacaatagtgtatgcttgtcagaggcatcatcatcatcttccaactggagctagagcaggtttcttcatcggtgatggggctggtgttggtaaaggacgtaccgttgctggattgatctgggaaaattggcagcagggaaggcataaagctttgtggatatcaattggttcagacctgaaatatgacgctcgcagagatctggatgatgttggtgcaaaatgtgtggaagttggtacagtggtgcgggtctgagtttgatggtcttctggtgttcgacgagtgccacaaggccaaaaatctgattcctgaggcagggagccagcccacccgcactggatatgttacctcaagcacgggttgtttattgttcagcgactggtgcatctgagcctcgaaatttaggttatatggttcggcttggtctctggggagatggaacatcgtttgagaatttcaaccaatttttaggtgctcttgagaaaggaggtgtgggtgctcttgaacttgttgctatggacatgaaagccaggggaatgtatgtttgccgtactctaagttacaagggtgctaactttgatatcctagaatcacttctggaggaaagaatgatggatatttttgttagtatgattgctcattgacatgaagtagtattcttttaaatttaattaacttggcgagaacaaagtggtagaaactgaaaggagacaatgt

SEQ ID NO: 13676 - DNA, 1300 bp, Zea Mays
atggccggccggggcgcctccccggccgcggcggccgccgtccaggtgcgctgcgccggctgccgcggcgtgctcgccgtggctcccggcatgaccgagttcatctgccccaagtgtcgcatggcgcagcgcctcccgccggagctcatgccgccctccccgcccaaggcctccccgactccgcctccctcaggtccaactccgcctccaccacctccaccttcgctgccgcctccgcctccgcctccgcctcagccagtgccgcaccctctgacccgccgctccgctccccgggcgcagggcgtggaccccaccaagatccagctcccctgcgcgcgctgcaaggccgtcctcaacgtgccccacggcctcgatcgcttccgctgcccgcagtgcggcgtcgacctcgctgttgacttgtccaagctccgccatttccttgcatctgctggcccaggcttttttccgcccccactcccacctcccccacccccgcaacccccagtgccaatgcctcatctgccctttctgccgatgatgccacgccttccattgcccatgctgccgatgctctctcctgctgagctaccggaggagatcaatgaggttgcagttgatgttgagcgcgacgaagatgaaagtggcacttttggggaaactttcattgattatagacctcccaagctatcttttggttttcctcatcctgaccctgtagtagaaacatcctccttgtcagcagtgcaacctccagaacctacttacaagttgactatcatgaaagaattggatgaaaccaatgcattatcttccttacagattgaaacaatagtgtatgcttgtcagaggcatcatcatcatcttccaactggagctagagcaggtttcttcatcggtgatggggctggtgttggtaaaggacgtaccgttgctggattgatctgggaaaattggcagcagggaaggcataaagctttgtggatatcaattggttcagacctgaaatatgacgctcgcagagatctggatgatgttggtgcaaaatgtgtggaaggtgctcttgagaaaggaggtgtgggtgctcttgaacttgttgctatggacatgaaagccaggggaatgtatgtttgccgtactctaagttacaagggtgctaactttgatatcctagaatcacttctggaggaaagaatgatggatatttttgttagtatgattgctcattgacatgaagtagtattcttttaaatttaattaacttggcgagaacaaagtggtagaaactgaaaggagacaatgt

SEQ ID NO: 13677 - DNA, 4063 bp, Zea Mays
atggccggccggggcgcctccccggccgcggcggccgccgtccaggtgcgctgcgccggctgccgcggcgtgctcgccgtggctcccggcatgaccgagttcatctgccccaagtgtcgcatggcgcagcgcctcccgccggagctcatgccgccctccccgcccaaggcctccccgactccgcctccctcaggtccaactccgcctccaccacctccaccttcgctgccgcctccgcctccgcctccgcctcagccagtgccgcaccctctgacccgccgctccgctccccgggcgcagggcgtggaccccaccaagatccagctcccctgcgcgcgctgcaaggccgtcctcaacgtgccccacggcctcgatcgcttccgctgcccgcagtgcggcgtcgacctcgctgttgacttgtccaagctccgccatttccttgcatctgctggcccaggcttttttccgcccccactcccacctcccccacccccgcaacccccagtgccaatgcctcatctgccctttctgccgatgatgccacgccttccattgcccatgctgccgatgctctctcctgctgagctaccggaggagatcaatgaggttgcagttgatgttgagcgcgacgaagatgaaagtggcacttttggggaaactttcattgattatagacctcccaagctatcttttggttttcctcatcctgaccctgtagtagaaacatcctccttgtcagcagtgcaacctccagaacctacttacaagttgactatcatgaaagaattggatgaaaccaatgcattatcttccttacagattgaaacaatagtgtatgcttgtcagaggcatcatcatcatcttccaactggagctagagcaggtttcttcatcggtgatggggctggtgttggtaaaggacgtaccgttgctggattgatctgggaaaattggcagcagggaaggcataaagctttgtggatatcaattggttcagacctgaaatatgacgctcgcagagatctggatgatgttggtgcaaaatgtgtggaagtgcacgctttaaataagcttccatattctaagctagactctaaaacctttgggatcacagatggagttgtttttgtaacttatagcagcttgatagcatcctctgagaaccgttcccgtttgcaacagttggtacagtggtgcgggtctgagtttgatggtcttctggtgttcgacgagtgccacaaggccaaaaatctgattcctgaggcagggagccagcccacccgcactggtaaagctgttcttgagattcaggatatgttacctcaagcacgggttgtttattgttcagcgactggtgcatctgagcctcgaaatttaggttatatggttcggcttggtctctggggagatggaacatcgtttgagaatttcaaccaatttttaggtgctcttgagaaaggaggtgtgggtgctcttgaacttgttgctatggacatgaaagccaggggaatgtatgtttgccgtactctaagttacaagggtgctaactttgatatcctagaatcacttctggaggaaagaatgatggattttgctactaggacccttgtgcgctgtgacagtttcgagccgctatacactcttcgcctgcctgccttctcttcctcgacctccaccacgcatgccctgaccgctgctacctcgtccatcacttggcaccgccgcctcctaggccatcccaggcgtgatgtgatgtcaagctgtctagcagttctgtcatctcatgtagtcggggttcttttgagcatttgtgtcatgcctgtcagttaggtcgtcatgttagacttcctttttcctccgcttctagagcaacaaacatttttgatcttgtccactgtgatgtttggacatcccctgtactcaacatttctggcaatagatattatttgctctttctagatgattactcattatttttggacttttcccttgcgcttgaagtctgatatgttccccaccctctctcacttcttctcttgggtttccacttagtttggacgcgccatcggggctgtccagtgtgacaacgggcgggagtttgacaactccacgtcccgtgccttcttccactcccacgacgctcatttgaggatgtcgtgcccttgcacttctcaatacgacagggctaagcgcatgattcacaccacaaacaacatcatgcgctccttgctgttctaggccttctttcttgctactgggccgaggggctggccactgccacctatttgctcaaccaggcaccaaggcggttcctcaccccaccccctactttgctctcttcgacacctctccctcctacgatcacctccacacgttcgcatgtgcttgctatcctaatctttctgccactgcctctcacaagcttgcgccccgatccacccgttgcgtcttccttgggtactcccctgatcacaaggggtatcagtgtttggacctctccacccacagagttctcgtctcccgtcacgtcgtcttcgacgagtatgactttctcttctctgtctcttctttcgctgcctcctcctctgagtatgacaccctccacgaggcgacctctatggtttctccccttgcttcctccgtcgtgccatgcatggcctcgccccacctcgtgcgaccctgacgccaccacgcgcggccccagcctctcccgcgcctgcgtcaccatgagcgacctcggagtcttccgcgttgccatgtgcggtcccagtgtctctcgcgctgccacacgtggccttgatctttttagtgttctaccacacgcgaccccgacctctcccgcaccaccatgagcggcttcgccacctcaagctaatccagtgtccaccgactcgacctcctcgttgcgctttgtggaccctatccacatctaccagtgccgtgtcccgtccgctgccttactctctctcgcacggagctgctggtgtatcaccctattgctctgtgtcaggacctcgggcacatccacccgatgttacgcgacgggccgctggtgccctccggcctgtcgaccgtctggtcctctcgatgtcgtcctctccggcgctttcccctcgagctgtcctctgtttgtagtgcggtcgccgaccccaattggtggcgcgctacggaggagtacgaggccttgcaggcgaaccacacctgggacctgttgccatgcccctatggtaccaatgtggtcatcaggaaatagatcttcaagcacaagctaaaggcggatggctccttggatcggtacaaggctcgctggtcctgtaggcttcacccaacgtcccggggtggacaatgacgagacctaaagcaccgtggtgaagcctggtaccatccggactgttttgactctggctctctcatgggcctgaccagtgcatcacctcgacgtcaagaatgccttcctccatggcactctgatggagacggtgtattgcactcatccgtcgacttcgtggacccttctcacctcgacatggtctgcaagctcaaccgttcccgagcttggtacatttgctttgctaccttcttactctcacagggctttgtcgaggccaaggcagacacctccctattcgtctttggccgcagcctagatactgtgtatctcctctacgtcgacgacatcgttctcatggcctcctccctcggccttctgcgacgcatcatctcctccctgcaacaggagtttgcgatgaaggatctgggtgagctgcaccatttcctggggatcaccgtcgagcgttgaccctagggcctgttcctccaccagcgtcagtacaccgtctacatcctcgagcgcgctggcatggctgattgcaatccctgcatgactctggtggacactcagggcaaggtttgctccgacgatggcccttcggtggctgatccgaccagctatcggagtctcgctagggccttgcagtacctcatctttaccctccccaacatcgcctacgccgtccaacagatgttcctccatatgcacgcctcgcctgagccacatcctcat

SEQ ID NO: 13678 - DNA, 767 bp, Zea Mays
caccagacctgttccccctcagcttgcagcctaatagtgtcagaatgacgaagaactcgatggctgtccacatggaaaacattctgtcgccaggcaaccagaatcccacctctcgtatctagagcaggaagtgcacgctttaaataagcttccatattctaagctagactctaaaacctttgggatcacagatggagttgtttttgtaacttatagcagcttgatagcatcctctgagaaccgttcccgtttgcaacagttggtacagtggtgcgggtctgagtttgatggtcttctggtgttcgacgagtgccacaaggccaaaaatctgattcctgaggcagggagccagcccacccgcactggtaaagctgttcttgagattcaggatatgttacctcaagcacgggttgtttattgttcagcgactggtgcatctgagcctcgaaatttaggttatatggttcggcttggtctctggggagatggaacatcgtttgagaatttcaaccaatttttaggtgctcttgagaaaggaggtgtgggtgctcttgaacttgttgctatggacatgaaagccaggggaatgtatgtttgccgtactctaagttacaagggtgctaactttgatatcctagaatcacttctggaggaaagaatgatggatatttttgttagtatgattgctcattgacatgaagtagtattcttttaaatttaattaacttggcgagaacaaagtggtagaaactgaaaggagacaatgt

SEQ ID NO: 13679 - DNA, 691 bp, Zea Mays
atgaagaactcaaattttaacatctatctggtaaatacatccattttccattcattgcacgctttaaataagcttccatattctaagctagactctaaaacctttgggatcacagatggagttgtttttgtaacttatagcagcttgatagcatcctctgagaaccgttcccgtttgcaacagttggtacagtggtgcgggtctgagtttgatggtcttctggtgttcgacgagtgccacaaggccaaaaatctgattcctgaggcagggagccagcccacccgcactggtaaagctgttcttgagattcaggatatgttacctcaagcacgggttgtttattgttcagcgactggtgcatctgagcctcgaaatttaggttatatggttcggcttggtctctggggagatggaacatcgtttgagaatttcaaccaatttttaggtgctcttgagaaaggaggtgtgggtgctcttgaacttgttgctatggacatgaaagccaggggaatgtatgtttgccgtactctaagttacaagggtgctaactttgatatcctagaatcacttctggaggaaagaatgatggatatttttgttagtatgattgctcattgacatgaagtagtattcttttaaatttaattaacttggcgagaacaaagtggtagaaactgaaaggagacaatgt

SEQ ID NO: 13680 - DNA, 2998 bp, Zea Mays
gcaaattagaactttgtttgaatttaaaatctaattggaatttgaaaagcaaacaaaaagaaaataataaaaaaggacagaaacctcaccttgggctgatttcacgtgtctcggcccacctacaaccgtgccccactgattgtggcagaacctcccaagttattgggcccacatgcacctatccttgtctcaaagacctcagacggctgtgcatgtgcaccagataacttaacatgatccgtctgagtgtcccaaggaccccgaataaaccacttacaaccagaaccgcgagattaagtaaacacaaatcacacaccaacaattttgcagcggaaaacttattaccaaattttatgagttacatcaagttttataatgtacatgatcggagtgcttacaaaaagtgattcaaatgaacaactttgaactattataaattatttatagttttgaaatatatgctagctcaagtgaccatcctcaatatgaagataaagacggggtatacttatataagaaggccgagcccaccagcacttaacaccatcaacatcagcacaaaactataacttgaaaaacaacagggaataaaaccctgagtatggaattactcagcaagacttacccgactaaagaaaagactctcaaggatatgctagatttgggaatcaaggagaggctttagtaagaatcaatttagatatttttgcagaaataacttactaaagtgagtccttactttcaacattttaatgctagattaagtattaatagaccttgtttgcatctagtctaatttcaccatcacattaatcaatccaacatgatttttgctcattaagattccatccatgacttagattgcagggcagtgaccaagtcttcatgtccgcgaagttacagcgatctgaatcgattatactcagctgaggatctctaatcacacgacatatgtaacacttaaaccttgcatatgtaaactcgccaccggggttcttaagaccagatcaggttcacgccaacccagagcacagatacacgaccgtccagcctcttgccacggagggtacacgctactctcgccatctctccactctcattgcgtgttatcttattctggtattagtctgcccgaggcaaagcttacccatgatgaggcatgtgaccagttaaagggtcctcgatcagcaagcctacattcagtataatccttaatcaacctgggtagaacatcacctgttcctagcccaagtcccgatttaagaacttccatccttagcattgtttgtgttccttaggatgaaaagagcatcacagggaactttgcagtaagatcctaccattgctcccaatgaaaatattcttgctggcagaagtcatccttcctcaggataacccctgagctaggcattaacgcaaaggacaacctctatccacaagatttacctctaagcaaggctaagcaattttgtaaatcatattttgatacttcatcagaagtatctataaaggtatgtatatcaaggtaggcaatgcatcaaagggtttccaagcaactcctataaacctaatgcacatttcactagacttaaagtgtgcaaaaattatttaaaaacacaaggaagcggttgcatgcaccggggcttgcctggaataaacactacgttagtgtttgttagatgacgtccacttgacgaccatcctttgtcttggcattcgttcagtttatccatcttcaggttcgtccatcagcatcacctcgcgagtggctcacgctttacatcagcttgtggtcgactcaaccttggtccttcgcatcacgtaatcaataaacatacctaaatgatatgcataatgcacatgaataattataaataggaatagcacaagcctaattattgctacacgatagcgaattaaacacctagcgacgaggcacctaataacatttaaaagcaatcactagatgccgagatattactaaatacaatcagcacacttttctagcttaaacaaatctaactcaaacatcaagaacaatattgcaagataatattacgattttacacagtaaagaattaaacacttaatgagaaggcatcacgacatttcataagcaaacgctagctatcgccatataaccaagcgcaataatcacgcttctcaagattaaccgaatctaacgcaaacatcacaaaacagcaaaccatacacactaagtgcaacactcacattcctgctttctaatcggatctaattccgaaatcaagcaagaataaattatttaacccacgctaattaaataggacatcacaccactcgatctagcgggttgaaccttatcaagcaatatataatcatgtgagagcatttttttttgtcaactaaagatttaaaacattgatgtatactctttcaccacggaattctcaaattctatcctaaatgaatatgtccatgccattcactgttaattactcgaggtagtttgcacatttcttatgacattgaactaaacaccaaacctagaataaactaattaattaagcagggcatcgacttctctaaacaaacaagatttaccaaaaatcactacttacagcactaaacgacataacgatttaaatgctaaatttattcttcatgttactaatttatttgtcctagcaacacatgatatattcatctattaaaatactcctcataaaacttaaatctttacactatgcttcacacgacgcgactatttcaccaacacgaacacaatcatatcgcatatatatctactaatattcgtcgcataattctgtaccacttcactatcacctcactgcatgaaacgatgtatttgaacaacactaatatagtcacaagatcatcatgactaacacaactagcctagcaattcatcaaaccagctaacaaaaataataaatcagctcaccagagctaaatccgacttgaaaccatgaatttgacgacgctgttcggcttgcgc

SEQ ID NO: 13681 - DNA, 341 bp, Zea Mays
cttctccatgccccatcctagtagatagtgtcgttaccgagggccaccattgccgcaagggagaaaaggatgagtgatgccgccgcaattggttcatgtgttgggcagtgtggggtcctcggaagcgggctagtatgcctcgccatgtcgtgcgcaacgcatgcgtggcttcgattgggtggactcatgctcggagtactgaggaatggctcatcagagttatcaagccgccatggatccgctgccccttgtgggcaggagtattcgacacaccaatcaccgtgaggtcacgagaatctgaagatcattctggtacctggaatctcaagtcccaggcaagt

SEQ ID NO: 13682 - DNA, 344 bp, Zea Mays
cttctccatgccccatcctagtagatagtgtcgttaccgagggccaccattgccgcaagggagaaaaggatgagtgatgccgccgcaattggttcatgtgttgggcagtgtggggtcctcggaagcgggctagtatgcctcgccatgtcgtgcgcaacgcatgcgtggcttcgattgggtggactcatgctcggagtactgaggaatggctcatcagagttatcaagccgccatggatccgctgccccttgtgggcaggagtattcgacacaccaatcaccgaagtgaggtcacgagaatctgaagatcattctggtacctggaatctcaagtcccaggcaagt

SEQ ID NO: 13683 - DNA, 2288 bp, Zea Mays
ttacacttcacgtgagctcccacctttggcgagttcatgcacactattccccacaacttgttgagctatgaacgtatgtgagctcactcttgctgtctcacacccccacaggtcaagaacatgtaccacaggatgaggcgcatggaggatgttgtgacgatttcatgagtggtctaggtcgttgtctcccagtcaactttgggttactggatcatgtcttcatatgatgtaattatttatttagtttttacagaactcctattatatagtaaagatgtgatattcgatcctgtgccatgattcatcatatgtgtgagacttggtcccagcacacctggcgattatgtttgcgcccgggtcttggtgccccaaaacacgggtgtgacaagacggccatattgccgaagtttggtgaaggaacatcttccactgctgggatagaacaaactactcctgtcggactgagtgccaaaaaatctactgaagtgccgaaggtgcctgtagccgagccagccgaagccaaagaagaggcggccaaaaagccagagctagaaaaggtaatagtgccgccagaaatcttgagcccacaggcagaagcagaattgccgaaggttacaaaggctcccgccacaactcccaagaggaggagaatggccagcgtgctagacgctgttatggaaacaacaagggcattaactcctgctcctacaaaaaaggttgccgaggctgctacagcttgtgctgaaaccgaagctaggccctcagtgcccgcaaaagcagagcctgccgcgactaagcagagagctgaacaagaatttccggatactagtacgactgtgaagaaggatgtagccgaaaaagctaaatctcctgctcccgaagcaccgttcgagaatctcgactttattgttcgacatgcttcgggaaaaagactatccgaagaagaaattgcagaagttaaacactatgcccgggaattgaaatacccgaagggggctttagtgttcaacggcacgaacaaggatgatttcctatactgtctcccagacaacaaagaaatatccatttgccaggagatggctaaaaatatgggatttccgaagcttgaagctggtctctccgctatgtcaaaagatgaccttggagacagccttgcatacaatagtctgaagggcttaattctccgcaacgcttttagggcacaaaagaacgctgaagatgaaagctgcgtgatagccctcggcaaccttcggtcagaagttatcaagctgagaaatgaagccttggagaaggacaaaattctactttcattggtggatagagtgaaagaagatgaatcaaagttgaacactcaatctgaaacttataaagccgaaattgaagaccttcagaaaaaacttgctgaagctaatgagaactttgcacttgcaaaagctagccaagaaattagtgaatggtcgaaaactagactagagaaaagtgttgaggagcttcgtgaatccaaggaaaggtgcttcgataaatccttggattgagtaagaaaattgaaaaacagctttgctaaagtaggtgcttattcttctgaagagaattttattcgaggcgaccttgagggcgttattgattggataagcggggaagccgaagcttttgaagagatcctgaccgattgcggggacatctgtgctttcactggcgctcgagggattgcggcaatactggagaagggtggttgcgaccacgttaaagctgtggcccagactgaagccgccttctccacagatgatacgagagacccttcgtccgaagctactttggtgggtggaaaattttattccgatgtctgggtgaacggtggctgggaattggccaatgaaatcataaagaagaatgaaaaagaaacccatgaagcccgagaagaagctaggcaagccgaagaagctgctgaacacgaaaggcgtataggtattgtttttgaattttagcttcggcttttattttctggttttgaactaacagtttgcctattacagctgaactgtcaccgctgcccgagcgatacaaccacctagccgatccggtcatgaaagaagcactggatataatgagcattgctaactccatcgtcgacgaagtcatcgacaagctgctgaacgaagtcgcagagaaaatacttaaggaagactagatttttattgtaatgatactatgtaatacttggtgtatggaacaattagtcagacatgtaaattattgtaatatatttctttagaatgcatgaaatttac

SEQ ID NO: 13684 - DNA, 1142 bp, Zea Mays
gctgccgtttcttgcccgtagtttgtagtaaaaattacatgttgttgccccttgcccgcccggggagttctgctcgtactgcatcatcagaggtgacagggggaccacagaagcattagctgggtgaactctttcaaaaggggcaggtgcgctagtttgaatggctgctacaaagcttcaggccttttggaaccaccctgctggccccaaaaccattcatttctgggcgccaacattcaaatggggtatcagcattgccaacatagccgactttgcaaagccgcctgaaaagatatcttaccctcagcaagttgctgttgcatgcactggaatcatttggtcaaggtacagcttggttatcacaccgaaaaactggaaccttttcagtgttaacgttgcaatggcgggtacaggcctgtatcagctttcacggaagattaggcaagattacttgtctggtgagaaggatgctgctccacaactgcaagaatagataatgacaacacacaaagaataactgattgagaagtctgcggcctagggatcttactcttgatttttctgggcaggcaaggatatgtctcgatccaggacgggtcatgtttgttttcttgttcttctgaaatcatgagcaggtcaatgtgaaaatctcctgccaaaaaaagaagcccatgaagtaatattttgtgcatttttgtgggaaaaaagtcatgccaggacatgattcgtatattgtccttttgttcactctatctcgtatttgtgaactctaaattgtttgccaatttgattgatcatagcccagtgttcagagatgtcagtgcccttcaccgtcctcattttgttatgatcgtggtgaagctgaattgttatccctggagaatgagggcattcaataaggagtgtttggtttaagaaaatcactccctccaagatagagggtgtatgtctattctttaagggagtgtttggtttgagaaatcatttcatgcaaaatgagttggtatatcataagtttattccctaaatttggttggatttggttgaatgactctatttcccatgttaatactaactaattaactataattaatgaggtggtaatgaatcaatttattacattccacaaaccaaacaaaaaa

SEQ ID NO: 13685 - DNA, 1067 bp, Zea Mays
gtttctacttgcttcgttgaaaaaggggaccacagaagcattagctgggtgaactctttcaaaaggggcaggtgcgctagtttgaatggctgctacaaagcttcaggccttttggaaccaccctgctggccccaaaaccattcatttctgggcgccaacattcaaatggggtatcagcattgccaacatagccgactttgcaaagccgcctgaaaagatatcttaccctcagcaagttgctgttgcatgcactggaatcatttggtcaaggtacagcttggttatcacaccgaaaaactggaaccttttcagtgttaacgttgcaatggcgggtacaggcctgtatcagctttcacggaagattaggcaagattacttgtctggtgagaaggatgctgctccacaactgcaagaatagataatgacaacacacaaagaataactgattgagaagtctgcggcctagggatcttactcttgatttttctgggcaggcaaggatatgtctcgatccaggacgggtcatgtttgttttcttgttcttctgaaatcatgagcaggtcaatgtgaaaatctcctgccaaaaaaagaagcccatgaagtaatattttgtgcatttttgtgggaaaaaagtcatgccaggacatgattcgtatattgtccttttgttcactctatctcgtatttgtgaactctaaattgtttgccaatttgattgatcatagcccagtgttcagagatgtcagtgcccttcaccgtcctcattttgttatgatcgtggtgaagctgaattgttatccctggagaatgagggcattcaataaggagtgtttggtttaagaaaatcactccctccaagatagagggtgtatgtctattctttaagggagtgtttggtttgagaaatcatttcatgcaaaatgagttggtatatcataagtttattccctaaatttggttggatttggttgaatgactctatttcccatgttaatactaactaattaactataattaatgaggtggtaatgaatcaatttattacattccacaaaccaaacaaaaaa

SEQ ID NO: 13686 - DNA, 1102 bp, Zea Mays
tttcgatattggagggtgccattaacaaattgatgagtttgacctccctactgttaccaggggaccacagaagcattagctgggtgaactctttcaaaaggggcaggtgcgctagtttgaatggctgctacaaagcttcaggccttttggaaccaccctgctggccccaaaaccattcatttctgggcgccaacattcaaatggggtatcagcattgccaacatagccgactttgcaaagccgcctgaaaagatatcttaccctcagcaagttgctgttgcatgcactggaatcatttggtcaaggtacagcttggttatcacaccgaaaaactggaaccttttcagtgttaacgttgcaatggcgggtacaggcctgtatcagctttcacggaagattaggcaagattacttgtctggtgagaaggatgctgctccacaactgcaagaatagataatgacaacacacaaagaataactgattgagaagtctgcggcctagggatcttactcttgatttttctgggcaggcaaggatatgtctcgatccaggacgggtcatgtttgttttcttgttcttctgaaatcatgagcaggtcaatgtgaaaatctcctgccaaaaaaagaagcccatgaagtaatattttgtgcatttttgtgggaaaaaagtcatgccaggacatgattcgtatattgtccttttgttcactctatctcgtatttgtgaactctaaattgtttgccaatttgattgatcatagcccagtgttcagagatgtcagtgcccttcaccgtcctcattttgttatgatcgtggtgaagctgaattgttatccctggagaatgagggcattcaataaggagtgtttggtttaagaaaatcactccctccaagatagagggtgtatgtctattctttaagggagtgtttggtttgagaaatcatttcatgcaaaatgagttggtatatcataagtttattccctaaatttggttggatttggttgaatgactctatttcccatgttaatactaactaattaactataattaatgaggtggtaatgaatcaatttattacattccacaaaccaaacaaaaaa

SEQ ID NO: 13687 - DNA, 1057 bp, Zea Mays
gtgaacaaagcatccctcatattacgtaatgttgtgttcgttattgctggtcacggccatcaccatcttgcacagtgacaagctgtataaagagttaaaagactgacaatggccatcaccatcttgcacattcatttctgggcgccaacattcaaatggggtatcagcattgccaacatagccgactttgcaaagccgcctgaaaagatatcttaccctcagcaagttgctgttgcatgcactggaatcatttggtcaaggtacagcttggttatcacaccgaaaaactggaaccttttcagtgttaacgttgcaatggcgggtacaggcctgtatcagctttcacggaagattaggcaagattacttgtctggtgagaaggatgctgctccacaactgcaagaatagataatgacaacacacaaagaataactgattgagaagtctgcggcctagggatcttactcttgatttttctgggcaggcaaggatatgtctcgatccaggacgggtcatgtttgttttcttgttcttctgaaatcatgagcaggtcaatgtgaaaatctcctgccaaaaaaagaagcccatgaagtaatattttgtgcatttttgtgggaaaaaagtcatgccaggacatgattcgtatattgtccttttgttcactctatctcgtatttgtgaactctaaattgtttgccaatttgattgatcatagcccagtgttcagagatgtcagtgcccttcaccgtcctcattttgttatgatcgtggtgaagctgaattgttatccctggagaatgagggcattcaataaggagtgtttggtttaagaaaatcactccctccaagatagagggtgtatgtctattctttaagggagtgtttggtttgagaaatcatttcatgcaaaatgagttggtatatcataagtttattccctaaatttggttggatttggttgaatgactctatttcccatgttaatactaactaattaactataattaatgaggtggtaatgaatcaatttattacattccacaaaccaaacaaaaaa

SEQ ID NO: 13688 - DNA, 898 bp, Zea Mays
gttgtatccctgcatttcagataacatggacattagttaaagtgcattatatcttaccctcagcaagttgctgttgcatgcactggaatcatttggtcaaggtacagcttggttatcacaccgaaaaactggaaccttttcagtgttaacgttgcaatggcgggtacaggcctgtatcagctttcacggaagattaggcaagattacttgtctggtgagaaggatgctgctccacaactgcaagaatagataatgacaacacacaaagaataactgattgagaagtctgcggcctagggatcttactcttgatttttctgggcaggcaaggatatgtctcgatccaggacgggtcatgtttgttttcttgttcttctgaaatcatgagcaggtcaatgtgaaaatctcctgccaaaaaaagaagcccatgaagtaatattttgtgcatttttgtgggaaaaaagtcatgccaggacatgattcgtatattgtccttttgttcactctatctcgtatttgtgaactctaaattgtttgccaatttgattgatcatagcccagtgttcagagatgtcagtgcccttcaccgtcctcattttgttatgatcgtggtgaagctgaattgttatccctggagaatgagggcattcaataaggagtgtttggtttaagaaaatcactccctccaagatagagggtgtatgtctattctttaagggagtgtttggtttgagaaatcatttcatgcaaaatgagttggtatatcataagtttattccctaaatttggttggatttggttgaatgactctatttcccatgttaatactaactaattaactataattaatgaggtggtaatgaatcaatttattacattccacaaaccaaacaaaaaa

SEQ ID NO: 13689 - DNA, 775 bp, Zea Mays
gatccaaatgtccatgttgaagatgggagtgaaatgatccagcataggccatacaaccagaaagttgatgtctacagttttgccattgtcctgtgggagttagtgactgggaatgtcccctttgcaaacatgagcgcagtgcaagctgcatttgctgtggttaacaagggcgtgcgaccagccataccccacgactgcctccctgcccttgcggagatcatgaccatgtgctgggacacaaaccctgaagtccgtcccccattcgctgagattgtgaggatgctggagcaggtggaggtggaggttctgaccactgtccgtaaggctcgcttccgctgttgcatcgcccaaccgatgacgctggactgacggactgagtcgtccgcaatccaggaaaagaacctggagaggggtttaatcctatgtgtttataatcccaatagacttgtgcttcagaaacagaaggctgactcctcagtctgctcctcagtctgccttctgtctttgacatgttatcgtagagtacacctagctgtcgtcaccagtggttgtaatagaggtagctttatgcttgactaaatacccttccgttataacaagtgcatgctcttgctgctcgctgttatgtgtcttcatcatcatgcggcagcatgtggaagctttgcttaatggtatatatatatgatatatgtattattagtaactagcatggatttgctcctgcctcgtagtctgtcgaaattcgatgctgacagaaccattaatctttgccttg

SEQ ID NO: 13690 - DNA, 1460 bp, Zea Mays
ctccaagccttgtatttacgccccagtccccagtctctccacctagaatcgaatccgcgatcttcttctgctccaagcaaagccgcacccagacctcgacggacggcgagcagcaagagggcaagcccgtaccctatcgactcgaacctcggagcggcggatcggtactcgtaggcagtggtggacatggcttcggcggcggtgatggtgagctcggcgggctccctgctggcgatgctgcaagagccggcgccggagctcaagctccacgcgctcgccagcctcaattctctcgtccacgccttctggcacgagatctccaccagcgtctcctccattgagagtttgtatgaagacgaggagtttgtccagaggcaacttgcagcactagttgcctctaaggtatttttctacttgggcgagctaaatgatgctctgtcatatgcacttggcgctggacccttgtttgatgtttctgacgactctgattatgctcaaacactgttagcaaaagctttggatgaatatactgccatccaatcaaggggcactggggaagaaaaaacgatcgaccctaggctggaggccatagtggaaaggatgctggacaagtgcattcttgatggaaaatatcaacaggccatgggtatgtctgttgagtgccggagactggataaactggaggcagcaatttcccgatgtgataatcttcatggagtgctttcatattgcatcaatctgtctcaccaatatgttagtcaccgtgaatatagattagagattctacaatgtcttgtcaaaatatatcagacattgccaaatccagattatttaagcatttgccagtgtcttatgttcttgggtgagcctgaaagtgttgcgaacatgttggacaagctgatttctggaagcaaggatgatgctctccttgcataccaaactgctttcgatcttgctgaaaatgaaaatcaggctttcctcctgaatgtgcggaatcaccttgatgcactgagttcacatacttctgcccacgtggaccttgacagcggaccgactgtaccaagtaatcaaactaacgctgctacagaactgtctggggatgtccagatgagagatgacataaacatgccaaacggcagtgctaccactgtggattcaaatgcagcaacacatgctgacaggctgacaaaaatcaagggtatactgtcaggagaaacatctattcagttgacattgcagttcctatacagccataatagttcttacaagaaactaccctctagcaagtgtgaagatgtacccagaagtggatttcattgtatcaacgcagcctgtccagtcaatgtctgaatactcgactatctcaagggaacttgattttcagtatgtaaacatgagggcttttgttccttgtaaatatctgagaaccttcttaactgctttctagtgctctatgtttg

SEQ ID NO: 13691 - DNA, 2259 bp, Zea Mays
cttgaaactaggattgggttaaaattggaaccgagtttagtgccatggatgaatgagtgtttcacattgttatcgcgtcaaaacggaaataagaggaggggattaagctaatgccttgtcatcactgggtggcaaactgtcgtattttcattgatgcggtgttttctttcccgtcaggtacttccagccgtgtgggcccggggcagtttggttggtggacgtgaagctacccacgcttccaccagccccaattggcgaggccacaccacaccacaccactcctccgtccagcctctccccctctcctctcctctcctcccaaaacaagagcagcgagacgcgcgcgcgcgcgccacgagctggtggaacctcgccgcctcccgcggcagatctcgcgccgagccctggtttcgacgcgagatccgcgcccgccgtccgccgctcgccgcctccgtcccggagcattaccaggattatacttccaccttgaagatggcgatcggattactagcgtttgagagccaccaggggctctggaacagcggatactattcacagttgtttggaattggaggagttctcatcactcttaccattcttatgttatccacgggctactttgggggaattggtgccccatttgctccatatttctggccgtatctaggacaagttccaaagaagagggaacgcaaaaggcctgtgagagtgtacatggatggatgctttgatctcatgcactacggccatgcaaatgcattgcggcaggccaaattgctgggcgatcagcttgtagttggagtggttagtgatgaggagattgtggcaaacaaaggtccacctgtcctttctatggaagagaggttgactcttgttagtggtctcaagtgggtcgatgaggtcgttcccaatgcaccctatgagataacagaagaattcatgaatactctcttcaacaagtacagcattgattacattattcatggagatgatccttgtcttctacctgatggcactgatgcatatgcgctagcgaagaaggtcgggcgttacaagcaaatcaagcgaacagaaggtgtctcgagcactgacatagttgggaggatattgctaacattcaggcagaaagatgctgacactgatttaagtgttgtcgttgctgagaagtctggagagaaatcaaatgatgaagtgaaaagtcagctatctcatttccttccaacttctcgccggatcatgcagttttcaaatgggcaggtgctcgtgttgtctatgtagatggcacatttgatcttttccacgctggccatgttgagttcctcaggagtgccagacaacttggtgactttcttcttgtgggtatctatgacgacgagtcgatcagggatagaagaggctgtcgtcctataatgcatctccatgagcgtactcttggtgttcttgcctgccgttatgttgatgaagtcattattggtgcaccatgggaagtttctaaggacatgatcactacgtttaacatttcattggttgtccatgggactgtagctgagggcaattcagctggtgaaattgatccttatgctgttccaaagagcatggggattttccagacaatcaggagcccaaaatctataacaacattgtcagtggcgacaagaatagttgacaatcatgaagcttacaagaagaggaacctgaaaaagaaggctagcgaagaccggtactacacacaaaagaaattcgtttctggagactagtgctgcacaaggagtgtatatttctgccagcagtccgaggaaatgcatgtgccaccctgtattgatgttattctacagcagagactggaacagataatcagcaatagaaaggtcacaatgatagtttgagcaatggtgtggatggaccaagctagggaagagagagagagagagagagggagaaaactgtcacattcttctgctgtcgcccttttaggaacgctcacatgacatgaggagttcacataaacgattctttttctttctgactttgttatccccgtatggggatttatatatatctgtagctgaaggccttcagcaaaccgttgttgtatacttgtgtgttgttacttaacagcgtgtgtagtgattagcactgcacactccctgattgtaccatggtatattgaatgtttatactgctggaagaaaaaaagggggaccttgtgatggtcagatgtttaatttatctggtgacagtcttgttccatgcaaaatc

SEQ ID NO: 13692 - DNA, 2272 bp, Zea Mays
cttgaaactaggattgggttaaaattggaaccgagtttagtgccatggatgaatgagtgtttcacattgttatcgcgtcaaaacggaaataagaggaggggattaagctaatgccttgtcatcactgggtggcaaactgtcgtattttcattgatgcggtgttttctttcccgtcaggtacttccagccgtgtgggcccggggcagtttggttggtggacgtgaagctacccacgcttccaccagccccaattggcgaggccacaccacaccacaccactcctccgtccagcctctccccctctcctctcctctcctcccaaaacaagagcagcgagacgcgcgcgcgcgcgccacgagctggtggaacctcgccgcctcccgcggcagatctcgcgccgagccctggtttcgacgcgagatccgcgcccgccgtccgccgctcgccgcctccgtcccggagcattaccaggattatacttccaccttgaagatggcgatcggattactagcgtttgagagccaccaggggctctggaacagcggatactattcacagttgtttggaattggaggagttctcatcactcttaccattcttatgttatccacgggctactttgggggaattggtgccccatttgctccatatttctggccgtatctaggacaagttccaaagaagagggaacgcaaaaggcctgtgagagtgtacatggatggatgctttgatctcatgcactacggccatgcaaatgcattgcggcaggccaaattgctgggcgatcagcttgtagttggagtggttagtgatgaggagattgtggcaaacaaaggtccacctgtcctttctatggaagagaggttgactcttgttagtggtctcaagtgggtcgatgaggtcgttcccaatgcaccctatgagataacagaagaattcatgaatactctcttcaacaagtacagcattgattacattattcatggagatgatccttgtcttctacctgatggcactgatgcatatgcgctagcgaagaaggtcgggcgttacaagcaaatcaagcgaacagaaggtgtctcgagcactgacatagttgggaggatattgctaacattcaggcagaaagatgctgacactgatttaagtgttgtcgttgctgagaagtctggagagaaatcaaatgatgaagtgaaaagtcagctatctcatttccttccaacttctcgccggatcatgcagttttcaaatgggcaggctccttcgccaggtgctcgtgttgtctatgtagatggcacatttgatcttttccacgctggccatgttgagttcctcaggagtgccagacaacttggtgactttcttcttgtgggtatctatgacgacgagtcgatcagggatagaagaggctgtcgtcctataatgcatctccatgagcgtactcttggtgttcttgcctgccgttatgttgatgaagtcattattggtgcaccatgggaagtttctaaggacatgatcactacgtttaacatttcattggttgtccatgggactgtagctgagggcaattcagctggtgaaattgatccttatgctgttccaaagagcatggggattttccagacaatcaggagcccaaaatctataacaacattgtcagtggcgacaagaatagttgacaatcatgaagcttacaagaagaggaacctgaaaaagaaggctagcgaagaccggtactacacacaaaagaaattcgtttctggagactagtgctgcacaaggagtgtatatttctgccagcagtccgaggaaatgcatgtgccaccctgtattgatgttattctacagcagagactggaacagataatcagcaatagaaaggtcacaatgatagtttgagcaatggtgtggatggaccaagctagggaagagagagagagagagagagggagaaaactgtcacattcttctgctgtcgcccttttaggaacgctcacatgacatgaggagttcacataaacgattctttttctttctgactttgttatccccgtatggggatttatatatatctgtagctgaaggccttcagcaaaccgttgttgtatacttgtgtgttgttacttaacagcgtgtgtagtgattagcactgcacactccctgattgtaccatggtatattgaatgtttatactgctggaagaaaaaaagggggaccttgtgatggtcagatgtttaatttatctggtgacagtcttgttccatgcaaaatc

SEQ ID NO: 13693 - DNA, 1452 bp, Zea Mays
atgacccactttgccccctcccttgcatccacccctggtctagacatgaaggttggcgatgaagaagcacttatagaagcagaaggcaattgtttttccaattttcacgttgctggaagctccagtagggtagcatttgctttagtcaagaggaaagcaatgaaggcgaggcacatcaatgattacacctaccctgtcagggactggtttccctcggaacctacgcgggaacttactgatgcagagactgctgcacgtgttgttttcagacagatactctccacgcctcctttcatatcaaggaacccaaagattgcctttatgttcctgaccccgggcaagcttccattcgaaaaattgtgggagttgttctttaagggtcatgatgggagatacactatatatgtgcatgcttcacgggagaagcacgaacatgtcagtcccatatttattggtcgagacatacacagtgagaaggtagggtggggtatgattacaatggttgatgcagagaggaggctgttggcaaaagctctagaagatatagacaaccagcattttgtattgctttcagacagctgcgttcctcttcacaattttgactatgtgtacgactttctcatgggatcaagacacagttttctggactgttttcacgaccctgggccacatggagtttacagatactcaaagaatatgttacctgaggttcgagagtcggagttcaggaaaggttctcagtggttctcaatgaagcgacaacatgcaatggtggtgattgcagacagtctttattactcaaaattcaggctttactgcaggcccggaatggaagaaggtcgcaattgctatgcagatgagcattatctgccgaccctattccacatgatggaccctgctggcattgcaaactggtcagtcacctacgttgactggtctgaaggaaagtggcatcccagatcttttcgtgctaaggatgtcacttatgaacgcctgaagaatatgacttcgattgatgtgagctaccacatcaccagtgatgacaagaaagatctattgcagaggccttgcatgtggaatggactgaagagaccatgctacttgtttgcaaggaaattttaccctgaagcattagacaatcttgtgaacttattctcaaactacacaattttctgagttctacagctggaagcataaacatttttggaagcattggtgttcatgttaattctttgtagattgctggaggggcagatatattgacactaactcagtatatgcatgatagtgaacaagtattagacaactgtgtcaccgataaactgttttaggattatattattttatataggttttcagtgttactctttttttttgtgtctcctggcaatagctaattatgtcaaaactgtcatttataccaccttttccattaatcattcctcaaaagaa

SEQ ID NO: 13694 - DNA, 1380 bp, Zea Mays
atgacccactttgccccctcccttgcatccacccctggtctagacatgaaggttggcgatgaagaagcacttatagaagcagaaggcaattgtttttccaattttcacgttgctggaagctccagtagggtagcatttgctttagtcaagaggaaagcaatgaaggcgaggcacatcaatgattacacctaccctgtcagggactggtttccctcggaacctacgcgggaacttactgatgcagagactgctgcacgtgttgttttcagacagatactctccacgcctcctttcatatcaaggaacccaaagattgcctttatgttcctgaccccgggcaagcttccattcgaaaaattgtgggagttgttctttaagggtcatgatgggagatacactatatatgtgcatgcttcacgggagaagcacgaacatgtcagtcccatatttattggtcgagacatacacagtgagaaggtagggtggggtatgattacaatggttgatgcagagaggaggctgttggcaaaagctctagaagatatagacaaccagcattttgtattgctttcagacagttttcacgaccctgggccacatggagtttacagatactcaaagaatatgttacctgaggttcgagagtcggagttcaggaaaggttctcagtggttctcaatgaagcgacaacatgcaatggtggtgattgcagacagtctttattactcaaaattcaggctttactgcaggcccggaatggaagaaggtcgcaattgctatgcagatgagcattatctgccgaccctattccacatgatggaccctgctggcattgcaaactggtcagtcacctacgttgactggtctgaaggaaagtggcatcccagatcttttcgtgctaaggatgtcacttatgaacgcctgaagaatatgacttcgattgatgtgagctaccacatcaccagtgatgacaagaaagatctattgcagaggccttgcatgtggaatggactgaagagaccatgctacttgtttgcaaggaaattttaccctgaagcattagacaatcttgtgaacttattctcaaactacacaattttctgagttctacagctggaagcataaacatttttggaagcattggtgttcatgttaattctttgtagattgctggaggggcagatatattgacactaactcagtatatgcatgatagtgaacaagtattagacaactgtgtcaccgataaactgttttaggattatattattttatataggttttcagtgttactctttttttttgtgtctcctggcaatagctaattatgtcaaaactgtcatttataccaccttttccattaatcattcctcaaaagaa

SEQ ID NO: 13695 - DNA, 685 bp, Zea Mays
cacctgaggccatcgtcgctttccctgctctccttcttaagatctagtatccagcggcgttgcaggcggctaaacaaccgaaccgaggaatgggtttcacaagcaagctaaagcgctcgaggcatggtgtgtccatgaagctccgagtccgtgatccgaggccaacgcagacagtccaagatggactcagtttcgtggcgagcttgaagcgcgtgttcgcctgcgagcctgacaacattcgtagtgcggttgtggttgagcgtgtgaaggtgcttctggaaggtcaccctggtctcctccgccacttcaaccagttcctgccatggggttacataagggctcatggaccagtcgggaggatcagcgtctgatgcagccagggcagggaagcgcgtgtggctacctaaacaagcctaaacctactagctggtgctttccatcgcatgaatggcagaatgggacaagagtatctggttggcccgtcatgactgctattctgcattggcagtaccattaagaacatgtaatgctaaacatcagaccggccgtatctttcttgcattatgtcatgtctgttccataatggtgaagccacctgactggcatcttctatatatcatgtatatatgcatgttcttgtctgcataggcgttatgggactcgcaggaaacagatcaattttttt

SEQ ID NO: 13696 - DNA, 755 bp, Zea Mays
gtcgctttccctgctctccttcttaagatctagtatccagcggcgttgcaggcggctaaacaaccgaaccgaggaatgggtttcacaagcaagctaaagcgctcgaggcatggtgtgtccatgaagctccgagtccgtgatccgaggccaacgcagacagtccaagatggactcagtttcgtggcgagcttgaagcgcgtgttcgcctgcgagcctgacaagtacgacgagatcatcgccaccatgcgccagttcaagtccgggaggtcgatcgattctttattcgtcttgtctgtgaattgcagcattcgtagtgcggttgtggttgagcgtgtgaaggtgcttctggaaggtcaccctggtctcctccgccacttcaaccagttcctgccatggggttacataagggctcatggaccagtcgggaggatcagcgtctgatgcagccagggcagggaagcgcgtgtggctacctaaacaagcctaaacctactagctggtgctttccatcgcatgaatggcagaatgggacaagagtatctggttggcccgtcatgactgctattctgcattggcagtaccattaagaacatgtaatgctaaacatcagaccggccgtatctttcttgcattatgtcatgtctgttccataatggtgaagccacctgactggcatcttctatatatcatgtatatatgcatgttcttgtctgcataggcgttatgggactcgcaggaaacagatcaattttttt

SEQ ID NO: 13697 - DNA, 795 bp, Zea Mays
cttcgacgaagaaagaggccgaggggaaatctacacatttgaggaaatcgaggaaaggtgcaactcaaactgatgatgaagaaagctgattcgtttgtgctatgttgcaaggggctcctacaagaaaacacagtgcagagttggatgactgccaagatcaatgtagatatggatgcaaggagcctattgctggtaaaccatggcacctgctacggttgatgctgcctcatccgtcttggaagataaatctgtaaattcggtctgaatctcaggcggttgttgtatcaacaagtcctggcacaaagccttcgttgtaataatataagcattgcatggagctgtgtgctgaatgtgtgctacggtactttcaatactgggctcagcatcaatccagaagatgtactctaaacaaagattctggatggcttcttgtgccaactaggaacaatgtaaaatttatgcaagcatttctgctcactcctgatctatgtaatactaagctaaaagcttaaagggcttaagggcttgttcgttttaacgttaatccacgtgtattgcgtggtattgaggccttgttcggttattgatattacatgtgtattggggtgtattgtgtgggattgtgatggattttgacttgttatggatttaaaccggtttaatcccacccaatacatgtggattatcaccaaaacgaacaagccctgaattggtttaaatccataacaagttaaaatctatctgattttaatctcaatgattataatacattctagtccatatggaattgaaggc

SEQ ID NO: 13698 - DNA, 6012 bp, Zea Mays
gaccgtttctccgacatcggacgtcatcttcgcctcagtcgcccctttccgacgtttccacgacgtccgggccactcttctgttggaggaactcacgatggctcatcgtgcgtcttctccatccgccgccctgcttacctccaccaaacctccacaaggcgtgacttcgacggcctccaacaaggctcctgctgcttccaacaaggcgccttcggccccacgtttcgaccaccccaaccatcgcagcaagaggggtggccaaggccgccagggtatccttccattcccaggcactggtcccggcggccagcacgggagtgcctccggcctgtggccctccatccaaaatccttggactggggccatccagatgtggcccggcccacgggcgccgaccccacagcagcagcaaggtctcctggcgcagcaccaggccctgctgccttcgacggcccagcaacagcaggctttctacgctgctccagtatccatcgctcctcaccaggcgctgctggcccatcagacccagcaatacgttcatggtgctctttaaggacagggaggcgccccactgcagcacactctgcagaccggccctctgcagggaagcgccccccagtctccctacggcatgctggcacagccggccactccatcttgggacgctcagtcccttgcatccgccttcagtaccgtgtccctgactccgcctcagcagactgactggtacttcaacaccggtgctacctcccacatgacctccaacgccggtaccctatccaatacttcaactccctctcttactgcaccttcctccattattgtcggtgacggctcgcttcttcctgtcatttccactggcttcactactttacatggttctttacatctcacaatgttcttgtgtcacctaaacttattaagaacctaattttcgttcgcagtttactaccgataataactgtcattgatttgatccctctagttgctctgtgaaggatctactatctcggaacgtgatcgtcaggtgcaatagctccgggccactataccccctgtgcctccctgctgcacacagcttcatcgccagctccactccgtcactttggcatcgccgtctcagtcaccctggccacgagtccctctccaagctcgcatcaatcgttcccatgtgtaataaagatgctagctctcctttatgccatgcttgtcagttgagtcgtcatgttcgccttccgttccgtacgtctacttctcgtgcggttaacaattttgatcttattcactgtgacttgtggacatctcctattttaagtgtctcgggtttcaaatattacttagtcgttcttgatggttgctcccattacttatggactttccctttacaaataaagtctgatgctttcccaactctcactcagtttttcgcctatgtgaaaacacagtttggtgtcacgattaaagttgtgcaatatgacaacgggcacgagtttgacaactccagctcccgaacattcttcctcacccacggtgtcctcctacgcatgtcctgcccctacacctcatctcagaatggtaaagctgagcgcatcatccgtactaccaataacaccattcgctctcttctctttcaggccagcatcccaccaaccttctgggttgaagcactccacacggcaacacttcttctcaacattctacccaccaaaacccttcatttttccactcctcacttcgccctcttcaaaactgtaccctcctatgaacatcttcgcatgttcggttgcacctgctatcccaacttatctgccaccactagccacaaacttgatccccattccgctaagtgtgtttttcttagctactcgtcgcatcacaaagggtactggtgtcttgacctcctatccaaccgtgtcatcctttcccgtcacgttgttttcgatgagtccacttttccctttgctgaacagcaacccactggcctcctcccaagattttgacttcctggatacaattaccactaacccggtgccgtcacctataggcccaccacctctgtttctttcaggactcataccggagaatgttgctgctcccaacacacctacaggcgctgctgctcctagcgcccaagctgttcctggcgctcctgcagctcccggcgctgctgctcccagcaccccagcagcaggcgctgctccacccagtgctgctggtggtgcacccgacgctactgcaccacgccggtttggccaagtcttcacgcgtcgtccacacccccagtgcaggacctggccactacaaccaccccggctggtctagacggctctgccatctcgactggcagtgtcgctgcttcatctccatctcctacggacgcatggcatcgtcgtcccccacccggagcggtggctgtctccctagtgcttaaccaccatcgcatggtcacgcgcgctaaggctggcttccgggtgccagcactgttccacgccgccccctatctccaattccgaagacctttcgtggcgctcttgctgatcctaattggcgagctgccatggaagatgagtatgcaggcactattgcagaatcacacatgggatctggtacctcgaccccatggtgcaaacattgtgaccggcaagtggattttcaagcacaaatttaatgctgatggctctcttgaaaggtacaaggctcgctgggttctctgtggatttacgtaatgacccgacattgatttttgatgagactttcagccccgtcgtgaagcctgctactgtgcggactgtcttatctttggctgtctccagcaactggccgattcatcaacttgatgtcaagaatgctttccttcacgggactctttctgagactgtttattgcagccaaccctcaggttttgaggattcagccagcccacaacatgtttgcagactcaataagtccctctacggactgaaacaagcaccacatgcctggcatagtcggtttgccactcatctgctctccctgggattcatagaggccaagagtgacacatctctgtttgtctaccatagaggaactgacacaacttatttgttactctatgtcgacgacattatactcacaacatcctctactgttctcctccgacacatcattcaggccttacagttggagtttgctatgaaagatttgggtgacctacatcactttctggggatgcaagtttaacgacgagatggaggcctcttcctttcgcaacgtcaatatatgctggatattctggatcgggctagtatggcagattgcaagccctgttctacacctgtcgacacaaactcaaaggtttctgcagctactggtactcctgtttctaatccatcggatttctacagcttagctggagcactacagtacctcacttttacccgaccagacatagcctatgctgtgcaacagatttgtattcacatgcatgatcctcgcgagcctcaccttgccgccttgaagcgcattctacgttatgtttgtggcactctgcatttgggtcttcagttgcgcccttcttctcaggctgagttaattgcatactctgatgccgactgggctggatgtcctgacacacgccgatccacttcaggctttgcagtttttcttggtgataaccttatttcttggtcctccaaacgacagatgactgtgtcccgctccagtgctgaagccgagtaccgggccgtcaccactgttgctgaatccacctggcttggtcagcttctggccgaacttcgtcacccgttacgtcgtgccacgttggtctattgtgacaacatcagtgcggtctacatgtcttcaaaccccgtccagcatcagcgaaccaagcacattgagattgatttgcactttgttcgggatcaggtggctctcggtgatgtccgcgttctccatgtgcctactatctcccagtatgcaaacatcttcaccaaagggcttccctctacagtcttcacggagttcagatccagcctgaacgtctgtggtaccgacgatcagactgcgggggcgtgttagctgatatatcagacatgtgtttcctgccatatagacgcaggatcccctaccatacaagtgtaggcatacttgccttactagcactgcgcatataggaagctacagccgcatataggaagatatagatacaatcctcccatttagggggcagagatagttttcttccattcaaggagatctcagggtattgtttctataaacctgagatctcctacccctctgtccctctataaatatgtgcgcctgtactccctcttcatcaatcaatatagacagcaatcatattgctatcaaccacgatggcgcatggaggcgaggcacgaatgtcatgccctaggggcccctcatagtcgtcaccacaatgacatgcagaaaagacagcatgatccagccggtaggagagcccaagcagccactaggacgcgtggagaaaccgatgagtccctgatctgttgaatcttgacgacgccgtgacgacgatgggcgcagcagatcacaggggtcggctgcacatcctaactacaagagtgcagactccagcagggatcgatctccccaggggtggcaatagtggaactggaagcctaggtcgtaacctaaacttgtgataccataaaggagaatagaattggtgtaattggatggatttattgcattgagcccttagacggtttatatacatgacctaggaagtaaggcaacccacagatacctatggcagtttacgaggcacaatatctaaactaccaaatatactcttaacacatatggcagtctacgagacgcaatatctaaactaccaattgtattctaacacgctgggacggggctgctgctaaccctgtatagtgcctcctccttcgctttatgctgagtgctgacttccaaatatatgtccccaatcaagattgtcattaaaagtgtagttacatttgttgtctgaaggatgttagctgtttcttgagtggattagggaaagcgcagatttaatttgcattattatgcaattcttgtgttacacatgtaatgttagtttttacgtcataactcagttgtttcatggaagaaagatcatttactgctaccctggatgcagatttgtaaattgttagatgataaggcaaccaatcggccaatccttcaaagaggaaattcaggtcatcctgtcatgtgctcatcgctaggggaaatctacacatttgaggaaatcgaggaaaggtgcaactcaaactgatgatgaagaaagctgattcgtttgtgctatgttgcaaggggctcctacaagaaaacacagtgcagagttggatgactgccaagatcaatgtagatatggatgcaaggagcctattgctggtaaaccatggcacctgctacggttgatgctgcctcatccgtcttggaagataaatctgtaaattcggtctgaatctcaggcggttgttgtatcaacaagtcctggcacaaagccttcgttgtaataatataagcattgcatggagctgtgtgctgaatgtgtgctacggtactttcaatactgggctcagcatcaatccagaagatgtactctaaacaaagattctggatggcttcttgtgccaactaggaacaatgtaaaatttatgcaagcatttctgctcactcctgatctatgtaatactaagctaaaagcttaaagggcttaagggcttgttcgttttaacgttaatccacgtgtattgcgtggtattgaggccttgttcggttattgatattacatgtgtattggggtgtattgtgtgggattgtgatggattttgacttgttatggatttaaaccggtttaatcccacccaatacatgtggattatcaccaaaacgaacaagccctgaattggtttaaatccataacaagttaaaatctatctgattttaatctcaatgattataatacattctagtccatatggaattgaaggc

SEQ ID NO: 13699 - DNA, 834 bp, Zea Mays
cttaacttccacatcacattatattatttgcttatctgcatggtttattcggttcaagggaaatctacacatttgaggaaatcgaggaaaggtgcaactcaaactgatgatgaagaaagctgattcgtttgtgctatgttgcaaggggtaaggctcctacaagaaaacacagtgcagagttggatgactgccaagatcaatgtagatatggatgcaaggagcctattgctggtaaaccatggcacctgctacggttgatgctgcctcatccgtcttggaagataaatctgtaaattcggtctgaatctcaggcggttgttgtatcaacaagtcctggcacaaagccttcgttgtaataatataagcattgcatggagctgtgtgctgaatgtgtgctacggtactttcaatactgggctcagcatcaatccagaagatgtactctaaacaaagattctggatggcttcttgtgccaactaggaacaatgtaaaatttatgcaagcatttctgctcactcctgatctatgtaatactaagctaaaagcttaaagggcttaagggcttgttcgttttaacgttaatccacgtgtattgcgtggtattgaggccttgttcggttattgatattacatgtgtattggggtgtattgtgtgggattgtgatggattttgacttgttatggatttaaaccggtttaatcccacccaatacatgtggattatcaccaaaacgaacaagccctgaattggtttaaatccataacaagttaaaatctatctgattttaatctcaatgattataatacattctagtccatatggaattgaaggc

SEQ ID NO: 13700 - DNA, 705 bp, Zea Mays
ggttattgctgcctgcaccacaggctcctacaagaaaacacagtgcagagttggatgactgccaagatcaatgtagatatggatgcaaggagcctattgctggtaaaccatggcacctgctacggttgatgctgcctcatccgtcttggaagataaatctgtaaattcggtctgaatctcaggcggttgttgtatcaacaagtcctggcacaaagccttcgttgtaataatataagcattgcatggagctgtgtgctgaatgtgtgctacggtactttcaatactgggctcagcatcaatccagaagatgtactctaaacaaagattctggatggcttcttgtgccaactaggaacaatgtaaaatttatgcaagcatttctgctcactcctgatctatgtaatactaagctaaaagcttaaagggcttaagggcttgttcgttttaacgttaatccacgtgtattgcgtggtattgaggccttgttcggttattgatattacatgtgtattggggtgtattgtgtgggattgtgatggattttgacttgttatggatttaaaccggtttaatcccacccaatacatgtggattatcaccaaaacgaacaagccctgaattggtttaaatccataacaagttaaaatctatctgattttaatctcaatgattataatacattctagtccatatggaattgaaggc

SEQ ID NO: 13701 - DNA, 3232 bp, Zea Mays
ccgcgaaccccgcccgtgccaagcttgaggaggacgaggagggtagcgacaccaaggtggaagggacgagtagcacccgcagttgctatgaaatcgccgagcggggagatagtcgctgcggtgcgtagtccggcttgggcgcggcggcgtggagtgctgcgggtccatctgccgcggatctcctctcccccattactgggaggtccgccatccatggaaggtgcgccatctactcctctgcccgccatccatggaattcttgtaccgcgtcgtggatccgcgcaatggagggtcgtctgtaccgcccgttgcccacccctaccggaaatcccatcacgccgccccaccccaccggcagagacaatgcgcgatgcacctcacctctaaagccgtccacctcccctcccccttgcaccgcaccgcacacacacacctgcaccaacgccatttccgtgcctggatagatcgtaggtctacgaggtagcatcgaatggctctcccgcaggaagggtagagcctccatgtggcggcctccagatcgcaactccgattcgtcttcccaccccgtgcaggcgcatcgacagaccgaattttggcgaaaagaacgcttggagcacctctatcccctccacgatggaggccaggtacacgacaaccgtgctagggaacaacactgatttgttgccattttggaggatctacgccctcgtggcatgcttggtggccggacttgccctcacctctatcccctctaggcctccgtgatggaggctgggtactcagcggccatggcatgcttggtggccggatcctgtaatgtttatagtgttccattttgttgatccaagccaccaatggagtaaaaactggagtattttttccaattggttatacgtgtcagttttcttgtttctgtgctgagatgctggtgaacctgtaggtgcctgagtcattttggggcattctaatcgtagagctcttgttggggtgaatccagtgatgtgagtaccttttaaactatcatggtggagagtggtggttctatatgcctctatctacaaggatgtccctatattggttaaccattctggtcggtttcatttggataaaggcattggagagtgctaaggggacatgtctagcctatattgagcgctacggtctccagcaagcaacttcgtgatgatttgatgaccatgctcattgttggtcatgagacttctgcagcagtcttgacatggacattttatcttctatccaaggtacctaaatttaaggcacctgaattttaacaacttcaaggggcatggaattccaaagctcttcccaagtacttccaattttttcttcatcgaatcctctttgggaggcttggaaaggtccgtactactgggtgaagtgcaagcctgacgagcccataccagttagtcagccgaaccaagggagcgtgcgagggaggaaggagaagaagcggatcaagcagcgcaaggactttatcatggctgagaagaagaagcgcagagctcagtattctgctgctgttaagagaaaggaggcagaacgaacagaaaggaagatggctgctgtggcaagagagcgggcatgggtagcaaggttgatagagctaaaacaacttgaggaagaaattaaagctgtaatggcataagggcctgctctggaaaatggcaaggcgtctaacctgtttctgctgctctattttctcctcctttgttcctacatagtttaaattgtcacgattcttgtgatggaatggaagaccagtaccacttcttttaacagtaatatcaaatgctggaactgttttttaatatagactctcattagaccatgtttggagtttgtttacttttgatgtaatttagaaaagtgatgcgatggtatctgtgtgcttgacatctgagatggctgttgtctgcaatatatagttttggtacacttgttctatgatacataatttgtactgtcagtattcaagcaactaatgctgcatgcttttgtggctgtgcctgattaattaagcatataatgttgtatagtatgtgtcgtttatacaggtccatatatatatatattgatatgcatttgtccatgcatgatgcttattttacctaaaatggaagaagggcccaagaaacctggcctgtccttgaagaaaataatcatttttaaaataaatgatttgtattgttggtgtgctgcgctccatcgagaacatcgagtgaggtggtgtgctgctgctctaaagaagggtggagaggaagtagcgacaaggttgccaagaccacctggcgcgatgtctcctaccagatcaccaagatcaacatgtacaaggatggtcgacatgtataagatatgcttaagcatcagaggctctgtaaagcagctctgttgggattaacggattcactgtcaaggtcaaacatcactatgatattgctgagatggtccaatcagtgacaatgctggtggtattgttgagatggctggaatgagccacaaaatctgagagaactgatgctcttggtgctgctggcaacccaactgctgctattagaaaggttttgaacatgcgggttccgagagagtacttggagattgaattcaagattctggaaccattctgtgagtctgatattgagaggctaatatatggcacattatagggaaacctatagcagctgacacgagcagagttaggggggttaagttttaggttttaggttgtttatttagggtacatagaagcagaaaggaaaaggttgatgccttttacttagatgtcattaatttggagcactccttttcttgctctatccattttctgtttgtaattttcgttgggcttcggcaaaaaaactaacaaacgagttgtgctccaacttctaatatctgattcaatgtgaaatggaattattccttttgttttgcttgtatgcagttagtggcttctgattgtagaaattgtcattctgtgtactcaaatcacaccaagcattccatgtatttgaaggaacgggagctggctacctcttacagagagacaagcagtaggcggtggattgctgctagcaagttttctaagttcatgatgtcagagtatattccttaaaaagtgacttactctggcacgtaccttactatatcttttaagatatgaaaacatctacttttagtgatgctaacaaaagtatagaataataattagtatttt

SEQ ID NO: 13702 - DNA, 3120 bp, Zea Mays
ctcacctctaaagccgtccacctcccctcccccttgcaccgcaccgcacacacacacctgcaccaacgccatttccgtgcctggatagatcgtaggtctacgaggtagcatcgaatggctctcccgcaggaagggtagagcctccatgtggcggcctccagatcgcaactccgattcgtcttcccaccccgtggcgcatcgacagaccgaattttggcgaaaagaacgcttggagcacctctatcccctccacgatggaggccaggtacacgacaaccgtgctagggaacaacactgatttgttgccattttggaggatctacgccctcgtggcatgcttggtggccggacttgccctcacctctatcccctctaggcctccgtgatggaggctgggtactcagcggccatggcatgcttggtggccggatcctgtaatgtttatagtgttccattttgttgatccaagccaccaatggagtaaaaactggagtattttttccaattggttatacgtgtcagttttcttgtttctgtgctgagatgctggtgaacctgtaggtgcctgagtcattttggggcattctaatcgtagagctcttgttggggtgaatccagtgatgtgagtaccttttaaactatcatggcagaatctgacgcctttaatggaaatggacacaaaccttcgttgcaatggatgattatcttgtcactgacaaaatcactgcattcatagtgcaaatgcaacatgcagcaactgaagtccttaaagaatgctctttgacaggcattgaaactggaaccgcatcttctgtagggacacaaattaaggcaacctccactagcagcaggagacgtctagagcatgaacatggtggagagtggtggttctatatgcctctatctacaaggatgtccctatattggttaaccattctggtcggtttcatttggataaaggcattggagagtgctaaggggacatgtctagcctatattgagcgctacgcttgctcatcgtcatgtagcttcaatccatctatcataggtctccagcaagcaacttcgtgatgatttgatgaccatgctcattgttggtcatgagacttctgcagcagtcttgacatggacattttatcttctatccaaggtacctaaatttaaggcacctgaattttaacaacttcaaggggcatggaattccaaagctcttcccaagtacttccaattttttcttcatcgaatcctctttgggaggcttggaaaggtccgtactactgggtgaagtgcaagcctgacgagcccataccagttagtcagccgaaccaagggagcgtgcgagggaggaaggagaagaagcggatcaagcagcgcaaggactttatcatggctgagaagaagaagcgcagagctcagtattctgctgctgttaagagaaaggaggcagaacgaacagaaaggaagatggctgctgtggcaagagagcgggcatgggtagcaaggttgatagagctaaaacaacttgaggaagaaattaaagctgtaatggcataagggcctgctctggaaaatggcaaggcgtctaacctgtttctgctgctctattttctcctcctttgttcctacatagtttaaattgtcacgattcttgtgatggaatggaagaccagtaccacttcttttaacagtaatatcaaatgctggaactgttttttaatatagactctcattagaccatgtttggagtttgtttacttttgatgtaatttagaaaagtgatgcgatggtatctgtgtgcttgacatctgagatggctgttgtctgcaatatatagttttggtacacttgttctatgatacataatttgtactgtcagtattcaagcaactaatgctgcatgcttttgtggctgtgcctgattaattaagcatataatgttgtatagtatgtgtcgtttatacaggtccatatatatatatattgatatgcatttgtccatgcatgatgcttattttacctaaaatggaagaagggcccaagaaacctggcctgtccttgaagaaaataatcatttttaaaataaatgatttgtattgttggtgtgctgcgctccatcgagaacatcgagtgaggtggtgtgctgctgctctaaagaagggtggagaggaagtagcgacaaggttgccaagaccacctggcgcgatgtctcctaccagatcaccaagatcaacatgtacaaggatggtcgacatgtataagatatgcttaagcatcagaggctctgtaaagcagctctgttgggattaacggattcactgtcaaggtcaaacatcactatgatattgctgagatggtccaatcagtgacaatgctggtggtattgttgagatggctggaatgagccacaaaatctgagagaactgatgctcttggtgctgctggcaacccaactgctgctattagaaaggttttgaacatgcgggttccgagagagtacttggagattgaattcaagattctggaaccattctgtgagtctgatattgagaggctaatatatggcacattatagggaaacctatagcagctgacacgagcagagttaggggggttaagttttaggttttaggttgtttatttagggtacatagaagcagaaaggaaaaggttgatgccttttacttagatgtcattaatttggagcactccttttcttgctctatccattttctgtttgtaattttcgttgggcttcggcaaaaaaactaacaaacgagttgtgctccaacttctaatatctgattcaatgtgaaatggaattattccttttgttttgcttgtatgcagttagtggcttctgattgtagaaattgtcattctgtgtactcaaatcacaccaagcattccatgtatttgaaggaacgggagctggctacctcttacagagagacaagcagtaggcggtggattgctgctagcaagttttctaagttcatgatgtcagagtatattccttaaaaagtgacttactctggcacgtaccttactatatcttttaagatatgaaaacatctacttttagtgatgctaacaaaagtatagaataataattagtatttt

SEQ ID NO: 13703 - DNA, 1343 bp, Zea Mays
ctgacgcctttaatggaaatggacacaaaccttcgttgcaatggatgattatcttgtcactgacaaaatcactgcattcatagtgcaaatgcaacatgcagcaactgaagtccttaaagagtaaatatatcttcttttatccatatgatactcctcttcacctcattcatcatcgccatgttcatcttcatcatcctcttgctgacggagaccaaacatgtgtccatcgaggatatctagatgctctttgacaggcattgaaactggaaccgcatcttctgtagggacacaaattaaggcaacctccactagcagcaggagacgtctagagcatgaacatggtggagagtggtggttctatatgcctctatctacaaggatgtccctatattggttaaccattctggtcggtttcatttggataaaggcattggagagtgctaaggggacatgtctagcctatattgagcgctacgcttcaatccatctatcataggtctccagcaagcaacttcgtgatgatttgatgaccatgctcattgttggtcatgagacttctgcagcagtcttgacatggacattttatcttctatccaaggtacctaaatttaaggcacctgaattttaacaacttcaaggggcatggaattccaaagctcttcccaagtacttccaagtccgtactactgggtgaagtgcaagcctgacgagcccataccagttagtcagccgaaccaagggagcgtgcgagggaggaaggagaagaagcggatcaagcagcgcaaggactttatcatggctgagaagaagaagcgcagagctcagtattctgctgctgttaagagaaaggaggcagaacgaacagaaaggaagatggctgctgtggcaagagagcgggcatgggtagcaaggttgatagagctaaaacaacttgaggaagaaattaaagctgtaatggcataagggcctgctctggaaaatggcaaggcgtctaacctgtttctgctgctctattttctcctcctttgttcctacatagtttaaattgtcacgattcttgtgatggaatggaagaccagtaccacttcttttaacagtaatatcaaatgctggaactgttttttaatatagactctcattagaccatgtttggagtttgtttacttttgatgtaatttagaaaagtgatgcgatggtatctgtgtgcttgacatctgagatggctgttgtctgcaatatatagttttggtacacttgttctatgatacataatttgtactgtcagtattcaagcaactaatgctgcatgcttttgtggctgtgcctgattaattaagcatata

SEQ ID NO: 13704 - DNA, 807 bp, Zea Mays
cccacctaagaatgtgatccttcccaagggatatctaagcacaaaaaatgccgcatcactcataagattatcaagaattcagatacccgaacctgaagagtgttagggaattgatctacaaaagaggttatgggaagctgaacaagcagaggattccgcttagcaacaacaatgtcatcgaggagggccttgggaagcataatatcatctgcatcgaggaccttgttcacgagatcatgacggttggcccacacttcaaagaggccaacaacttcctctggccattcaagctgaaagcgccccttggtggcctcaagaagaagaggaaccactatgtggagggtggcgacgctggcaaccgtgagaactacatcaacgagctcatcaagaggatgaactaggctctcttgtatcctgtgagaatgcattcgatgtcggcatggatatgcaattttgttccatggctgtcatacgtcacgacttcaactaggaaatgggtcctgtttatgtttgcagttgcctctgtaggttttaatacatcaagacataaaccaacacgtgccccaagtgtcactcgctagggctaccaagattgttgcaaaaaagatagcactttttcccgtcactgattatatatttagttctagtttgacaacctcatttttccatagaatttttatttttctaaaaaaataaattatttttctttggaaaaaatagagtttccaaactaacccttatactgacaatgctattgaaccatcgtaaatgttcaacgtgtcataatcgtaaatgcagtcattttat

SEQ ID NO: 13705 - DNA, 187 bp, Zea Mays
gtttttttcaattataaaactgaaagtgcttcatgctagtgctagcactatccatggcaaggtcccgcgcggaggatggggctgcgctagcactatccatgggaacagtcatcatccatcaacagtacacgagttttagcacctgcagccaaattacgagcccatgagtcaccgacggaaagcaaac

SEQ ID NO: 13706 - DNA, 285 bp, Zea Mays
tgctgcactgctggcagaagcgcatctcgcggccggtgacgacaacgatgggcgtcttggagtgcgtctcacagaccttgtggcggcggtggtagtcgcggcacttgcttaggtcggccttgcagccgtccaccgcgcacgacgggcactgtgccccgccggcgccgccgggccgcaagcgcgggcgcttcatcggggtggcggacggagctgcggttgcagccaccggctccttcgtggttgtgcggtccgccgccccgatctcgcctagcccgccgagcttga

SEQ ID NO: 13707 - DNA, 1344 bp, Zea Mays
atggggagagcgaggcccggttcccgccgacgctgcgagtctcgcattgcagagcagaacctggagttcaagaccaagaatgatgtgaccaagaatgatgtaatcgaaacactgaatatgattgtcaaggaaaagtcacaaaagattactactatgcagaatgaagccaaagggtctttagctgcagaggagcaggcaagcaaggccaatgcactggccattgagctcgagaagcagaccgagaagctcaagaaggatattacaaaacaaaaaataaaaaaagaagctctagaggctagggctggcaatgctgataagaaggtgcaagagctaaatatgaagctggagaagctccagaggacaagcagtgatcaaaagcgcaggattcagaagactggacatgctcttaaagctgctgaggacgagctgatgaaggctcagttggaaacaacaacaaaagtaaaacagcttagagagctggactgctctaattttgaggactcatgaagctgaaaaaatacaaactcactttttgctaaaccctagcatattccagttcttgggcatgcagttgctatcagggaactgttgacacatatacagatcaacttagcaacaatgaattgtcatcgccaccaaaaaagttagcaaagccatgccagattcttcatgttccaagaatgatgacagttagatcatcctgaaatatatcaaggtatgacaccattcaggatcctttgtacacaaacctcgcaccctcgttttccctttttccccattacaacaagcaaaactacatcgtgtctaacaaaaaaaaccatatttaagtatcctgataatttgtttccacaaatcaacaaccataacccaaaataatgtattactaataattaaagccactacttctggctttatctagaaacctatatgcataatttgcgaacttgcctggccggacccataatagctttatcttttgcttaccaaacttactaactccagcaacttatttctttaaagttatcctgtcattcatgatttttgtttgaatgctttgaaccttttcttcaaacattacctagatgcacttgccactgttcttaataaacctgcttgtgtactgttattcacttaaatattgtcataacaatgtgttagactgttagcctcttcatgtaccttattcgagaagcacaactttcaattaagtttttgtaacttgagacttagtacctgcttgccatgattagagggaaagataaaataaacatgttatgtgtaattgtttctctcctttgaaagaatattatttcttttataatcctaatattgcattgagctctt

SEQ ID NO: 13708 - DNA, 1008 bp, Zea Mays
gacgaatcgacgagtcttctatcaaagtctcgcattgcagagcagaacctggagttcaagaccaagaatgatgtgaccaagaatgatgtaatcgaaacactgaatatgattgtcaaggaaaagtcacaaaagattactactatgcagaatgaagccaaagggtctttagctgcagaggagcaggcaagcaaggccaatgcactggccattgagctcgagaagcagaccgagaagctcaagaaggatattacaaaacaaaaaataaaaaaagaagctctagaggctagggctggcaatgctgataagaaggtgcaagagctaaatatgaagctggagaagctccagaggacaagcagtgatcaaaagcgcaggattcagaagactggacatgctcttaaagctgctgaggacgagctgatgaaggctcagttggaaacaacaacaaaagtaaaacagcttagagaggtcgaaattgtcgatggaagatcagaaagtcgtgacaatgacatgatgacaacacatggcactaaagatagatttgtggtcatgggactccacactgagcagcggcggctggagcactgcgcactggctggtggctgcttcactgtgcactggctggtggctggcggctcgctggagcacaggagcagtgcgcaccgtgttttggatacgaacagcagcagaatacgaacagcggctggacctgccgacctgggcggttgtgcactggcggctcgctggagtaggagcactgggcggttgcgcctggacctggagcactgcgcactagcggcggctgtaggtggagggaggaccggaggagggaggaggggggcggcggcgtacctggagggcggaggacggccgacggcggcagcgtctggctctggcggctccgcggttgtgcttgtgggcagtttggcggctagggctgtgcgtgtgggcagtttggcggctggagcaagcttgctggttaaaggcccattaaggcccaagaactcatag

SEQ ID NO: 13709 - DNA, 1112 bp, Zea Mays
atgaacaactagctgtctattgactaatttactaactactagctgtcaaaatgtgttgcagccttgcaggagctaggaacatgcaagagtaagctcagctaggaatcagatatgtctactggccttctttttatacttactatgactcatatcgtcatatatagtagttaattagttatatacataatatatatatatatatatatataatttatggctatattgccaaaacgcctagaaaagcgcctagaagcgcctaagaccgagtactcccgactaggcgctaggcaatgggtcaccgcctagattccgcctagcgcctagctgaaccttgctcgctgacacaagagacttctagaggcaacagagacttctagaggcatcacagacagatagggatctcctcctccccacgccatgcgcttcttctagtgagccctcacgccatggatagggagcaacatgagaagtttggaggtccacgttgacgagagcaacagtggtgagcctcgtcgtgttgtgtcccgtcttcaatccgtgggcttgaagatttcctgttcgactgctgttctcgacagcacagtcattcctcaacgtgcctctaattgatgcaggattatcaacaactagtttggaagtcttgcaagttgtatttaccacaggcttttcaacatcatcaacagctggtttggaaaccttgcaagttcaatctgcgacagcaattggtttggaaatcttgcaagttctatctaccaccaactttatcaacatcatcaacaactgctttgaaaaccttgcaagttctatctacgacagcaggttcgttactttccaagaaagggacaaaaagaagactgcaaccaacattttccatcccctttcccctcttcttcttcgctcatttttgttgcatttcctttgggaaacaacctccagatatctgatctgctgggtttgtgttctattcttttcttttcttttcccccttcttttatagtttcctcatattaggttgtgcagacaaagcattagaaaagaatcaatttgtacacttcgtcaggctttggctccaacatgtcttgtgaatttagtgtataaacgatagataaagg

SEQ ID NO: 13710 - DNA, 1165 bp, Zea Mays
atgaacaactagctgtctattgactaatttactaactactagctgtcaaaatgtgttgcagccttgcaggagctaggaacatgcaagagtaagctcagctaggaatcagatatgtctactggccttctttttatacttactatgactcatatcgtcatatatagtagttaattagttatatacataatatatatatatatatatatataatttatggctatattgccaaaacgcctagaaaagcgcctagaagcgcctaagaccgagtactcccgactaggcgctaggcaatgggtcaccgcctagattccgcctagcgcctagctgaaccttgctcgctgacacaagagacttctagaggcaacagagacttctagaggcatcacagacagatagggtgagaatgtgaaatacgaagggacccttctgccttctccgtcaacgacggcgaccatggtagcagtctgtgccccatgcccttctcacatactccgctcctccgcaggatctcctcctccccacgccatgcgcttcttctagtgagccctcacgccatggatagggagcaacatgagaagtttggaggtccacgttgacgagagcaacagtggtgagcctcgtcgtgttgtgtcccgtcttcaatccgtgggcttgaagatttcctgttcgactgctgttctcgacagcacagtcattcctcaacgtgcctctaattgatgcaggattatcaacaactagtttggaagtcttgcaagttgtatttaccacaggcttttcaacatcatcaacagctggtttggaaaccttgcaagttcaatctgcgacagcaattggtttggaaatcttgcaagttctatctaccaccaactttatcaacatcatcaacaactgctttgaaaaccttgcaagttctatctacgacaggttcgttactttccaagaaagggacaaaaagaagactgcaaccaacattttccatcccctttcccctcttcttcttcgctcatttttgttgcatttcctttgggaaacaacctccagatatctgatctgctggctcactcatacgcttcatcaacgttgtgctcgactcacaacgcaaaagcttctgcgtggtagcctaatagccagagtacgacctccatcggtaaattgcatggttgat

SEQ ID NO: 13711 - DNA, 1493 bp, Zea Mays
ccaccttccctaggcctatttggcttgttcccttccctgcaatggcgggaaggaagacgcctctctagattggatcgaattccttcgtttctctcctcaccgaggacggcggagagagacgaggaggaaaggcccggcgcgacggagaagctgaatatctgatatgggtgaaaccatgggaaggagaacagtcagtggccttcttgtcaccaaaggaggctcaattcttgtcttcagggaggaaagcccacgccacaaggccaccgcatgttgtacccgcctctggtgcagcagtaagcttttcccgaacaaagacacgaatacacgcagggcatccagggaaacatcggctcttcagagatcacaagtgtctaggaaatccaactggatgtcccatcaaggaagtatttcttatgatcgaagcaccagtaggaatacagcaagtacttttggtgagactcacaacaaaccaagagaaaaagaaaatctcgggtgtgatctaccggctcggttgaaagaaaggatcaatacatccaggaaaagctcattgggtggactgggaagtcctaacaaatcatcaacaaacacatcaagcagtagccgatcggtttcaagatcagtatgtcggccagcatcgagaatgagaaaggatggaggaaggggcgcagaatctatgaggatgcatagagccagagatagtggtggtagctcttggggagatgtgttgacaagaaattctgaccaagattcttcacacaggtctctatctcgaaacgtgttgaggcataggagcagatctcagcaagggccaatatcatcattggaggataatttagatgattccagtgaatactggcattttgatacagatgacagtgaagaggttgaggatgactatgcctttaatgatcagcataggggaatgagaatggacattgataacatgtcttatgaggacctacttgcgcttggggagagaataggtactgtaagcactggtctttcagatgatgcgctttctgagtgtctgaagagaaacctctatgtgcccacaacttcaagcagcaatgaagatggaggagtactcttctggtgtggaggtggccaagatggcatgcgagcattactaccataccacttgtatccaacagtggcttcagcaaaagaactggtgcccgatttgtaaatgtgacgcttctgccattagctcatagtgttcttgacagtaacagaagtatcagttcattgtaatcaaataggattacacaagtttttttggttctagaacaaattattcacttcaatcctatactgctcttcaattcacactacacttgtcataggaagcaggaaaataagtcctagaagaaaggattttctcagttttgatgttgaagttgaagagtagatgatagtgttgccattctttacatacaaaagcgtcaaaaattcagcattaatagtgcagtttttgtttgccatcgttttcacta

SEQ ID NO: 13712 - DNA, 3377 bp, Zea Mays
cgccactccacagtccacagtcgatctccgacgtcactttcacgcctcacgcggcggccgcgtcatcaaatctcatcgctcggccgctctcacagtcacagctgaatcctctcgcagagccaccacgggagctgaagtcgtcccctcccgcagtcacccccaagcgagaccactcccacctcctccactggcgtctagccggtggctgctgctggtgcgctacgtcactggctcggggggctcggcgcaccttgtgatgaagggaaggcggcagtcagtggtccggcgcatgtacaaggcgctcctgttcctcgtcgccgaccttgtcctcgaatccgcaggactccttggttgaaactcatgccatttgtgaatcagaatggctgctctgaggattcaaacctcagctggtcctcccgaactcagaaggcgcaatcttgctagcaacccagtccatgtggggctggatttggtcgggtttagttcctggatgttgccggtgggtgaccactggtgtgcaggcagcgcagccgtcacaagccatggtgttggatatgttggtgctgggaggaagaactgtcacagggcatgcttgaagaatggtgtggtctgctctttcgacgatagtggtgtcagggtgtctatgctgtgttcatctcttccatctgaagatgtaagtttcagcagcaaaatgtcattagttaattcaacaggctttgcacagaagaagaaagggagtaaggtatggcgaagatcccagggtggtaagaaattggtaaggcatagagctccgaagcatggcctgggaaaggacagacatggtcacagatcttcagttaaggatgatgataccgatgcagttttgtctggtataagcaaggagtccagcattgaagagtgcaattctgctctgatccgtcttgagaagctcagcgatgagaaggctcttaagttctttgagtggatgaaggttagtggcaagctaaagggaaacactcatgcatatcacctagctcttaaagccattgcctggaaggaggactggaagatggctgaacttttgcttcatgaaatggttgctgattcggactgcgcattggatgctcgagcatttaacggactgatatatgtttgtgctaaaaggaggcttgatgcttgggcaacaaagtggtttcacatgatgcttgagagagaagtgcagccaaacttgtctaccgttggtatgcttatgggcctttaccagaagactgggaaactatctgaagctgaattcacttttgagaaaatgaggaactgcaatatcaagtgtgttaatgcttactcagccatgattactttgtatacacgtttaggcctttttgccaagtctgaggatactattaatctaatgaacaatgatgggttagttccaaacatggaaaattggttggtgaggttgaatgtctactgccaacagggtaaaatggaggaggccgaattggttttgcagtccattgttgacgaaggattcaccctgaatgttatagcatacaatactttaattacaggctatggaaaaagttctgatatgcagaaggcaaacaaagtgtttgatagctttggtagtgcaggtttagctcctgatgaaacaacctatagatcaatggtagaaggttttggtagagcaaacatatatgaagagacaattttgtactacaggaagctcaagggtgctggcttccgaccaaatgcatccaacttttacactatgatcaacctactagcaagacatgatgacaatgaaactgcagctgaaattctacaggacatgagggcagcaggctgtcagtgttcatcaattgttactttttcttgttcgggcttatggagcagtaggaagaatgcataaggttcttccaattctacaatcttgtttcgacaagattttgcttgatgccacctcatgctctattttagtaacatcgttggttcaaaattctttactggaagaagctttgtatattctgcgtgaaaagaagtggaaagattctgcttttgaagacaacttataccatatattgatatgttcttgcaaagagggtggcaattacaatgatgctgttaggatatacaatcagatgcctaagtctgaaacacatccgaatccccgtatctcttgcactatgattgatgttttcagcacgatggaaaggtttgccgatgctgaaactattttgcttgaactgaaggcttcagcttctgtacttgatatgattgcttacagtgtcattgtgaggatgtacattaaagcacgacgactaaaggatgcttgttcagttttggcagaaatggagaaacaaaaagaaataattcctgataaatacctttttctcgacatgcttcggacttaccaaaaatgtggtctgctggagaagttggctgatacatattactggatacgtaagagtcaagttaaatgtgatgaagccatgtataactgcattattaattgctgtgggcgggctatacctgttgacgagctgtccagaatttttgacgaaatgcttcaacagggacacttagcaaacactgttaccttcaatgtgttgctagatatatatggaaaagccgggctttttaacagggctgaaaaggacgcagggtttcctgtttctcttgaggcatacaactgcatgctggatgcttacggaaaggcagggcgattggaagagttcgcttctgttttgcagaagatgaagagagcgaaatgcaagtttgatcactacacttacaatataatgatcaatatctatggtagaagaggttggatacaagatgtttcgaatgttcttgcggagctaaaggaccgaggtgtggagccagatctgtacagctacaataccttgataaaagcatatgggatagcgagaatgcctgaagatgccgtcaaactgatgcaagagatgagggttaaaggcatcagccctgatcgagtgacatatgctaacctcattgctgccctgcaaaggaacgaaaatttcctagaagctgttaaatggtctctctggatgaagcaaacaggagttgcagggtgtggagcacgaacctgaactcctgaaacgttgggttttgtttcgagattatccagatcggactgttgtcttcatgttgcaattaaatacatactttttttactgtatagatgagtgtatctgattgttctgcaagtgatacagacattcagaaacttgtacgttcttatacaaagacgaattcaatcatgcggataggaagtttttgtcatacctatcatactgttgtaaatttacaataacagtgcacaatcgaagtcaaacaaggcatacagcaatttggaattcacttgttctcaatttttc

SEQ ID NO: 13713 - DNA, 3073 bp, Zea Mays
ctcgcagagccaccacgggagctgaagtcgtcccctcccgcagtcacccccaagcgagaccactcccacctcctccactggcgtctagccggtggctgctgctggtgcgctacgtcactggctcggggggctcggcgcaccttgtgatgaagggaaggcggcagtcagtggtccggcgcatgtacaaggcgctcctgttcctcgtcgccgaccttgtcctcgaatccgcaggactccttggttgaaactcatgccatttgtgaatcagaatggctgctctgaggattcaaacctcagctggtcctcccgaactcagaaggcgcaatcttgctagcaacccagtccatgtggggctggatttggtcgggtttagttcctggatgttgccggtgggtgaccactggtgtgcaggcagcgcagccgtcacaagccatggtgttggatatgttggtgctgggaggaagaactgtcacagggcatgcttgaagaatggtgtggtctgctctttcgacgatagtggtgtcagggtgtctatgctgtgttcatctcttccatctgaagatgtaagtttcagcagcaaaatgtcattagttaattcaacaggctttgcacagaagaagaaagggagtaaggtatggcgaagatcccagggtggtaagaaattggtaaggcatagagctccgaagcatggcctgggaaaggacagacatggtcacagatcttcagttaaggatgatgataccgatgcagttttgtctggtataagcaaggagtccagcattgaagagtgcaattctgctctgatccgtcttgagaagctcagcgatgagaaggctcttaagttctttgagtggatgaaggttagtggcaagctaaagggaaacactcatgcatatcacctagctcttaaagccattgcctggaaggaggactggaagatggctgaacttttgcttcatgaaatggttgctgattcggactgcgcattggatgctcgagcatttaacggactgatatatgtttgtgctaaaaggaggcttgatgcttgggcaacaaagtggtttcacatgatgcttgagagagaagtgcagccaaacttgtctaccgttggtatgcttatgggcctttaccagaagactgggaaactatctgaagctgaattcacttttgagaaaatgaggaactgcaatatcaagtgtgttaatgcttactcagccatgattactttgtatacacgtttaggcctttttgccaagtctgaggatactattaatctaatgaacaatgatgggttagttccaaacatggaaaattggttggtgaggttgaatgtctactgccaacagggtaaaatggaggaggccgaattggttttgcagtccattgttgacgaaggattcaccctgaatgttatagcatacaatactttaattacaggctatggaaaaagttctgatatgcagaaggcaaacaaagtgtttgatagctttggtagtgcaggtttagctcctgatgaaacaacctatagatcaatggtagaaggttttggtagagcaaacatatatgaagagacaattttgtactacaggaagctcaagggtgctggcttccgaccaaatgcatccaacttttacactatgatcaacctactagcaagacatgatgacaatgaaactgcagctgaaattctacaggacatgagggcagcaggctgtcagtgttcatcaattgttactttttcttgttcgggcttatggagcagtaggaagaatgcataaggttcttccaattctacaatcttgtttcgacaagattttgcttgatgccacctcatgctctattttagtaacatcgttggttcaaaattctttactggaagaagctttgtatattctgcgtgaaaagaagtggaaagattctgcttttgaagacaacttataccatatattgatatgttcttgcaaagagggtggcaattacaatgatgctgttaggatatacaatcagatgcctaagtctgaaacacatccgaatccccgtatctcttgcactatgattgatgttttcagcacgatggaaaggtttgccgatgctgaaactattttgcttgaactgaaggcttcagcttctgtacttgatatgattgcttacagtgtcattgtgaggatgtacattaaagcacgacgactaaaggatgcttgttcagttttggcagaaatggagaaacaaaaagaaataattcctgataaatacctttttctcgacatgcttcggacttaccaaaaatgtggtctgctggagaagttggctgatacatattactggatacgacgcagggtttcctgtttctcttgaggcatacaactgcatgctggatgcttacggaaaggcagggcgattggaagagttcgcttctgttttgcagaagatgaagagagcgaaatgcaagtttgatcactacacttacaatataatgatcaatatctatggtagaagaggttggatacaagatgtttcgaatgttcttgcggagctaaaggaccgaggtgtggagccagatctgtacagctacaataccttgataaaagcatatgggatagcgagaatgcctgaagatgccgtcaaactgatgcaagagatgagggttaaaggcatcagccctgatcgagtgacatatgctaacctcattgctgccctgcaaaggaacgaaaatttcctagaagctgttaaatggtctctctggatgaagcaaacaggagttgcagggtgtggagcacgaacctgaactcctgaaacgttgggttttgtttcgagattatccagatcggactgttgtcttcatgttgcaattaaatacatactttttttactgtatagatgagtgtatctgattgttctgcaagtgatacagacattcagaaacttgtacgttcttatacaaagacgaattcaatcatgcggataggaagtttttgtcatacctatcatactgttgtaaatttacaataacagtgcacaatcgaagtcaaacaaggcatacagcaatttggaattcacttgttctcaatttttc

SEQ ID NO: 13714 - DNA, 3178 bp, Zea Mays
tgaggccttgtaccctcgagaggactccttggttgaaactcatgccatttgtgaatcagaatggctgctctgaggattcaaacctcagctggtcctcccgaactcagaaggcgcaatcttgctagcaacccagtccatgtggggctggatttggtcgggtttagttcctggatgttgccggtgggtgaccactggtgtgcaggcagcgcagccgtcacaagccatggtgttggatatgttggtgctgggaggaagaactgtcacagggcatgcttgaagaatggtgtggtctgctctttcgacgatagtggtgtcagggtgtctatgctgtgttcatctcttccatctgaagatgtaagtttcagcagcaaaatgtcattagttaattcaacaggctttgcacagaagaagaaagggagtaaggtatggcgaagatcccagggtggtaagaaattggtaaggcatagagctccgaagcatggcctgggaaaggacagacatggtcacagatcttcagttaaggatgatgataccgatgcagttttgtctggtataagcaaggagtccagcattgaagagtgcaattctgctctgatccgtcttgagaagctcagcgatgagaaggctcttaagttctttgagtggatgaaggttagtggcaagctaaagggaaacactcatgcatatcacctagctcttaaagccattgcctggaaggaggactggaagatggctgaacttttgcttcatgaaatggttgctgattcggactgcgcattggatgctcgagcatttaacggactgatatatgtttgtgctaaaaggaggcttgatgcttgggcaacaaagtggtttcacatgatgcttgagagagaagtgcagccaaacttgtctaccgttggtatgcttatgggcctttaccagaagactgggaaactatctgaagctgaattcacttttgagaaaatgaggaactgcaatatcaagtgtgttaatgcttactcagccatgattactttgtatacacgtttaggcctttttgccaagtctgaggatactattaatctaatgaacaatgatgggttagttccaaacatggaaaattggttggtgaggttgaatgtctactgccaacagggtaaaatggaggaggccgaattggttttgcagtccattgttgacgaaggattcaccctgaatgttatagcatacaatactttaattacaggctatggaaaaagttctgatatgcagaaggcaaacaaagtgtttgatagctttggtagtgcaggtttagctcctgatgaaacaacctatagatcaatggtagaaggttttggtagagcaaacatatatgaagagacaattttgtactacaggaagctcaagggtgctggcttccgaccaaatgcatccaacttttacactatgatcaacctactagcaagacatgatgacaatgaaactgcagctgaaattctacaggacatgagggcagcaggctgtcagtgttcatcaattgttactttttcttgttcgggcttatggagcagtaggaagaatgcataaggttcttccaattctacaatcttgtttcgacaagattttgcttgatgccacctcatgctctattttagtaacatcgttggttcaaaattctttactggaagaagctttgtatattctgcgtgaaaagaagtggaaagattctgcttttgaagacaacttataccatatattgatatgttcttgcaaagagggtggcaattacaatgatgctgttaggatatacaatcagatgcctaagtctgaaacacatccgaatccccgtatctcttgcactatgattgatgttttcagcacgatggaaaggtttgccgatgctgaaactattttgcttgaactgaaggcttcagcttctgtacttgatatgattgcttacagtgtcattgtgaggatgtacattaaagcacgacgactaaaggatgcttgttcagttttggcagaaatggagaaacaaaaagaaataattcctgataaatacctttttctcgacatgcttcggacttaccaaaaatgtggtctgctggagaagttggctgatacatattactggatacgtaagagtcaagttaaatgtgatgaagccatgtataactgcattattaattgctgtgggcgggctatacctgttgacgagctgtccagaatttttgacgaaatgcttcaacagggacacttagcaaacactgttaccttcaatgtgttgctagatatatatggaaaagccgggctttttaacagggctgaaaaggtctttatcatggctcgcaagcagggcctggcggatatcatatcatacaatacgattattgctgcatatgcaaaaggcggcaattttctgagtatgaattattttgtccaaatgatgcaggacgcagggtttcctgtttctcttgaggcatacaactgcatgctggatgcttacggaaaggcagggcgattggaagagttcgcttctgttttgcagaagatgaagagagcgaaatgcaagtttgatcactacacttacaatataatgatcaatatctatggtagaagaggttggatacaagatgtttcgaatgttcttgcggagctaaaggaccgaggtgtggagccagatctgtacagctacaataccttgataaaagcatatgggatagcgagaatgcctgaagatgccgtcaaactgatgcaagagatgagggttaaaggcatcagccctgatcgagtgacatatgctaacctcattgctgccctgcaaaggaacgaaaatttcctagaagctgttaaatggtctctctggatgaagcaaacaggagttgcagggtgtggagcacgaacctgaactcctgaaacgttgggttttgtttcgagattatccagatcggactgttgtcttcatgttgcaattaaatacatactttttttactgtatagatgagtgtatctgattgttctgcaagtgatacagacattcagaaacttgtacgttcttatacaaagacgaattcaatcatgcggataggaagtttttgtcatacctatcatactgttgtaaatttacaataacagtgcacaatcgaagtcaaacaaggcatacagcaatttggaattcacttgttctcaatttttc

SEQ ID NO: 13715 - DNA, 2265 bp, Zea Mays
ccgactcctgtcctccttcttggcccagtcctcacatctatctgtccaactctattcttcccgacgttgctcgggtccattcgccctaacatcctgttctcgaagccgtctgaccttgcccctaccccgctcattatcgttgcgacgttggcccgtccgacatgtccgatctcgctcgtcgtgacaacgcgacccatcctcgacggccagtgagcccatgcactcaaccaatgagatgatattggaaaaaaggaacctatcttgtgagattcagattcctgttgcatgttctgctgtcgatgccctcaaattactggatcacattattgaagctgctagagtagtgtacatggacgagctagaactttattttgcaggagatgatgtcggtccattctctgcgaggaatgaacttgaatctctaaatcttttgttgaaaacaatgaaaaaattgcttctaacttccaacacggctgccaaggaagtactgcagatactacatgatgagatagttgttaagctcaaatctgttggaaagtctgacaatgcttggatggttgttcaaacacagaaccatgatgctgaggattctcttctgaaatggggggagcatcttggtattaaatctagattgcagatagcctattttcagggagctggaagaggaatgatagcttctgaaagtataggtgtgggggatattgctcttgaaattccagagtccctcattatatctgatgaacttctttgtcaatctgaagtgtttctttcattaaaagattttaataacatcacatctgagactatgttattattgtggagcatgagagagcggtataatctaggttcaaagtttaaaccatattttgatacgctcccggcaaattttaatacaggtttgagttttggaatcgatgcacttgctgcattagaaggaacccttctttttgatgagataatacaggctaggcagcacttgcgccagcagtatgatgaattatttcccttgctatgcacaaatttccctgagatattccggaaggatgtgtgcacatgggacgattttctgtgggcatgtgaactatggtattcgaacagtatgatgattgttctaagcagtgggaaattatcgacttgcctggttcctgtcgctggacttctgaaccactcggtctgtagttctgcccccctggaagttttcttttattagtcttcaggggagcaatgctttctcagttatgggaaacatccagggtcgcatcttcttacgttctatggattcctaccaagaggagacaacccttatgatgttatacctttagatcttgacacatccgcggatgacgaggacatcacagctcagtcttcggcgactacaagccaaacaactcatatggttcgtgggacatggctgtcgacatccggaggattccccacgtatggcctgccccagcccttgctgacctatctccgtgctgctctaggctgtgaggtagacgaacccgctgcagaggctgatgtaagggtgctgtgatgttcccatgaatcacgatgaaggaaagcgacaaggtggtgctggagacaatcctgtccatattcagtcccatgcttgaagcgttgttgcctgagcaagatgatcccaaccgggagagcgccagttgggatgtgaagcttgcatcggactacaaagacctgcagaggaagatagtatcgtccatcgtcacttcctgtacctcagccttggaaaatctgtagctcttgctggatggaagtgcttcactgatgaattgcaagagcacacgccctgggggccctgttggaatgcctctgctggcgtgtagatggccaagctattgcagcaactgcaatctgtgaccatctctacaaaccgaagctgctcgtcgtgagttgcttcatccgaggaatgcggagacacggggtcgtgctcccgaggctggcttgtgtgattttatccgcacctgattgttaccgcatactgtagttgcgtttggtgaaagaaagctacttttgagctagttcattgggagccaaacttgctttttggtgaacgaaagctactttggaactaatttcgtcgcaatgtggttgtggtccatgtgctcctgaaatcgctatagcaacactagattcgaaatacgtattgccggtgccggctccagttctaaggaactaatttttagtctctagtttcttaacaggtgactaaaaaaaactaaaatatattatatttcatttaatgataag

SEQ ID NO: 13716 - DNA, 2122 bp, Zea Mays
cctaacatcctgttctcgaagccgtctgaccttgcccctaccccgctcattatcgttgcgacgttggcccgtccgacatgtccgatctcgctcgtcgtgacaacgcgacccatcctcgacggccagtgagcccatgcactcaaccaatgagatgatattggaaaaaaggaacctatcttgtgagattcagattcctgttgcatgttctgctgtcgatgccctcaaattactggatcacattattgaagctgctagagtagtgtacatggacgaggagatgatgtcggtccattctctgcgaggaatgaacttgaatctctaaatcttttgttgaaaacaatgaaaaaattgcttctaacttccaacacggctgccaaggaagtactgcagatactacatgatgagatagttgttaagctcaaatctgttggaaagtctgacaatgcttggatggttgttcaaacacagaaccatgatgctgaggattctcttctgaaatggggggagcatcttggtattaaatctagattgcagatagcctggagctggaagaggaatgatagcttctgaaagtataggtgtgggggatattgctcttgaaattccagagtccctcattatatctgatgaacttctttgtcaatctgaagtgtttctttcattaaaagattttaataacatcacatctgagactatgttattattgtggagcatgagagagcggtataatctaggttcaaagtttaaaccatattttgatacgctcccggcaaattttaatacaggtttgagttttggaatcgatgcacttgctgcattagaaggaacccttctttttgatgagataatacaggctaggcagcacttgcgccagcagtatgatgaattatttcccttgctatgcacaaatttccctgagatattccggaaggatgtgtgcacatgggacgattttctgtgggcatgtgaactatggtattcgaacagtatgatgattgttctaagcagtgggaaattatcgacttgcctggttcctgtcgctggacttctgaaccactcggtctgtagttctgcccccctggaagttttcttttattagtcttcaggggagcaatgctttctcagttatgggaaacatccagggtcgcatcttcttacgttctatggattcctaccaagaggagacaacccttatgatgttatacctttagatcttgacacatccgcggatgacgaggacatcacagctcagtcttcggcgactacaagccaaacaactcatatggttcgtgggacatggctgtcgacatccggaggattccccacgtatggcctgccccagcccttgctgacctatctccgtgctgctctaggctgtgaggtagacgaacccgctgcagaggctgatatgaaggaaagcgacaaggtggtgctggagacaatcctgtccatattcagtcccatgcttgaagcgttgttgcctgagcaagatgatcccaaccgggagagcgccagttgggatgtgaagcttgcatcggactacaaagacctgcagaggaagatagtatcgtccatcgtcacttcctgtacctcagccttggaaaatctgtagctcttgctggatggaagtgcttcactgatgaattgcaagagcacacgccctgggggccctgttggaatgcctctgctggcgtgtagatggccaagctattgcagcaactgcaatctgtgaccatctctacaaaccgaagctgctcgtcgtgagttgcttcatccgaggaatgcggagacacggggtcgtgctcccgaggctggcttgtgtgattttatccgcacctgattgttaccgcatactgtagttgcgtttggtgaaagaaagctacttttgagctagttcattgggagccaaacttgctttttggtgaacgaaagctactttggaactaatttcgtcgcaatgtggttgtggtccatgtgctcctgaaatcgctatagcaacactagattcgaaatacgtattgccggtgccggctccagttctaaggaactaatttttagtctctagtttcttaacaggtgactaaaaaaaactaaaatatattatatttcatttaatgataag

SEQ ID NO: 13717 - DNA, 2070 bp, Zea Mays
atcctgttctcgaagccgtctgaccttgcccctaccccgctcattatcgttgcgacgttggcccgtccgacatgtccgatctcgctcgtcgtgacaacgcgacccatcctcgacggccagtgagcccatgcactcaaccaatgagatgatattggaaaaaaggaacctatcttgtgagattcagattcctgttgcatgttctgctgtcgatgccctcaaattactggatcacattattgaagctgctagagtagtgtacatggacgaggagatgatgtcggtccattctctgcgaggaatgaacttgaatctctaaatcttttgttgaaaacaatgaaaaaattgcttctaacttccaacacggctgccaaggaagtactgcagatactacatgatgagatagttgttaagctcaaatctgttggaaagtctgacaatgcttggatggttgttcaaacacagaaccatgatgctgaggattctcttctgaaatggggggagcatcttggtattaaatctagattgcagatagcctggagctggaagaggaatgatagcttctgaaagtataggtgtgggggatattgctcttgaaattccagagtccctcattatatctgatgaacttctttgtcaatctgaagtgtttctttcattaaaagattttaataacatcacatctgagactatgttattattgtggagcatgagagagcggtataatctaggttcaaagtttaaaccatattttgatacgctcccggcaaattttaatacaggtttgagttttggaatcgatgcacttgctgcattagaaggaacccttctttttgatgagataatacaggctaggcagcacttgcgccagcagtatgatgaattatttcccttgctatgcacaaatttccctgagatattccggaaggatgtgtgcacatgggacgattttctgtgggcatgtgaactatggtattcgaacagtatgatgattgttctaagcagtgggaaattatcgacttgcctggttcctgtcgctggacttctgaaccactcggggagcaatgctttctcagttatgggaaacatccagggtcgcatcttcttacgttctatggattcctaccaagaggagacaacccttatgatgttatacctttagatcttgacacatccgcggatgacgaggacatcacagctcagtcttcggcgactacaagccaaacaactcatatggttcgtgggacatggctgtcgacatccggaggattccccacgtatggcctgccccagcccttgctgacctatctccgtgctgctctaggctgtgaggtagacgaacccgctgcagaggctgatatgaaggaaagcgacaaggtggtgctggagacaatcctgtccatattcagtcccatgcttgaagcgttgttgcctgagcaagatgatcccaaccgggagagcgccagttgggatgtgaagcttgcatcggactacaaagacctgcagaggaagatagtatcgtccatcgtcacttcctgtacctcagccttggaaaatctgtagctcttgctggatggaagtgcttcactgatgaattgcaagagcacacgccctgggggccctgttggaatgcctctgctggcgtgtagatggccaagctattgcagcaactgcaatctgtgaccatctctacaaaccgaagctgctcgtcgtgagttgcttcatccgaggaatgcggagacacggggtcgtgctcccgaggctggcttgtgtgattttatccgcacctgattgttaccgcatactgtagttgcgtttggtgaaagaaagctacttttgagctagttcattgggagccaaacttgctttttggtgaacgaaagctactttggaactaatttcgtcgcaatgtggttgtggtccatgtgctcctgaaatcgctatagcaacactagattcgaaatacgtattgccggtgccggctccagttctaaggaactaatttttagtctctagtttcttaacaggtgactaaaaaaaactaaaatatattatatttcatttaatgataag

SEQ ID NO: 13718 - DNA, 2092 bp, Zea Mays
atcctgttctcgaagccgtctgaccttgcccctaccccgctcattatcgttgcgacgttggcccgtccgacatgtccgatctcgctcgtcgtgacaacgcgacccatcctcgacggccagtgagcccatgcactcaaccaatgagatgatattggaaaaaaggaacctatcttgtgagattcagattcctgttgcatgttctgctgtcgatgccctcaaattactggatcacattattgaagctgctagagtagtgtacatggacgagctagaactttattttgcaggagatgatgtcggtccattctctgcgaggaatgaacttgaatctctaaatcttttgttgaaaacaatgaaaaaattgcttctaacttccaacacggctgccaaggaagtactgcagatactacatgatgagatagttgttaagctcaaatctgttggaaagtctgacaatgcttggatggttgttcaaacacagaaccatgatgctgaggattctcttctgaaatggggggagcatcttggtattaaatctagattgcagatagcctggagctggaagaggaatgatagcttctgaaagtataggtgtgggggatattgctcttgaaattccagagtccctcattatatctgatgaacttctttgtcaatctgaagtgtttctttcattaaaagattttaataacatcacatctgagactatgttattattgtggagcatgagagagcggtataatctaggttcaaagtttaaaccatattttgatacgctcccggcaaattttaatacaggtttgagttttggaatcgatgcacttgctgcattagaaggaacccttctttttgatgagataatacaggctaggcagcacttgcgccagcagtatgatgaattatttcccttgctatgcacaaatttccctgagatattccggaaggatgtgtgcacatgggacgattttctgtgggcatgtgaactatggtattcgaacagtatgatgattgttctaagcagtgggaaattatcgacttgcctggttcctgtcgctggacttctgaaccactcggtatcccctcatatcttgaactatggtcgagtagatgaagctacaaaatcgttgaagtttcccttgtctcgaccctgtgatgcaggggagcaatgctttctcagttatgggaaacatccagggtcgcatcttcttacgttctatggattcctaccaagaggagacaacccttatgatgttatacctttagatcttgacacatccgcggatgacgaggacatcacagctcagtcttcggcgactacaagccaaacaactcatatggttcgtgggacatggctgtcgacatccggaggattccccacatgaaggaaagcgacaaggtggtgctggagacaatcctgtccatattcagtcccatgcttgaagcgttgttgcctgagcaagatgatcccaaccgggagagcgccagttgggatgtgaagcttgcatcggactacaaagacctgcagaggaagatagtatcgtccatcgtcacttcctgtacctcagccttggaaaatctgtagctcttgctggatggaagtgcttcactgatgaattgcaagagcacacgccctgggggccctgttggaatgcctctgctggcgtgtagatggccaagctattgcagcaactgcaatctgtgaccatctctacaaaccgaagctgctcgtcgtgagttgcttcatccgaggaatgcggagacacggggtcgtgctcccgaggctggcttgtgtgattttatccgcacctgattgttaccgcatactgtagttgcgtttggtgaaagaaagctacttttgagctagttcattgggagccaaacttgctttttggtgaacgaaagctactttggaactaatttcgtcgcaatgtggttgtggtccatgtgctcctgaaatcgctatagcaacactagattcgaaatacgtattgccggtgccggctccagttctaaggaactaatttttagtctctagtttcttaacaggtgactaaaaaaaactaaaatatattatatttcatttaatgataag

SEQ ID NO: 13719 - DNA, 2125 bp, Zea Mays
atcctgttctcgaagccgtctgaccttgcccctaccccgctcattatcgttgcgacgttggcccgtccgacatgtccgatctcgctcgtcgtgacaacgcgacccatcctcgacggccagtgagcccatgcactcaaccaatgagatgatattggaaaaaaggaacctatcttgtgagattcagattcctgttgcatgttctgctgtcgatgccctcaaattactggatcacattattgaagctgctagagtagtgtacatggacgagaactttattttgcaggagatgatgtcggtccattctctgcgaggaatgaacttgaatctctaaatcttttgttgaaaacaatgaaaaaattgcttctaacttccaacacggctgccaaggaagtactgcagatactacatgatgagatagttgttaagctcaaatctgttggaaagtctgacaatgcttggatggttgttcaaacacagaaccatgatgctgaggattctcttctgaaatggggggagcatcttggtattaaatctagattgcagatagcctattttcagggagctggaagaggaatgatagcttctgaaagtataggtgtgggggatattgctcttgaaattccagagtccctcattatatctgatgaacttctttgtcaatctgaagtgtttctttcattaaaagattttaataacatcacatctgagactatgttattattgtggagcatgagagagcggtataatctaggttcaaagtttaaaccatattttgatacgctcccggcaaattttaatacaggtttgagttttggaatcgatgcacttgctgcattagaaggaacccttctttttgatgagataatacaggctaggcagcacttgcgccagcagtatgatgaattatttcccttgctatgcacaaatttccctgagatattccggaaggatgtgtgcacatgggacgattttctgtgggcatgtgaactatggtattcgaacagtatgatgattgttctaagcagtgggaaattatcgacttgcctggttcctgtcgctggacttctgaaccactcggggagcaatgctttctcagttatgggaaacatccagggtcgcatcttcttacgttctatggattcctaccaagaggagacaacccttatgatgttatacctttagatcttgacacatccgcggatgacgaggacatcacagctcagtcttcggcgactacaagccaaacaactcatatggttcgtgggacatggctgtcgacatccggaggattccccacgtatggcctgccccagcccttgctgacctatctccgtgctgctctaggctgtgaggtagacgaacccgctgcagaggctgatgtaagggtgctgtgatgttcccatgaatcacgatgaaggaaagcgacaaggtggtgctggagacaatcctgtccatattcagtcccatgcttgaagcgttgttgcctgagcaagatgatcccaaccgggagagcgccagttgggatgtgaagcttgcatcggactacaaagacctgcagaggaagatagtatcgtccatcgtcacttcctgtacctcagccttggaaaatctgtagctcttgctggatggaagtgcttcactgatgaattgcaagagcacacgccctgggggccctgttggaatgcctctgctggcgtgtagatggccaagctattgcagcaactgcaatctgtgaccatctctacaaaccgaagctgctcgtcgtgagttgcttcatccgaggaatgcggagacacggggtcgtgctcccgaggctggcttgtgtgattttatccgcacctgattgttaccgcatactgtagttgcgtttggtgaaagaaagctacttttgagctagttcattgggagccaaacttgctttttggtgaacgaaagctactttggaactaatttcgtcgcaatgtggttgtggtccatgtgctcctgaaatcgctatagcaacactagattcgaaatacgtattgccggtgccggctccagttctaaggaactaatttttagtctctagtttcttaacaggtgactaaaaaaaactaaaatatattatatttcatttaatgataag

SEQ ID NO: 13720 - DNA, 2196 bp, Zea Mays
atcctgttctcgaagccgtctgaccttgcccctaccccgctcattatcgttgcgacgttggcccgtccgacatgtccgatctcgctcgtcgtgacaacgcgacccatcctcgacggccagtgagcccatgcactcaaccaatgagatgatattggaaaaaaggaacctatcttgtgagattcagattcctgttgcatgttctgctgtcgatgccctcaaattactggatcacattattgaagctgctagagtagtgtacatggacgaggtattccagccgtgtcactcattttgtttggctctggattttattcacctctactttctaacgagacgagctgtgcaatttttttcagctagaactttattttgcaggagatgatgtcggtccattctctgcgaggaatgaacttgaatctctaaatcttttgttgaaaacaatgaaaaaattgcttctaacttccaacacggctgccaaggaagtactgcagatactacatgatgagatagttgttaagctcaaatctgttggaaagtctgacaatgcttggatggttgttcaaacacagaaccatgatgctgaggattctcttctgaaatggggggagcatcttggtattaaatctagattgcagatagcctggagctggaagaggaatgatagcttctgaaagtataggtgtgggggatattgctcttgaaattccagagtccctcattatatctgatgaacttctttgtcaatctgaagtgtttctttcattaaaagattttaataacatcacatctgagactatgttattattgtggagcatgagagagcggtataatctaggttcaaagtttaaaccatattttgatacgctcccggcaaattttaatacaggtttgagttttggaatcgatgcacttgctgcattagaaggaacccttctttttgatgagataatacaggctaggcagcacttgcgccagcagtatgatgaattatttcccttgctatgcacaaatttccctgagatattccggaaggatgtgtgcacatgggacgattttctgtgggcatgtgaactatggtattcgaacagtatgatgattgttctaagcagtgggaaattatcgacttgcctggttcctgtcgctggacttctgaaccactcggtctgtagttctgcccccctggaagttttcttttattagtcttcaggggagcaatgctttctcagttatgggaaacatccagggtcgcatcttcttacgttctatggattcctaccaagaggagacaacccttatgatgttatacctttagatcttgacacatccgcggatgacgaggacatcacagctcagtcttcggcgactacaagccaaacaactcatatggttcgtgggacatggctgtcgacatccggaggattccccacgtatggcctgccccagcccttgctgacctatctccgtgctgctctaggctgtgagatgaaggaaagcgacaaggtggtgctggagacaatcctgtccatattcagtcccatgcttgaagcgttgttgcctgagcaagatgatcccaaccgggagagcgccagttgggatgtgaagcttgcatcggactacaaagacctgcagaggaagatagtatcgtccatcgtcacttcctgtacctcagccttggaaaatctgtagctcttgctggatggaagtgcttcactgatgaattgcaagagcacacgccctgggggccctgttggaatgcctctgctggcgtgtagatggccaagctattgcagcaactgcaatctgtgaccatctctacaaaccgaagctgctcgtcgtgagttgcttcatccgaggaatgcggagacacggggtcgtgctcccgaggctggcttgtgtgattttatccgcacctgattgttaccgcatactgtagttgcgtttggtgaaagaaagctacttttgagctagttcattgggagccaaacttgctttttggtgaacgaaagctactttggaactaatttcgtcgcaatgtggttgtggtccatgtgctcctgaaatcgctatagcaacactagattcgaaatacgtattgccggtgccggctccagttctaaggaactaatttttagtctctagtttcttaacaggtgactaaaaaaaactaaaatatattatatttcatttaatgataag

SEQ ID NO: 13721 - DNA, 2147 bp, Zea Mays
atcctgttctcgaagccgtctgaccttgcccctaccccgctcattatcgttgcgacgttggcccgtccgacatgtccgatctcgctcgtcgtgacaacgcgacccatcctcgacggccagtgagcccatgcactcaaccaatgagatgatattggaaaaaaggaacctatcttgtgagattcagattcctgttgcatgttctgctgtcgatgccctcaaattactggatcacattattgaagctgctagagtagtgtacatggacgagctagaactttattttgcaggagatgatgtcggtccattctctgcgaggaatgaacttgaatctctaaatcttttgttgaaaacaatgaaaaaattgcttctaacttccaacacggctgccaaggaagtactgcagatactacatgatgagatagttgttaagctcaaatctgttggaaagtctgacaatgcttggatggttgttcaaacacagaaccatgatgctgaggattctcttctgaaatggggggagcatcttggtattaaatctagattgcagatagcctggagctggaagaggaatgatagcttctgaaagtataggtgtgggggatattgctcttgaaattccagagtccctcattatatctgatgaacttctttgtcaatctgaagtgtttctttcattaaaagattttaataacatcacatctgagactatgttattattgtggagcatgagagagcggtataatctaggttcaaagtttaaaccatattttgatacgctcccggcaaattttaatacaggtttgagttttggaatcgatgcacttgctgcattagaaggaacccttctttttgatgagataatacaggctaggcagcacttgcgccagcagtatgatgaattatttcccttgctatgcacaaatttccctgagatattccggaaggatgtgtgcacatgggacgattttctgtgggcatgtgaactatggtattcgaacagtatgatgattgttctaagcagtgggaaattatcgacttgcctggttcctgtcgctggacttctgaaccactcggtatcccctcatatcttgaactatggtcgagtagatgaagctacaaaatcgttgaagtttcccttgtctcgaccctgtgatgcaggggagcaatgctttctcagttatgggaaacatccagggtcgcatcttcttacgttctatggattcctaccaagaggagacaacccttatgatgttatacctttagatcttgacacatccgcggatgacgaggacatcacagctcagtcttcggcgactacaagccaaacaactcatatggttcgtgggacatggctgtcgacatccggaggattccccacgtatggcctgccccagcccttgctgacctatctccgtgctgctctaggctgtgagatgaaggaaagcgacaaggtggtgctggagacaatcctgtccatattcagtcccatgcttgaagcgttgttgcctgagcaagatgatcccaaccgggagagcgccagttgggatgtgaagcttgcatcggactacaaagacctgcagaggaagatagtatcgtccatcgtcacttcctgtacctcagccttggaaaatctgtagctcttgctggatggaagtgcttcactgatgaattgcaagagcacacgccctgggggccctgttggaatgcctctgctggcgtgtagatggccaagctattgcagcaactgcaatctgtgaccatctctacaaaccgaagctgctcgtcgtgagttgcttcatccgaggaatgcggagacacggggtcgtgctcccgaggctggcttgtgtgattttatccgcacctgattgttaccgcatactgtagttgcgtttggtgaaagaaagctacttttgagctagttcattgggagccaaacttgctttttggtgaacgaaagctactttggaactaatttcgtcgcaatgtggttgtggtccatgtgctcctgaaatcgctatagcaacactagattcgaaatacgtattgccggtgccggctccagttctaaggaactaatttttagtctctagtttcttaacaggtgactaaaaaaaactaaaatatattatatttcatttaatgataag

SEQ ID NO: 13722 - DNA, 2070 bp, Zea Mays
atcctgttctcgaagccgtctgaccttgcccctaccccgctcattatcgttgcgacgttggcccgtccgacatgtccgatctcgctcgtcgtgacaacgcgacccatcctcgacggccagtgagcccatgcactcaaccaatgagatgatattggaaaaaaggaacctatcttgtgagattcagattcctgttgcatgttctgctgtcgatgccctcaaattactggatcacattattgaagctgctagagtagtgtacatggacgagctagaactttattttgcaggagatgatgtcggtccattctctgcgaggaatgaacttgaatctctaaatcttttgttgaaaacaatgaaaaaattgcttctaacttccaacacggctgccaaggaagtactgcagatactacatgatgagatagttgttaagctcaaatctgttggaaagtctgacaatgcttggatggttgttcaaacacagaaccatgatgctgaggattctcttctgaaatggggggagcatcttggtattaaatctagattgcagatagcctattttcagggagctggaagaggaatgatagcttctgaaagtataggtgtgggggatattgctcttgaaattccagagtccctcattatatctgatgaacttctttgtcaatctgaagtgtttctttcattaaaagattttaataacatcacatctgagactatgttattattgtggagcatgagagagcggtataatctaggttcaaagtttaaaccatattttgatacgctcccggcaaattttaatacaggtttgagttttggaatcgatgcacttgctgcattagaaggaacccttctttttgatgagataatacaggctaggcagcacttgcgccagcagtatgatgaattatttcccttgctatgcacaaatttccctgagatattccggaaggatgtgtgcacatgggacgattttctgtgggcatgtgaactatggtattcgaacagtatgatgattgttctaagcagtgggaaattatcgacttgcctggttcctgtcgctggacttctgaaccactcggggagcaatgctttctcagttatgggaaacatccagggtcgcatcttcttacgttctatggattcctaccaagaggagacaacccttatgatgttatacctttagatcttgacacatccgcggatgacgaggacatcacagctcagtcttcggcgactacaagccaaacaactcatatggttcgtgggacatggctgtcgacatccggaggattccccacgtatggcctgccccagcccttgctgacctatctccgtgctgctctaggctgtgagatgaaggaaagcgacaaggtggtgctggagacaatcctgtccatattcagtcccatgcttgaagcgttgttgcctgagcaagatgatcccaaccgggagagcgccagttgggatgtgaagcttgcatcggactacaaagacctgcagaggaagatagtatcgtccatcgtcacttcctgtacctcagccttggaaaatctgtagctcttgctggatggaagtgcttcactgatgaattgcaagagcacacgccctgggggccctgttggaatgcctctgctggcgtgtagatggccaagctattgcagcaactgcaatctgtgaccatctctacaaaccgaagctgctcgtcgtgagttgcttcatccgaggaatgcggagacacggggtcgtgctcccgaggctggcttgtgtgattttatccgcacctgattgttaccgcatactgtagttgcgtttggtgaaagaaagctacttttgagctagttcattgggagccaaacttgctttttggtgaacgaaagctactttggaactaatttcgtcgcaatgtggttgtggtccatgtgctcctgaaatcgctatagcaacactagattcgaaatacgtattgccggtgccggctccagttctaaggaactaatttttagtctctagtttcttaacaggtgactaaaaaaaactaaaatatattatatttcatttaatgataag

SEQ ID NO: 13723 - DNA, 2206 bp, Zea Mays
atcctgttctcgaagccgtctgaccttgcccctaccccgctcattatcgttgcgacgttggcccgtccgacatgtccgatctcgctcgtcgtgacaacgcgacccatcctcgacggccagtgagcccatgcactcaaccaatgagatgatattggaaaaaaggaacctatcttgtgagattcagattcctgttgcatgttctgctgtcgatgccctcaaattactggatcacattattgaagctgctagagtagtgtacatggacgagctagaactttattttgcaggagatgatgtcggtccattctctgcgaggaatgaacttgaatctctaaatcttttgttgaaaacaatgaaaaaattgcttctaacttccaacacggctgccaaggaagtactgcagatactacatgatgagatagttgttaagctcaaatctgttggaaagtctgacaatgcttggatggttgttcaaacacagaaccatgatgctgaggattctcttctgaaatggggggagcatcttggtattaaatctagattgcagatagcctggagctggaagaggaatgatagcttctgaaagtataggtgtgggggatattgctcttgaaattccagagtccctcattatatctgatgaacttctttgtcaatctgaagtgtttctttcattaaaagattttaataacatcacatctgagactatgttattattgtggagcatgagagagcggtataatctaggttcaaagtttaaaccatattttgatacgctcccggcaaattttaatacaggtttgagttttggaatcgatgcacttgctgcattagaaggaacccttctttttgatgagataatacaggctaggcagcacttgcgccagcagtatgatgaattatttcccttgctatgcacaaatttccctgagatattccggaaggatgtgtgcacatgggacgattttctgtgggcatgtgaactatggtattcgaacagtatgatgattgttctaagcagtgggaaattatcgacttgcctggttcctgtcgctggacttctgaaccactcggtatcccctcatatcttgaactatggtcgagtagatgaagctacaaaatcgttgaagtttcccttgtctcgaccctgtgatgcaggggagcaatgctttctcagttatgggaaacatccagggtcgcatcttcttacgttctatggattcctaccaagaggagacaacccttatgatgttatacctttagatcttgacacatccgcggatgacgaggacatcacagctcagtcttcggcgactacaagccaaacaactcatatggttcgtgggacatggctgtcgacatccggaggattccccacgtatggcctgccccagcccttgctgacctatctccgtgctgctctaggctgtgaggtagacgaacccgctgcagaggctgatgtaagggtgctgtgatgttcccatgaatcacgatgaaggaaagcgacaaggtggtgctggagacaatcctgtccatattcagtcccatgcttgaagcgttgttgcctgagcaagatgatcccaaccgggagagcgccagttgggatgtgaagcttgcatcggactacaaagacctgcagaggaagatagtatcgtccatcgtcacttcctgtacctcagccttggaaaatctgtagctcttgctggatggaagtgcttcactgatgaattgcaagagcacacgccctgggggccctgttggaatgcctctgctggcgtgtagatggccaagctattgcagcaactgcaatctgtgaccatctctacaaaccgaagctgctcgtcgtgagttgcttcatccgaggaatgcggagacacggggtcgtgctcccgaggctggcttgtgtgattttatccgcacctgattgttaccgcatactgtagttgcgtttggtgaaagaaagctacttttgagctagttcattgggagccaaacttgctttttggtgaacgaaagctactttggaactaatttcgtcgcaatgtggttgtggtccatgtgctcctgaaatcgctatagcaacactagattcgaaatacgtattgccggtgccggctccagttctaaggaactaatttttagtctctagtttcttaacaggtgactaaaaaaaactaaaatatattatatttcatttaatgataag

SEQ ID NO: 13724 - DNA, 1988 bp, Zea Mays
atcctgttctcgaagccgtctgaccttgcccctaccccgctcattatcgttgcgacgttggcccgtccgacatgtccgatctcgctcgtcgtgacaacgcgacccatcctcgacggccagtgagcccatgcactcaaccaatgagatgatattggaaaaaaggaacctatcttgtgagattcagattcctgttgcatgttctgctgtcgatgccctcaaattactggatcacattattgaagctgctagagtagtgtacatggacgaggagatgatgtcggtccattctctgcgaggaatgaacttgaatctctaaatcttttgttgaaaacaatgaaaaaattgcttctaacttccaacacggctgccaaggaagtactgcagatactacatgatgagatagttgttaagctcaaatctgttggaaagtctgacaatgcttggatggttgttcaaacacagaaccatgatgctgaggattctcttctgaaatggggggagcatcttggtattaaatctagattgcagatagcctggagctggaagaggaatgatagcttctgaaagtataggtgtgggggatattgctcttgaaattccagagtccctcattatatctgatgaacttctttgtcaatctgaagtgtttctttcattaaaagattttaataacatcacatctgagactatgttattattgtggagcatgagagagcggtataatctaggttcaaagtttaaaccatattttgatacgctcccggcaaattttaatacaggtttgagttttggaatcgatgcacttgctgcattagaaggaacccttctttttgatgagataatacaggctaggcagcacttgcgccagcagtatgatgaattatttcccttgctatgcacaaatttccctgagatattccggaaggatgtgtgcacatgggacgattttctgtgggcatgtgaactatggtattcgaacagtatgatgattgttctaagcagtgggaaattatcgacttgcctggttcctgtcgctggacttctgaaccactcggggagcaatgctttctcagttatgggaaacatccagggtcgcatcttcttacgttctatggattcctaccaagaggagacaacccttatgatgttatacctttagatcttgacacatccgcggatgacgaggacatcacagctcagtcttcggcgactacaagccaaacaactcatatggttcgtgggacatggctgtcgacatccggaggattccccacatgaaggaaagcgacaaggtggtgctggagacaatcctgtccatattcagtcccatgcttgaagcgttgttgcctgagcaagatgatcccaaccgggagagcgccagttgggatgtgaagcttgcatcggactacaaagacctgcagaggaagatagtatcgtccatcgtcacttcctgtacctcagccttggaaaatctgtagctcttgctggatggaagtgcttcactgatgaattgcaagagcacacgccctgggggccctgttggaatgcctctgctggcgtgtagatggccaagctattgcagcaactgcaatctgtgaccatctctacaaaccgaagctgctcgtcgtgagttgcttcatccgaggaatgcggagacacggggtcgtgctcccgaggctggcttgtgtgattttatccgcacctgattgttaccgcatactgtagttgcgtttggtgaaagaaagctacttttgagctagttcattgggagccaaacttgctttttggtgaacgaaagctactttggaactaatttcgtcgcaatgtggttgtggtccatgtgctcctgaaatcgctatagcaacactagattcgaaatacgtattgccggtgccggctccagttctaaggaactaatttttagtctctagtttcttaacaggtgactaaaaaaaactaaaatatattatatttcatttaatgataag

SEQ ID NO: 13725 - DNA, 2155 bp, Zea Mays
atcctgttctcgaagccgtctgaccttgcccctaccccgctcattatcgttgcgacgttggcccgtccgacatgtccgatctcgctcgtcgtgacaacgcgacccatcctcgacggccagtgagcccatgcactcaaccaatgagatgatattggaaaaaaggaacctatcttgtgagattcagattcctgttgcatgttctgctgtcgatgccctcaaattactggatcacattattgaagctgctagagtagtgtacatggacgaggagatgatgtcggtccattctctgcgaggaatgaacttgaatctctaaatcttttgttgaaaacaatgaaaaaattgcttctaacttccaacacggctgccaaggaagtactgcagatactacatgatgagatagttgttaagctcaaatctgttggaaagtctgacaatgcttggatggttgttcaaacacagaaccatgatgctgaggattctcttctgaaatggggggagcatcttggtattaaatctagattgcagatagcctggagctggaagaggaatgatagcttctgaaagtataggtgtgggggatattgctcttgaaattccagagtccctcattatatctgatgaacttctttgtcaatctgaagtgtttctttcattaaaagattttaataacatcacatctgagactatgttattattgtggagcatgagagagcggtataatctaggttcaaagtttaaaccatattttgatacgctcccggcaaattttaatacaggtttgagttttggaatcgatgcacttgctgcattagaaggaacccttctttttgatgagataatacaggctaggcagcacttgcgccagcagtatgatgaattatttcccttgctatgcacaaatttccctgagatattccggaaggatgtgtgcacatgggacgattttctgtgggcatgtgaactatggtattcgaacagtatgatgattgttctaagcagtgggaaattatcgacttgcctggttcctgtcgctggacttctgaaccactcggtatcccctcatatcttgaactatggtcgagtagatgaagctacaaaatcgttgaagtttcccttgtctcgaccctgtgatgcaggggagcaatgctttctcagttatgggaaacatccagggtcgcatcttcttacgttctatggattcctaccaagaggagacaacccttatgatgttatacctttagatcttgacacatccgcggatgacgaggacatcacagctcagtcttcggcgactacaagccaaacaactcatatggttcgtgggacatggctgtcgacatccggaggattccccacgtatggcctgccccagcccttgctgacctatctccgtgctgctctaggctgtgaggtagacgaacccgctgcagaggctgatatgaaggaaagcgacaaggtggtgctggagacaatcctgtccatattcagtcccatgcttgaagcgttgttgcctgagcaagatgatcccaaccgggagagcgccagttgggatgtgaagcttgcatcggactacaaagacctgcagaggaagatagtatcgtccatcgtcacttcctgtacctcagccttggaaaatctgtagctcttgctggatggaagtgcttcactgatgaattgcaagagcacacgccctgggggccctgttggaatgcctctgctggcgtgtagatggccaagctattgcagcaactgcaatctgtgaccatctctacaaaccgaagctgctcgtcgtgagttgcttcatccgaggaatgcggagacacggggtcgtgctcccgaggctggcttgtgtgattttatccgcacctgattgttaccgcatactgtagttgcgtttggtgaaagaaagctacttttgagctagttcattgggagccaaacttgctttttggtgaacgaaagctactttggaactaatttcgtcgcaatgtggttgtggtccatgtgctcctgaaatcgctatagcaacactagattcgaaatacgtattgccggtgccggctccagttctaaggaactaatttttagtctctagtttcttaacaggtgactaaaaaaaactaaaatatattatatttcatttaatgataag

SEQ ID NO: 13726 - DNA, 1411 bp, Zea Mays
cttctcagttctcacgtccattcaggttctacatcgactgatcacgtttcaaacgaaccttcccccatccaccagctccagaatctccgtcgcccgccgcccaactcaaaagtggattccaaaatccttcgtccagctgctgactagcgcagtcccgtcgctctcccactccttttcctccttaaatttccacacgaaaaattctcggtggacagaaaaaacaaggcaaagatcagaagagaacgcggaagtgatggccatggatccaagcgtcgcggcgcgccagagcgaggaggcggcggaggccttcttccgcgcggcgccgccgctccgtgaccgcgaccgtctcgccgccagcctcgccgatttcctcgcccgccactccgccgttccacagtctcattcatcggtggtcaaggcagcaattagcaattaccggaaggcaatcgatgaatgccttcttctcaaactgcctttcacaacaatttttgagtaccttcagttactacaaatggtggctacttctatgaattgcttggggcaccgtggaatgttttatcttgctgctgcagtttccgacttctatgttccatgggaaagtatggctaaacataaaattgagtcagcaggcggccctttgaacatgcaactcaaccaagtccctaagatgcttttcatcctccggaaaaactgggctcctgctgcattttgtgtatccttcaagctcgaaacagatcctaacattctcctacagaaggcagagatggctttgaagaagtacggtatgaacgtcgtggtggcaaatgaactcgcaaactacaaagatgtagtggtgatggtcacaagcaacggggggaggacgaccgtgagcaggacgagcaaggcggaagaccttgaagtgcagctaaccgacctcctggtgaagatgcactcggagcacattgcacagcccaattcgtaggaccatcgagcgagcgagatggttaaatcaggggagtatgggcgattctacttctactcgcctagcaaattgtgatatacagagttcaccgggtttgtcataaagatgctcatcaatgtgctgcagcagattaattcaaaaaaaaaatatagctgaatagctcacaccagtacatgcaagtttttgaaaataacctaggtaaagcaggtgatgtgatgccactgttcatgtggaatgtattgagtctatttgagttgcttcttagcgatgaatctggtaaaacgagtcaatgtatcttacgagattcggtttaggcgtagtctgggttgcaatcagtgttacttctgactacacaaactagatagatagtctattgaagtgagatgctacatataaaatgtaatctttattaaaaaataaatagattttagctaattgacagtaaaataa

SEQ ID NO: 13727 - DNA, 3626 bp, Zea Mays
aaaccctcgtccccctttcctcctcttcccccaaaccccgctctcctccgccggtccgcccccgccatcgcctgcactcccccggcctccacaataagccgcatcttgcatcacaccgacgccctaatgctctcgccggcctcctctcgctaggccgcgccgcggacgagcgtcccctgcacctgcacacccgcgcgaccgtgctcgcgcctgctccgcgagaaaacggcgcccctcggtttctgcttgtccttgtccgccggcggcgctgcggggaggagaggagccgggtacaacctgaggcggtccgcacggtcgatggtggcggcgcaggtgacgccggcgccactgctgcggcgccacggctcggcgcccccgtggctgtcgtcgtcgccgcccttcctccttcgccgccgcgcctcgtcgcccttctccctgcaccgccgcgcctcgccgccactggcgatttccgggtgcaggaggcaggactattcccattgctcagatatggctgttcgaggaagcagtgctttcaagctacgtttctatcccaacttagaagtacaaaatattgcacaagaatgggttaaagagagccggaggctgttctatctaagaactgccaacaatgtcacaaataacatctataagggaaacactcctctatggactggaatggtacaaaatgaactctctgaagattgcaggggtttgaactacacttatttgaataatttgagggaacgcgtatcgtccaaatcaattgtaaatagacatggtaataaccgagaactgatcgggcatagtacgataaatcagcatgtgaaatcagtgccagctccagtacgtgttgttaatgatagtgtcaagtgtttcagcatgcctagagcctctaaggtggagattccttggcctgcctattcaccagcggaggatcctttgcttgataaatctaatacagaggtagcaaatattaatgccaaagaagagacaccagttggtcatggagaagtaatatgctttagcatctattcagcaaattctgatgtacaggcagctgattttggaaatggcaaaacttgcatttgggttgatgttctagatggtggaaggggtgtcctgatggagtttgctcctttctttgaagattcatcgatcaagaaggtttggcataactatagttttgatagccatgtcattgagaattatggaatcaaaattgctgggtttcatgctgatacaatgcatcttgcacgcctttgggattcatcaaggaaaattgatggtggatattcacttgaaggacttacaaatgaccgtagagtcatggatactgttccagaggatttacctaagcctggaaagacatcaatgaaaaccatctttggcaggaaaaatattagaaaagatggatctgaagggaaagttgtatctgttgagccagtcaagaagttacaaagggaagacagagagttatggatttgttattcttctctagattccatgagcacattgagactttatgacagcttaaaaagcaagcttacaacaaggagatggatcttggatggttgtcctaggggcaccatgtatgatttctatgaacagtactggcgtccttttggtgccctacttgtgaaaatggagacagagggaatgcttgttgaccgtggttacctttcagagatagaaaaggctgctattgctgaacggaaacttgctgcagataagtttcggaaatgggcatctaaatattgtcctgatgccaagtacatgaatgtgaatagcgatattcaaattcgccaacttctctttggtggcattgaaaatagacacaaatctggtgaaacttggccacatagtaaaacttttaaagtgctaaatgaagaaagtgttgctacagagggtaagaagacgtcaaagtatcgtacaatcaaactttgcagtattgttgaagatctgaaaatcgatatgttcaccccgagtggctggccaacagtcagcggggatgcattgagaagtttggctggtaaaatacctacagaatatatttacacaatagatgatattcaagatgatgatgaatataccagtggttcagaaaacccagatgggaattcctcttatggaacagcatatgaagcatttggtggaggaaagaatggaaaagaagcatgccatgcaattgcagctttatgtgaaatatgttctattgattctttgatatccaatttcattcttccgttgcagggagatcacatatcatgtgcagaggggcgcattcactgttcattgaatatcaatactgagacagggcgcttgtcagcaagaacaccaaatctacagaaccaacctgcccttgagaaggataggtataggattcgccaagcttttgttgcagccccgggaaattctcttatcgttgcagattatggtcagctggagcttaggattttagctcaccttactaattgtaaaagcatgctgcatgctttcaaggcgggtggtgatttccattctaggacagccatgaatatgtatcagcatatccgtgatgctgtccaagaaaagaaagttcttcttgagtggcaccctcaacctggtcaagagaaacctccagtgccgctattgaaggtttctgttaaagaggcaagagatacactgaagctctggtacagggatagaaaagaagtgttagcttggcaaaaaagtcagaagaagcttgcaagcgagaagggtgaagtctacactttgcttgggcggtcgcgccattttccttacctgactcagtatggtcctggccaacgaggtcatattgagcgtgctgctataaatgcaccagtgcagggaagtgcagcagatgttgctatgtgtgccatgcttgagatcgaaaggaatgtccgccttaaggagcttggttggaggctcttattgcaggtgcatgatgaagtgatactggaagggccttcagagtctgctgaggtggccaaggctatagtggtggagtgtatgtccaaacctttctacggaaccaacatcttgaacgtcgacctggctgtcgacgccaagtgtgcaaagagctggtatgctgccaaatagactgaggagacgctgtcacctgccacaaggttgatgacaccagtgcaatcgagaccccactgttcggataaaaaatggtggacccgtcgtcatgcagactgcggttccaggaccttgagtttgttgtggtggtaacccaggccctgacaagacaacacgcccatttcttggctgcagcagaacagcggaagacacggaggactctgctgccagcacctggagttgcgcggtgccaaagcataccagacagaattcgagatggcttggatctcgagtgaactagcgcggtgccaaagcatgctgttttgttcataatctcacttgttcagcgtgctggtgcgttaggttagtttacagatttgttctggtgcagtgaggccaattatggtccctgcggttggtatcgatcttggattgtgcattgcatgtagtaccatactgcatctacactgggaccatttttcagataacagaaacattcagcttcatcctcgaaagagaatcagaccaacttgttacaaaaaaca

SEQ ID NO: 13728 - DNA, 3057 bp, Zea Mays
catcagccgtccacgtgtccgaaccgaacggcgtggagcaggtggcccccgtcgcttgctacgcgcacaccgacctgacggacgtcgccgcgaccgcggctgggctccatcccatcgctatcgtctgcatcgtcaccccccggcccccccccccccccccctctccactctcctccaaccagatcgaaccccacacgccgcataaatcccccgctggcacccaatcaagcaaatcctcgcttccctcccccacgtcgcgtccgatcggcgacggtgcgccatgtcgatgctggacaccttcttcagcaagggcggcggcggcggcttccgcggcgccaagtgcaagacgctgctgaagctgtcgatcccgcggataaagctgctgcggaaccggcgggagctgcagctgcgccagatgcgccgggacatcgccaagctcctagaggccggccaggaggccactgcccggatcagggtggagcacatcatccgggaggagaacatgatggccgcgcaggagatcctcgagctcttctgcgagctcatcgcggttcgcctgcccatcatcgaggcccaaaagttcgcccctctgaccgaattcgattttacaactcgtaattgcggtcgctatttgtttgttaatatgcctacggatgttgcaatcgaaactagctgtagatttactgcccgtcttgatatggcaaactgtgctggacccgcagctcgcttgggatttccagtggcttgttggcatttacttctgttggacaagaactctcgagatgtttttttgttgttgttgttgtgctgtgcttgatgtgttgagacgaccactttagcactggatcattgtaatctcccgtaagtggtcagtcggttgctaattttttggctcaacatggtgtgccactggtacccccaccgtttttttgaactttacaacggtagatatctatagtgttttttttaacagtgggttagttttccacagcgagcagccacctagtagtctttacttcactgctatagtggattatgactgtttgttccattccattataggacaacctgcctgtttcaaccaatgtgttttcagcagagacttttgggccctaaagatgagcattactttgctatatgttcatttgtcaacagggacaagttatcttcgtttttataccctctgcattgttatattgcttatttgtttggagacacaaaccattgtaatcccaaatcttaggatgttactgataatattttctttgctcctgcaatttttattagggcgtgctatcttgaagtatgcctatcccaacttgcttgggactaaaaaggctttgttgttgttgttgtaatatcttgaagtataaagcagggatattgcttcctgctcttgaatacaaatgggctatagttgataaaattgattaatcgttttgtgactaaaaattctgtaagagatgcagatgagtctcactcatttgtgtttccttgttttgttggcttcagggagtgtcctattgatctcaaagaagcaatatcaagtgtctgttttgccgctccaagatgtgcagatctacctgaactgatgcaagttcaaatgatgtttgcaactaaatatgggaaggaatttgtcgctgcagcttcagagttgatgcctgattgtggggtcaatcgtcagataattgaattgctttctattcgtcctcctcctgttgatgcaaagttgaaactgctgaaggagatagctgaggaacatgaagttgattgggatccatcagagacagagacagaatttctcaaacctcatgaagatctattgaatggaccgacctacttcaatgtatccacactacctcttcccaaggagaaacatgaggaaacagtagttgcaagtgctgccgagcagcctgatgaagactatgagtcagataccggtcttgactcactggatttgcctgaagtcccaaaagctgcaattcgtccaccttctgacgcaccattgaccccagatatttgcccacatgttcagggctctcagtcacttcctcatgagttctcagatcctggtaacttggaggagaatccaacagctggtggtgcttttaatgttattcagatgaaaagcttggagcatcttgtttatgcaccatctgatcagtcaaacataccggatttgccaaatgaaaagaagcagtttattccttttgcatctccaccgcccgttctttctccttcggtgggaaaagccgagacagttccctcaccttctctgtctcctccagtgaagccgacagagccagaaccagaaatcctcacaaagaaaattgatgaagtgaccacacctccagtacttccctcagattatattttcacaaaacagccagaacaagtgcggacaatctctccttctgagagtggggcaaatattgacttggacgacgttttatctgctgcgcagacagctgctgaatcagctgagcgagctgcatcagcagcccgtgctgctgcaaaccttgcacaactgcgcatttcagacctgaagaagaattccaaggtttatagcaattacggtgatagcgtccaaaaggaaagccatcatcagactgaggcgacacaggaaccggtatttgatcaccaggactccttcaccaatgatacacaggactatgtgtcatcccatgtgccgcagaggtcgtcatctttggaggacgatccatatttctcgtatcccaacttgttctcagcgccaaagccctgaaggcggaaactagtggtctgcaagtagttgttcagaatagtctgaaacatgagatatcactttttcagctctgtccggtcctcttatgtttggtcttttctgatgcctccgaaaattctgtgtatgttgagttggtacatagcggacaaaagggagactatgaaacctctgtctagttttgtctctgtaaattgtacatgtgcggtgtttgtatcagttgtctgaaacatttctgcagtctactggtaataacagaaattgaatctcagcatctagtctcttccttgtgattc

SEQ ID NO: 13729 - DNA, 301 bp, Zea Mays
atttggtgaaatcactgtctggctactgaacattatatttcaggcactactatatagtacttactcccaaaccacagctatatccagaggtacaagggcgtgctggaatctggtctctcatctcgtccaatccaaacagaaaaaaatgtacaatgcagcgcgcggtgtctatgtactaatctaatctgcttgcatcacccaccagcagaatgaatagcagaaaatgtactactcgatcgtttacttggccgccgatgatcagtttcaatttcaatcctcgctctctcgtttcttggtcgcc

SEQ ID NO: 13730 - DNA, 108 bp, Zea Mays
gtaagctggcgtggcagcaggaggaggatgcgggcggaggcggtcatggctacgcagcgctgcagctacctgaggactcgggcgcgtgtgggcactgaatgctcaggc

SEQ ID NO: 13731 - DNA, 1581 bp, Zea Mays
cccgcctttgccttggtgaagaaaagtcgccgcgttcctcttgcctgatgaaatcctcttctcgtctcgatccgagcctccgcgtggcttcacgatcagatgcttggtccgatcgaacaacgcgagacgaggctgcatggtttttgtgcctggaggtttctgatccgtcgaattgatatctgccgaccttcagagctacgacgttccgggggaatctggatcttgacggactggacaattgggaggcgtcgacggacttctaaagcatgactggacaattgtgtgatgtgacatcttgaaagcctttgccatgttgggtgcgctcgcatggcaggcatcataataaagatgttggttttgtgtgctgggtgggagatcgcacggggaattgttttttcatccctgggttctcccgccctttgtgtccccgtgccgtgcttcgtgttgtttggcttctcgttctatgcttcatcaccggtgctgctgcaaattgaacggatcttctcgtctcgcggcgtgctgcaaattgaacggggctacatcgcaacgcaacacaacacgcaaggtacaaatcggatctaaagattttcaatttacagtaaagtaaagttagcaagttactgaaatcaccatcaatcgttcaaaacttcgcgcaccacaaatcggatctaaacatattcattcaccctacgcttctcgcacggtggtcttctattgaccattgaagataaacatttgaatatatgaatcagctgtgtattatttgctgtagcttcgaatgcgagtatttatattgtagatagttcatttttactgtagttagtttatatgatacatcgtcgtcaccgcatgaagatctactgctgagccatatgaagatcaactgcagtgcctacacgatggacggagtatttataagctttctttcttgatcaccggacagggaagaaattttctgctcaagctcacaattagatactagacacaactcagataagagcttgttcaacttgcactatagttcttttgagtacttacctattattgatttctcttgaggtgaagctaggtttcaaatatctcctaaggtttcgtataggtgaaaaccagtgattctcttttttttcactacaatctgtgacgtttcatgcccttactttgagctttctccttagtgagtttattcttaattccttcttaattttcctcttttccaaatcaaaagatgtgttgactttccagatgtttttccctccttaaaattaaaagatgttttgactttccattttttgctatgcatttagttaaatctacattgtagataaacaaatgtttgtgaataagtaaaaatgccttatttggtcgtcatggtaaatggctgtggtggacatgagcagtctctggcgactgatgttcttcgatagtcttgttgcattctgaataccactgattgttgccatttgtaactaatactgttaaccaaggcgcgtagaaaattgtttctgtgatctaatcttacataattttgttataaacaaaatttgaaaattgttttagattttgatcagcgttgaaacgtac

SEQ ID NO: 13732 - DNA, 1510 bp, Zea Mays
cccgcctttgccttggtgaagaaaagtcgccgcgttcctcttgcctgatgaaatcctcttctcgtctcgatccgagcctccgcgtggcttcacgatcagatgcttggtccgatcgaacaacgagctacgacgttccgggggaatctggatcttgacggactggacaattgggaggcgtcgacggacttctaaagcatgactggacaattgtgtgatgtgacatcttgaaagcctttgccatgttgggtgcgctcgcatggcaggcatcataataaagatgttggttttgtgtgctgggtgggagatcgcacggggaattgttttttcatccctgggttctcccgccctttgtgtccccgtgccgtgcttcgtgttgtttggcttctcgttctatgcttcatcaccggtgctgctgcaaattgaacggatcttctcgtctcgcggcgtgctgcaaattgaacggggctacatcgcaacgcaacacaacacgcaaggtacaaatcggatctaaagattttcaatttacagtaaagtaaagttagcaagttactgaaatcaccatcaatcgttcaaaacttcgcgcaccacaaatcggatctaaacatattcattcaccctacgcttctcgcacggtggtcttctattgaccattgaagataaacatttgaatatatgaatcagctgtgtattatttgctgtagcttcgaatgcgagtatttatattgtagatagttcatttttactgtagttagtttatatgatacatcgtcgtcaccgcatgaagatctactgctgagccatatgaagatcaactgcagtgcctacacgatggacggagtatttataagctttctttcttgatcaccggacagggaagaaattttctgctcaagctcacaattagatactagacacaactcagataagagcttgttcaacttgcactatagttcttttgagtacttacctattattgatttctcttgaggtgaagctaggtttcaaatatctcctaaggtttcgtataggtgaaaaccagtgattctcttttttttcactacaatctgtgacgtttcatgcccttactttgagctttctccttagtgagtttattcttaattccttcttaattttcctcttttccaaatcaaaagatgtgttgactttccagatgtttttccctccttaaaattaaaagatgttttgactttccattttttgctatgcatttagttaaatctacattgtagataaacaaatgtttgtgaataagtaaaaatgccttatttggtcgtcatggtaaatggctgtggtggacatgagcagtctctggcgactgatgttcttcgatagtcttgttgcattctgaataccactgattgttgccatttgtaactaatactgttaaccaaggcgcgtagaaaattgtttctgtgatctaatcttacataattttgttataaacaaaatttgaaaattgttttagattttgatcagcgttgaaacgtac

SEQ ID NO: 13733 - DNA, 1190 bp, Zea Mays
ctcttgcctgatgaaatcctcttctcgtctcgatccgagcctccgcgtggcttcacgatcagatgcttggtccgatcgaacaacgagctacgacgttccgggggaatctggatcttgacggactggacaattgggaggcgtcgacggacttctaaagcatgactggacaattgtgtgatgtgacatcttgaaagcctttgccatgttgggtgcgctcgcatggcaggcatcataataaagatgttggttttgtgtgctgggtgggagatcgcacggggaattgttttttcatccctgggttctcccgccctttgtgtccccgtgccgtgcttcgtgttgtttggcttctcgttctatgcttcatcaccggtgctgctgcaaattgaacggatcttctcgtctcgcggcgtgctgcaaattgaacggggctacatcgcaacgcaacacaacacgcaagcatgaagatctactgctgagccatatgaagatcaactgcagtgcctacacgatggacggagtatttataagctttctttcttgatcaccggacagggaagaaattttctgctcaagctcacaattagatactagacacaactcagataagagcttgttcaacttgcactatagttcttttgagtacttacctattattgatttctcttgaggtgaagctaggtttcaaatatctcctaaggtttcgtataggtgaaaaccagtgattctcttttttttcactacaatctgtgacgtttcatgcccttactttgagctttctccttagtgagtttattcttaattccttcttaattttcctcttttccaaatcaaaagatgtgttgactttccagatgtttttccctccttaaaattaaaagatgttttgactttccattttttgctatgcatttagttaaatctacattgtagataaacaaatgtttgtgaataagtaaaaatgccttatttggtcgtcatggtaaatggctgtggtggacatgagcagtctctggcgactgatgttcttcgatagtcttgttgcattctgaataccactgattgttgccatttgtaactaatactgttaaccaaggcgcgtagaaaattgtttctgtgatctaatcttacataattttgttataaacaaaatttgaaaattgttttagattttgatcagcgttgaaacgtac

SEQ ID NO: 13734 - DNA, 917 bp, Zea Mays
gccttttgaagaaaagtcgccgcgttcctcttgcctgatgaaatccacttctcgtctagatctaagcctccgcgtggcttccggatcagatgcttggtccgatcaaacaacgttgacgacgcatcagctcgaagcgagacgaggctgcatggtttttgtgcctggaggtttctaatccgcgtggttaaggaaactgggtactacaatttgttgctacaagtgcccgatccgtcgaattgatgtctgccgaccttcagagctgcgacgttccgggaatctggggggatctggatcttggcggactggacaattgggaggcgtctaaagcatggctggacaattgtgagatgtgacatcttgaaggcctttgccatgttgggtgcgctcgcatggcaggcatcataataaagatgttggttttgtgtgctgggtgggagatcgcacggggaattgttttttcatccctgggttctcccgccctttgtgtccccgtgccctgcttcgtgttgtttggcttctcgttctacgcttcatcaccggtgctgctgcaaattgaacggatcttctcgtctcgctgcgtgctgcaaattgaacggggctacatcgcaacgcaacacaacacgcaagatcaactgccagtgcctacacgctggacggagtatttatatgatgtgaaggtcaactgttcggcatcgtcggtatgaaatggctatggccttcaaagcttccttggtcactggacagggaagaaattttctgctcaagctaaaaattagatacaagcttgttcaacttgcactatagttcatttgagtacttacctgttattgatctctattgagttgaagctaggtttcaagtatctcctaaggtttcgtataggtgaaaactagtgtttctttttttttttttttttg

SEQ ID NO: 13735 - DNA, 993 bp, Zea Mays
cttttgaagaaaagtcgccgcgttcctcttgcctgatgaaatccacttctcgtctagatctaagcctccgcgtggcttccggatcagatgcttggtccgatcaaacaacgctcgaagcgagacgaggctgcatggtttttgtgcctggaggtttctaatccgcgtggttaaggaaactgggtactacaatttgttgctacaagtgcccgatccgtcgaattgatgtctgccgaccttcagagctgcgacgttccgggaatctggggggatctggatcttggcggactggacaattgggaggcgtctaaagcatggctggacaattgtgagatgtgacatcttgaaggcctttgccatgttgggtgcgctcgcatggcaggcatcataataaagatgttggttttgtgtgctgggtgggagatcgcacggggaattgttttttcatccctgggttctcccgccctttgtgtccccgtgccctgcttcgtgttgtttggcttctcgttctacgcttcatcaccggtgctgctgcaaattgaacggatcttctcgtctcgctgcgtgctgcaaattgaacggggctacatcgcaacgcaacacaacacgcaagttagtttaaatgatacatcgtcgtcaccgcatgaagatctactgctgagccatatgaagacctgctgcctcatcatggtgtttgtatatgaagatcaactgccagtgcctacacgctggacggagtatttatatgatgtgaaggtcaactgttcggcatcgtcggtatgaaatggctatggccttcaaagcttccttggtcactggacagggaagaaattttctgctcaagctaaaaattagatacaagcttgttcaacttgcactatagttcatttgagtacttacctgttattgatctctattgagttgaagctaggtttcaagtatctcctaaggtttcgtataggtgaaaactagtgtttctttttttttttttttttg

SEQ ID NO: 13736 - DNA, 1201 bp, Zea Mays
cttttgaagaaaagtcgccgcgttcctcttgcctgatgaaatccacttctcgtctagatctaagcctccgcgtggcttccggatcagatgcttggtccgatcaaacaacgctcgaagcgagacgaggctgcatggtttttgtgcctggaggtttctaatccgcgtggttaaggaaactgggtactacaatttgttgctacaagtgcccgatccgtcgaattgatgtctgccgaccttcagagctgcgacgttccgggaatctggggggatctggatcttggcggactggacaattgggaggcgtctaaagcatggctggacaattgtgagatgtgacatcttgaaggcctttgccatgttgggtgcgctcgcatggcaggcatcataataaagatgttggttttgtgtgctgggtgggagatcgcacggggaattgttttttcatccctgggttctcccgccctttgtgtccccgtgccctgcttcgtgttgtttggcttctcgttctacgcttcatcaccggtgctgctgcaaattgaacggatcttctcgtctcgctgcgtgctgcaaattgaacggggctacatcgcaacgcaacacaacacgcaagttcattcaccctacgtttatcccgtaaggctataaagcacatgcgaaaggcgttcattcactctgtaaggcgttcttcacccaacgcttctcgcacgggggtcttctattgaccattgaagataaacttttgaatatatgaatcagctgtgtattatttgctgtagcttcaaatgcgagacctatggttgcagtcatttttattgtagttagtttaaatgatacatcgtcgtcaccgcatgaagatctactgctgagccatatgaagacctgctgcctcatcatggtgtttgtatatgaagatcaactgccagtgcctacacgctggacggagtatttatatgatgtgaaggtcaactgttcggcatcgtcggtatgaaatggctatggccttcaaagcttccttggtcactggacagggaagaaattttctgctcaagctaaaaattagatacaagcttgttcaacttgcactatagttcatttgagtacttacctgttattgatctctattgagttgaagctaggtttcaagtatctcctaaggtttcgtataggtgaaaactagtgtttctttttttttttttttttg

SEQ ID NO: 13737 - DNA, 1216 bp, Zea Mays
cttttgaagaaaagtcgccgcgttcctcttgcctgatgaaatccacttctcgtctagatctaagcctccgcgtggcttccggatcagatgcttggtccgatcaaacaacgctcgaagcgagacgaggctgcatggtttttgtgcctggaggtttctaatccgcgtggttaaggaaactgggtactacaatttgttgctacaagtgcccgatccgtcgaattgatgtctgccgaccttcagagctgcgacgttccgggaatctggggggatctggatcttggcggactggacaattgggaggcgtctaaagcatggctggacaattgtgagatgtgacatcttgaaggcctttgccatgttgggtgcgctcgcatggcaggcatcataataaagatgttggttttgtgtgctgggtgggagatcgcacggggaattgttttttcatccctgggttctcccgccctttgtgtccccgtgccctgcttcgtgttgtttggcttctcgttctacgcttcatcaccggtgctgctgcaaattgaacggatcttctcgtctcgctgcgtgctgcaaattgaacggggctacatcgcaacgcaacacaacacgcaaggtcattcatatgcagttcattcaccctacgtttatcccgtaaggctataaagcacatgcgaaaggcgttcattcactctgtaaggcgttcttcacccaacgcttctcgcacgggggtcttctattgaccattgaagataaacttttgaatatatgaatcagctgtgtattatttgctgtagcttcaaatgcgagacctatggttgcagtcatttttattgtagttagtttaaatgatacatcgtcgtcaccgcatgaagatctactgctgagccatatgaagacctgctgcctcatcatggtgtttgtatatgaagatcaactgccagtgcctacacgctggacggagtatttatatgatgtgaaggtcaactgttcggcatcgtcggtatgaaatggctatggccttcaaagcttccttggtcactggacagggaagaaattttctgctcaagctaaaaattagatacaagcttgttcaacttgcactatagttcatttgagtacttacctgttattgatctctattgagttgaagctaggtttcaagtatctcctaaggtttcgtataggtgaaaactagtgtttctttttttttttttttttg

SEQ ID NO: 13738 - DNA, 626 bp, Zea Mays
cttttgaagaaaagtcgccgcgttcctcttgcctgatgaaatccacttctcgtctagatctaagcctccgcgtggcttccggatcagatgcttggtccgatcaaacaacgctcgaagcgagacgaggctgcatggtttttgtgcctggaggtttctaatccgcgtggttaaggaaactgggtactacaatttgttgctacaagtgcccgatccgtcgaattgatgtctgccgaccttcagagctgcgacgttccgggaatctggggggatctggatcttggcggactggacaattgggaggcgtctaaagcatggctggacaattgtgagatgtgacatcttgaaggcctttgccatgttgggtgcgctcgcatggcaggcatcataataaagatgttggttttgtgtgctgggtgggagatcgcacggggaattgttttttcatccctgggttctcccgccctttgtgtccccgtgccctgcttcgtgttgtttggcttctcgttctacgcttcatcaccggtgctgctgcaaattgaacggatcttctcgtctcgctgcgtgctgcaaattgaacggggctacatcgcaacgcaacacaacacgcaaggaacgccgccgaaggg

SEQ ID NO: 13739 - DNA, 1951 bp, Zea Mays
accccggctttgccttggtgaagaaaagtcgctgcgttcctcttgcctgatgaaatcctcttcccgtctagatctgagcctccgcgtggcttccggatcagatggttggtccgatcgaacaacgagttgggacgttccgggggatctggatcttggcggactggacaaattgggaggcgtcgacgggcttctaaagcgtggctggacaattgtgagatgtgacatcttgaaggcctttgccatgttgggtgcgctcgcatggcaggcatcataataaagatgttggttttgtgtgctgggtgggagatcgcacggggaattgttttttcatccctgggttctcccgccctttgtgtccccgtgccctgcttcgtgttgtttggcttctcgttctacgcttcatcaccggtgctgctgcaaattgaacggatcttctcgtctcgaggcgtgctgcaaattgaacggggctacatcgcaacgcaacacaacacgcaagatctactgctgagccatatgaagacctgctgcctcatcatggtgtttgtatatgaagatcaactgcagtgcctacacgctggacggagtatttatatgatgtgaaggtcaactgttcggcatcgtcggtatgaaatggctatggccttcaaagcttccttggtcactggacagggaagaaattttctgctcaagctaaaaattagatacaagcttgttcaacttgcactatagttcatttgagtacttacctgttattgatctctattgagttgaagctaggtttcaagtatctcctaaggtttcgtataggtgaaaaccagtgattctctctttttttttagcactacaatctgtgacgtttcatgcccttagtttgagctttctccttagtgagtttattaatttttcttcttttccaaatcaaaagatgttttgactttccatattttgctatgcatttagttaaatctacactgtagataaacaaatgtttgtggataagtaaaaatgccttatttggtcgtcatggtaaatggctgcggtggacacatgagcagtctctggcagctgatgtgtcagtgatcttgctgtttcattgttggtatatattactgtcggattgttactattgaggagccattttttgcaaaaaaattttggaggcttcactacatccattatcaataactggattttgctctacgaaggtacatgtccattatcaataactcgatttttttaattgttcttcgatagtctttgcattgtgaataccaataattgctgccatttataactaatactgttaaccaaggcgcgtagaaaattgtttcaggtgatctaatcttacataattttgttataaacaaaatttgaaaaattattttagattttgatcagcgttgaaacgtacacacgccattaggcctgtctgtctcctaactgtggatcttgtctcaacacggtgaggtcctcacatgactgtccattacagtctttgacggaaggtggttcgattccacccagatcctttagtctgtattttgtgattcaacccatttaaataaatatacgaggtattattgagaaattgaatagaactggctcaattagctgctgtatataggggtgataatgggctttaaattttacactaaaatttaaggatcgaattaggataggatcctatttctattcattttggaactaaaattaatttagggctctaacaaattgtgaagaaacatttggaccattgttgtccctcacatttatatgataaaaagctaaaattatacacaaatgagaatttgaatcatggttgttggctctaaatatacattcaaattcacctagccaataatatacacgtctttgtgttttatattttatactcaagtataaaatagaatcgtgtgttttatattttatactcaagtataaaatagaatcg

SEQ ID NO: 13740 - DNA, 1205 bp, Zea Mays
cccgcgcgcgtcgtgcgcacgtagcaccatgctcagccgttccggttccacctgtcataagcgtcttcatccaaccatcccctccattcccacacatacaaacaccccgatgactccaaaatcaaaactgccagcccctcacctcctcctcgccatggctgctccgtgtgcagcaaccgcacactgcaccagcgagccgtcgacaccatcgaacctcatctgcattcgtggtcgctacgccctccgacgccaagctctccctgctctgttgcacgttcagctgtgccgaggctgcatctctccccgcgctgcgcgctgctctcgccggcgtggccccggccagcagccgcttccccggccgagactggatccctgcgtgtcgttcttctccctggccactggtaagttgttcactgcaaccgatccgccatgcccttgcgctagcgtgcgcccatacatacagcgaacatcaccacatcgttgggtgccacacgctgctcgccgcacgtcactgcacgccccgtccgtgtcccgctgatccacacgcgctgccaactcgggccaacggcgaacaaccgccagccacgcatgtcgacgccttgctgccactgccctgccccgcatgacgtcctactccagccggcgtggcgccgcctcactgcatgctgcgcgtgctgtcgtgctcgtgaagaaaagcaaaccgtccgtgtggccgtgtgcgagtatgtaggctaggagaaaagaacggacgttgggccccacaaacatgcatgtgtcaaaggaaattgccgaccctttgcatgtcgtattcccctccccagctagggtgcatgccagagaaatagtcctcaaggattctctatgccctcaaatctgatctgtggccctgagtgtggcttgtttcggctaataaaaatacgccacgttgtcattaatatgcgattagtaaatatatattagcttttgcgttagacatctaaattattctatttctatcgagttagcttcgtaataatatcgtgcacacgttaaacatattaccttgtcatgacatatatttgttttacttaattgtcagtttgtccgtcggtttattaacgtagcaatttagtccaaactagtttatggttttaagttgcgcttttataaatatacgttaacttgattaacaccagcttaaatacttttatttatttgttcgttgt

SEQ ID NO: 13741 - DNA, 325 bp, Zea Mays
ccacctgtcataagcgtcttcatccaaccatcccctccattcccacacatacaaacaccccgatgactccaaaatcaaaactgccagcccctcacctcctcctcgccatggctgctccgtgtgcagcaaccgcacactgcaccagcgagccgtcgacaccatcgaacctcatctgcattcgtggtcgctacgccctccgacgccaagattgtaacctcgtggacggagaatacatcctcgtgctagagcaaggagttgctcaggaggtagccccggatctagcaccagagcctgccatcgaggatctgcctgccccagctttgga

SEQ ID NO: 13742 - DNA, 226 bp, Zea Mays
cacctgtcataagcgtcttcatccaaccatcccctccattcccacacatacaaacaccccgatgactccaaaatcaaaactgccagcccctcacctcctcctcgccatggctgctccgtgtgcagcaaccgcacactgcaccagcgagccgtcgacaccatcgaacctcatctgcattcgtggtcgctacgccctccgacgccaagattgcgatccggttccgagc

SEQ ID NO: 13743 - DNA, 467 bp, Zea Mays
cacctgtcataagcgtcttcatccaaccatcccctccattcccacacatacaaacaccccgatgactccaaaatcaaaactgccagcccctcacctcctcctcgccatggctgctccgtgtgcagcaaccgcacactgcaccagcgagccgtcgacaccatcgaacctcatctgcattcgtggtcgctacgccctccgacgccaaggttctctggaggacatggttgttggagtgacttagccgtccatcttgccaccgggttggacagtcgagtgggaccctacctcagctgaggaggagcgtgaggagtgatgggagaggcttccccatctctccatttatcgttagtttatttctgttgcatttcgaacaatgagtactacttttgctaaaactccgatgatgatgtaataaatttaatactcccttaatgtatggttttatgttttattgtatttgctctgtg

SEQ ID NO: 13744 - DNA, 468 bp, Zea Mays
gtagatagtacacatttagtcttaagagagtcacactaaaacttgaaaaagctaaaacttgatttttagacccagctagtgcttttggcaaccaaacccctcagccaaacatctgcatgtctagaggtagaggagtagactcctcacaccgggtaagtctagctgagtattagtatactcagccttgcttgtggcataattttacaggttctctggaggacatggttgttggagtgacttagccgtccatcttgccaccgggttggacagtcgagtgggaccctacctcagctgaggaggagcgtgaggagtgatgggagaggcttccccatctctccatttatcgttagtttatttctgttgcatttcgaacaatgagtactacttttgctaaaactccgatgatgatgtaataaatttaatactcccttaatgtatggttttatgttttattgtatttgctctgtg

SEQ ID NO: 13745 - DNA, 1237 bp, Zea Mays
acagaacaactttctccttcttccgcgctgtcgccgtcctcctctcaccccaatctgctcggactctgatcgcagcggacgcgcatccaaccagctcggattctacctctctcccgggtaagacgccgggcctcgcttcggcggatgtgggttaccctattttttccccccttcctctactcgacgaattccgttccataggatatataggatctcttaatctttcccagccgccgcgagccgaggaggaaaggatggagttcgggaggaagcccttgagccttgtggagctctgcgtgcggaaggccatcgacaacctccgctacatgggcagcgtcgacggcgtcgagatggatctgctcaagcgcatcctgccgcactgcacgatggagcagctcacccgcgtagagaacagcaccgagatggatcttagcttggtaactgatccgctgtggaggcgattctaccagcgagaattcggtcaggagcatacgagcaaagtcatcgcaaggctgaaggagcttgggcaaaaaacgccgtacacatggagggagctcttcgcggcgaaaaaagagaaacagaaggaagttgaggataagatgcttgacaaattcacaaagaagtttcaggcagagagagctgagaaacaaagcaagcaaatcaaactctgtacaaaggtgcctccaagcagcaaaaggagtttctttggaggaagtggacctagcagtgtatccagttccagctacaagagccctatactgaagaaggctaggatagaggttaacagtcgagcaagattgcagtctgctatgcaaaagaatacttttgcgaggtcatctcagccaataaggacgacctctgttagtggacagccagtgagaacaactaccattcataggcccaattcaaccgtcaccatcaccaaaccgatgggaaaaagcaggcaaattcagaacagcaggcccaaattctaggaaacggtttgctgcgatatcgcaatttcaactccagagctcatatgtcctctgaagaaagcgcctcctttgtacaaaaggagtagcacaccgtactcatttttttttttggcaaaggagagacgtgccaattgtaacgtaaaaggcgttaccaatgtttgtaacaaacgatttcttgtattaaagaaaaaagggtttgtttcttggtttctctctttattatcatgcaaatggttaatgaattatagaaaataccaggcaaa

SEQ ID NO: 13746 - DNA, 1622 bp, Zea Mays
ctgtagacggccgtgccgctcctcctggcaggcggcagcacccagcgagtgcagcggctcgggagcccagcgaagaacaaccgggatcaggtggccagcgaaagaagcgagaagcaaaggccgcgtgagctcccggcaagctgcagcagcgagaggaggcgggagcgggggtttagggtttggtcctgcgattctctctcttccccctcgctagagtgttttccgcgtcgacctgaccaaaatacccctaggcctccgcagtccgcacacccctcctgtgctttgagattcgcgcgtcgcgcctgccgacctcgtgcctcccgcggactcgccggcgaacgcctcttggagatgccgcccgccgcggcggcgctcctccggtgcgctccggcggtcccattcgcggcccgcagtagcgctgtttcccgctcaggcatggcgcggcgtctggtggcagcgagcgctgcggccggcaggctggcaccggcgtaccgcgggctgctgctcgacgccggtggcacgctgctgcaggttgcgcggccggtagccgagacgtatgcctccatcggccgacgttacggtgtgacgaagactaagaagagaatcatggaggggttcaagcgggcattctccgcgccatggccgaagacactcagggagatgggcggccattctggagaattgtcgtggcagaagcgaccgactgcactgatggtgattatttcgaagaagtgtatcagttactacaatgacgaaattgaacaagaacaaatgttctgactatactgttagtcaacagaagcccaggcgatgaagttcaccgctctcaaatatatttagtttttctaagttgaaggatgcattccgcttccggtttatcggtatgtcgaatgttcgtaaccataccatgtggctcatggatggatcattgtttcttccagtattatgcgcatggagatgcttggcgattgcctactggagcagacgcagcactgcgtgagctgaaggatgctggagttaagctcgctgttgtatctaacttcgataccaggctacggaaattgcttaaagaccttaatgtctccgagataccttgagctcttcaggtttgatgccattgtggtgtcatccgaggtcggatatgagaaaccttccccagagatcttcaatatagcattggatcaaattggcgtggaagccagcaaggcaatccatgttggagacgatgaaactgcagacatggcaggtgccaatgctacaggacttgagtgctggctgtggggtaaggatgtgacgacgttttcggaaatacaggagcggattctgacaacagatggtcctcaatgagtgaatttggaatgttgcaaaaaaatgatagttgttttttttccctcagttccttcttttttgtttccttccaactcgtgtgttggcattttcattgtgctttcgtgaaataagctcatgccatggctaggtactgatgttccttcacattcttctcacatatgaacatttaataagaagcacaaggactcttgataattggtataagacagtttctacaaaatcctaatatcaatactgatcaagctgttgagctagtgaaaatacaagtttct

SEQ ID NO: 13747 - DNA, 1629 bp, Zea Mays
ctgtagacggccgtgccgctcctcctggcaggcggcagcacccagcgagtgcagcggctcgggagcccagcgaagaacaaccgggatcaggtggccagcgaaagaagcgagaagcaaaggccgcgtgagctcccggcaagctgcagcagcgagaggaggcgggagcgggggtttagggtttggtcctgcgattctctctcttccccctcgctagagtgttttccgcgtcgacctgaccaaaatacccctaggcctccgcagtccgcacacccctcctgtgctttgagattcgcgcgtcgcgcctgccgacctcgtgcctcccgcggactcgccggcgaacgcctcttggagatgccgcccgccgcggcggcgctcctccggtgcgctccggcggtcccattcgcggcccgcagtagcgctgtttcccgctcaggcatggcgcggcgtctggtggcagcgagcgctgcggccggcaggctggcaccggcgtaccgcgggctgctgctcgacgccggtggcacgctgctgcaggttgcgcggccggtagccgagacgtatgcctccatcggccgacgttacggtgtgacgaagactaagaagagaatcatggaggggttcaagcgggcattctccgcgccatggccgaagacactcaggtaccagggagatgggcggccattctggagaattgtcgtggcagaagcgaccgactgcactgatggtgattatttcgaagaagtgtatcagttactacaatgacgaaattgaacaagaacaaatgttctgactatactgttagtcaacagaagcccaggcgatgaagttcaccgctctcaaatatatttagtttttctaagttgaaggatgcattccgcttccggtttatcggtatgtcgaatgttcgtaaccataccatgtggctcatggatggatcattgtttcttccagtattatgcgcatggagatgcttggcgattgcctactggagcagacgcagcactgcgtgagctgaaggatgctggagttaagctcgctgttgtatctaacttcgataccaggctacggaaattgcttaaagaccttaatgtctccgagataccttgagctcttcaggtttgatgccattgtggtgtcatccgaggtcggatatgagaaaccttccccagagatcttcaatatagcattggatcaaattggcgtggaagccagcaaggcaatccatgttggagacgatgaaactgcagacatggcaggtgccaatgctacaggacttgagtgctggctgtggggtaaggatgtgacgacgttttcggaaatacaggagcggattctgacaacagatggtcctcaatgagtgaatttggaatgttgcaaaaaaatgatagttgttttttttccctcagttccttcttttttgtttccttccaactcgtgtgttggcattttcattgtgctttcgtgaaataagctcatgccatggctaggtactgatgttccttcacattcttctcacatatgaacatttaataagaagcacaaggactcttgataattggtataagacagtttctacaaaatcctaatatcaatactgatcaagctgttgagctagtgaaaatacaagtttct

SEQ ID NO: 13748 - DNA, 1020 bp, Zea Mays
cctgccgctgtagatcttccccatggttgttgtgttgcttgtgccgtcaatctcgcggccgcctccccggttggactccgtcgtcgggggtataaatcgcgtgccgccacgctccttggaccaagccattaccgatctgcgcgctcgcctaggatcccatcgaagctcaccaccaccgaaaagccaggactcgtgcgccggtaacctcgaccgcgaccgccgccgcggtccaccatcctacacgtcgttgctggccacctgggaacgtccgacagttgtcgcgtgggcgctcttcacctgggcgttgttggtgtgagatctggggcagtgggcgtaagccggattggtcgccgtggtgtgctcaacctggcggagctacgccacaccatcacttgttcgcatcttcacatcggcggggacacataccctaggagcttcgcaatatcacaccaagcgtacccgtggcggtggcgggctctgacggtggaggtagaggactggattgctcgccggagtgcaacgagagccttagtccgccccacgcccggttctgcgcgcacgtcgtcgtgatttccggtatgagcccctttcatagtttagatttgatcctcgagtgtttagatgggtcctgcgtagtgaatcaagcaccgtatcaatgtctgggctgtcgccggcgatgttccgccatataggggcggcggcgccgctgttccaaccgtgaagggaggaagagagaacgtgggctagagatctagaattcaagggctaagattagacgatcgcataccctttcgcaggattcggtctgatccgttgatctagatcggacggatagaatcaaatccagaataataaaatcctccccgtcgcatttgcatccaacggttctcgtcgcgtaccgtttcaccgccgcgccgatctaatctagggcgcggattgacgatccaacggtcagaaaccctcgataccctttcgcccggctattttgttaaagagcccctgtattactactgaatcaac

SEQ ID NO: 13749 - DNA, 806 bp, Zea Mays
cctgccgctgtagatcttccccatggttgttgtgttgcttgtgccgtcaatctcgcggccgcctccccggttggactccgtcgtcgggggtataaatcgcgtgccgccacgctccttggaccaagccattaccgatctgcgcgctcgcctaggatcccatcgaagctcaccaccaccgaaaagccaggactcgtgcgccggtaacctcgaccgcgaccgccgccgcggtccaccatcctacacgtcgttgctggccacctgggaacgtccgacagttgtcgcgtgggcgctcttcacctgggcgttgttggtgtgagatctggggcagtgggcgtaagccggattggtcgccgtggtgtgctcaacctggcggagctacgccacaccatcacttgttcgcatcttcacatcggcggggacacataccctaggagcttcgcaatatcacaccaagcgtacccgtggcggtggcgggctctgacggtggaggtagaggactggattgctcgccggagtgcaacgagagccttagtccgccccacgcccggttctgcgcgcacgtcgtcgtgatttccgcggtgtggtcacgaggatccaaagaatcaccctggtaactggaatctcaagtgccaggcaagttgtgcccttgatccacttttgttacccaataatattctgtattatcactattcatgcataggtttaattttgatgggacctaataggtcaccatagactgtttatctttttaccttgtttacccctgaatcattgggtagttatgctattgctttacatagtttttg

SEQ ID NO: 13750 - DNA, 645 bp, Zea Mays
tattatctctcactctctcaaggaaactttgttgcaaagagataaatcgtgtagtagttttaaattggtgagtagtccttagaatttatgtgccatgcccccgcacccctcgtgtccggagacaccgaagtctgcccctgcccagcacgcccgtctcccgagccccctacccccacatgctcctgctcccaaccagtcgtacccccaccgaccatgcgtacgcgttgagtagatccagagcagtggggctgggaagtgcccgaggtgagatcaggcgaggtgatcaggtccgcttcctcctcttcctccgttggcttctacacgctccaggacgaggaggagtagggtgatgagggccgcgtccttgaggcatgggagcacgcatacgccgccctaggccaggtgaccagcttttggccgggcccattgctggcgacgagaatccaataggtatgcccaccccttttcttatcttcctacaaccgagtgcccaaaccctaactgaagttatttggctacatgtatttcgatccgatgtaatgctaagtttttatacacatgtaatcttcctgcaaccgagcacccaaacccaaattgaagctatttgtcccattggcgatggggttcgtaaatctggcctttggc

SEQ ID NO: 13751 - DNA, 412 bp, Zea Mays
gccagattacgatctgaggaccgaagacatcgacggatatgtcctcatgagggttggagaaggcaagaggaatggacggtactggattaccgacggggcaatcgactcgtcgtccactctcactctatctcaggtgcgagcaaggagcatgagctcgagcctagccatacgacatcggcaggacagctcacatcatcgcatacagcaactccaggcgcaactagaagaagaaaggagggaacagcaagggatggagacgaggatgatagcggagcgggaggcccactagacagatcagtagaggatggctgagataatctagtacatgcagagccttgccgccgtacctggttttactccaccacctccgttgttccctccagttgaccctactcagctccatattcctgtg

SEQ ID NO: 13752 - DNA, 217 bp, Zea Mays
ggggttgcatgcactggggcttgcctgggataaacactaggttagtgttgttagacgactgcttgacgaccatccttgtcctagcacttgatcggcaggttcgtctattagcaccaccatgcggagtagcccgcgcttgaggtcaacttggttcgtctttcgcatcgcgcgattaataagcgtacctaaatgatttgcataatgcacatgaatgcat

SEQ ID NO: 13753 - DNA, 694 bp, Zea Mays
agctcatcagccctatcctctcgcatcggcacaacagaacgtgaagacggcggagcgggtagttgaacgtggaggcgctctgagatcctagctatggcctggacttccccctgcataagtatcaacgcatcctcgccttctcacccctattgagccagccatcccttcccgtgaccgagaaagcaggcccgagaaagaggtccactgtcggtgctccgtgcttgcaccgatgattggtggccagggttgggtcgtgggcgttcggcagcgtgcgtggatcatgtgtgtgaagtatcaagctcagggatcggtccgagcacctggaattcctcgttgaacctcgtcgctgctgcacctctgctccgcatcgtggaccgaccccgacgtgtctttcgcgctgatgggcaagcaactgaggacccaagtgctcagcaggtggaaagtgccgagcagaagctcgttgaaggccgtatcgcattgggctgcgaccgaacacaaatcgccggacacaaatcgccgccacggtcctcctcctggtgatcccgcgccataccgagcagcaaggtttccctcctcatggtgatctcgtgtcgcgcgttgtgtcctcttcaccgtcctctgccgccacacacatcgccgcccttaatagagcttccagaaaagaaatgcaagcgatgtggtttgtatgaggagg

SEQ ID NO: 13754 - DNA, 3581 bp, Zea Mays
  misc_feature (2993)..(3092): n is a, c, g, or t
cgcatcggcacaacagaacgtgaagacggcggagcgggtagttgaacgtggaggcgctctgagatcctagctatggcctggacttccccctgcataagtatcaacgcatcctcgccttctcacccctattgagccagccatcccttcccgtgaccgagaaagcaggcccgagaaagaggtccactgtcggtgctccgtgcttgcaccgatgattggtggccagggttgggtcgtgggcgttcggcagcgtgcgtggatcatgtgtgtgaagtatcaagctcagggatcggtccgagcacctggaattcctcgttgaacctcgtcgctgctgcacctctgctccgcatcgtggaccgaccccgacgtgtctttcgcgctgatgggcaagcaactgaggacccaagtgctcagcaggtggaaagtgccgagcagaagctcgttgaaggccgtatcgcattgggctgcgaccgaacacaaatcgccggacacaaatcgccgccacggtcctcctcctggtgatcccgcgccataccgagcagcaaggtttccctcctcatggtgatctcgtgtcgcgcgttgtgtcctcttcaccgtcctctgccgccacacacatcgccggtgaggaccaccctcttcctctccctctccctgtggttcactattggtgattttgctactaggtctgctagtagtcaatgtgcttcatctgatttagaaaattcagaaagcaaaccaaacgctatattgttgtttccgaattttcttcatctgtattacccgattcaaccaaaccccacatgcattctgctagttgtttttattaccggactatcgaaacagcagaaatagaatggagaacaggacagcggcagggcgggaagaaaagccaaggtctgatgtgttgttttttgacaataaggttccatgtgtgtttgaattttatttcatatatgcatatgttcgatgtggttttcaattttgttcaatttaatcatagttagggagttaacgcaagttttaatttattgtcaaaatagatggatagaagatgggtttatgggaaacaattcacacctgcatatgtgaaaggagttgaagagttcatgaattttgttagtgaaagataccccgaagacacacacatccattgtccgtgcgtgaattgtcttaatcaaaggttgcgacctcagagtgaagtagaaacccatatacacatttatggaatgtcagctacatacacgaggtggattcatcatggggagtcggcagatacagaagttgagggtatagaggaggaggtcgaaggatatgatcatgactttgggatacatatggatgtggacgatgatgtttacgatgatgatcatgggtaccagagatgatcggtgaactgtttgcagtggtagaggctgatggagaagagccaagatttgcaggagttcttggagattcaaagaaggcacttagtccgagttctagccattcaaaattatcttttatggtgaggatgttgtatatgaagtctcgttatcgaatcaacaatacagcattttcagcaatgatgaagctgatgtcagatggataccctaacagtgagttgccaaaatcatatgatgaggccatgatatatcttaaagaattgggccttggatacgaaaacatccatgtgtgcaagaacaattgtgtgttgtttcgaaatgttaatgctaaaatgaatgagtgcatagtatgcaaggagtctaaatggaaagatgaaactagtttgaagcgggttccacataaggttttgaggcattttccactcttgccaaggttgaaaagaatttttgcttcaaaacaaacttctgaggaaacacgatggcacaagaaagtgaggaagccagtcgccaatttgatgagccatccagctgatggggaaacgtggaaggactttgaccgaaagtacccaggttttgctgatgatccgaggaacctgaggctagccttagctaccgatggattcaatccatttggcaacatgagtacccagtatagtatgtggccagtgcttgtgacaccgcttaatctcccaccatgggaatgtgtgaatccagcaaactgctttatgtctttactcatcccaggtccaagatgtccaggaaaggattttgatttgttccttgagcccctaattgaagaactgctcaagctatggaagggtgtcaatacctatgatgcatgtactggtaggaagttcgaccttcgtgctgctgtactacggtgtatacatgattatccagcgctggccacgttatctgggtgaacaacaaaagggtattatgcatgtatttattgcgacaagaatccattgtctctggcaataaggaacaagttatgctagattggacatcgtcgttgccttaaaaggacacattatggtggatagcatggatttcaatggtaagcgtgaaaacaaagttgagcctggcaggtttactgtggatgaggtcctacaagagctagagaaggtgaaagatgtcaggccaatgaagcaggctgacattactggaaataaaagatttgatgcttccacataatctcgatgtgatgcacatagagaaaaatgtatgtgaaaatattctttgcacactactcagtataccaggcaagtccaaggacacacataatgcaaggctagatttgtatgatatgggcataagacctgagctgcacttgcaacaagatggcaacttggcctgcagggctccacctgctccatatgtgttggggaaggatcagaaagtcgacttttgcaagttcctcaaaggtatcaagtttcctaatggatttgcggataacctagcaagatacataagtgaagatggttcaaaggtggttggaaaactgaaaacacattcttgccacatactcctacagagaatcatacccgctggtcttagaggactggtgaggaaggatgtatatgaagcaattgcagagctggggaccttctnnnnnnnnnnnnnnnnnnnnnnnnnnnnnnnnnnnnnnnnnnnnnnnnnnnnnnnnnnnnnnnnnnnnnnnnnnnnnnnnnnnnnnnnnnnnnnnnnnnnaatctttccatctgccttctttgatgtcatggtgcacttgtgtgtccatcttcccgatgaggcactgcttagaggacctgttcaatatggatggatgtacccaatagaaaggagactaggcactttgaaaaattttgtaaggaacagggctaggccggaaggatcaattgctgaggcaaatatggcaagtgataccttgacattttgttctaggtacatgaaggatgttgacactagatttaaccaggatgatgatagtggtacagagatgccattgcctaatgacatctctgtttttaagcatggtgctactcttgttggagctactaagactgagtacattgatgatgctatcatgaataagttagtttggtatgttctacataatgctgatgaagtagaggattatttgaagtaagtatcgtttacatgtttgagatttaatttttgttttatttatatttgaaaatattcttatgattaaagtat

SEQ ID NO: 13755 - DNA, 5589 bp, Zea Mays
  misc_feature (5001)..(5100): n is a, c, g, or t
aacagaacgtgaagacggcggagcgggtagttgaacgtggaggcgctctgagatcctagctatggcctggacttccccctgcataagtatcaacgcatcctcgccttctcacccctattgagccagccatcccttcccgtgaccgagaaagcaggcccgagaaagaggtccactgtcggtgctccgtgcttgcaccgatgattggtggccagggttgggtcgtgggcgttcggcagcgtgcgtggatcatgtgtgtgaagtatcaagctcagggatcggtccgagcacctggaattcctcgttgaacctcgtcgctgctgcacctctgctccgcatcgtggaccgaccccgacgtgtctttcgcgctgatgggcaagcaactgaggacccaagtgctcagcaggtggaaagtgccgagcagaagctcgttgaaggcaagttgtgcctctatttacccaataatgttcttgttagtcattatgatctgcataggttaattttgttgggacccaataggtcaccctagtttggctatctttataccttgttcaccactaaacttttgggtagtacctgctattgctttatgtgattttgggtattaagatacacattattcatgatcatgcttttattataaatgagttatttactattcatgacaagatcattatgttaattggaacgtggagaactacccgggaaaatagtgctaccacaagggtggtatgggacgcccttggctgactaattaggaaagctagtggaggactaccttacccaaaaggggtaagggcaataggggagttgtcggtatagagaggttctcgagttgattttgctgtgatggcttttcagatgagggattcctatattgcgctacctagaaactgtagcaggttttctgaagctagtggaactttgcaaaggcctcgtagtgttaccctgcctcgcttccttggtagaggtgtatgggattcatggccctatggcagatgagtaacatgacttgtgggtaaagatgtgcaacctctacagagtgtaaaactggtatatcagtcatgctcacggtcatgagcgacttggaccctcacatgagtaacttatggagttaaatttaattggtcatttgcatcgcattgtggtttatttattaattgtgatctctcattatttgggttggtatttacttatacttagtaaatgctaataaaatttgaccaacttattaaaagcaatgctcagctttaaccattatttgttgatcagccttacacttcacacgagttcccacctttggtgagttcatgcacattataccccacaacttgttgagctataatcttttgtgagctcaccctgcgatatgtaaagccacccataagttgtcacacccggatttaagggatacagctgggtgtgtctcatatgtgcgccaaggaagaacaacacatataataacagagtgcatagagataaatgtcataaatatcataaatgtacttattacatagcgaaagtcttacaaaataaataataaatataaaacgaactaaatattatttcccaagcgccacaaagctgactgggagacgccacctagatcaagtcaaactccttgttgtgcggctcctcttcgaccacctgctcttcacctgtgggggatttatatatcgcaagagtgagctcacaaaagagcatagctcaacaagttgtgggaaataatgtacatgaactcgcgaaaggtgggagttcctgtgaagtgtaaggctggccaataaataaaggttaagctgagcattgcttttataagatggtcaaaattttattagcagttactaattgtaagtaaataccaaaccatagtaatcaaaataataataaataatcctaatgcgatgaaaatgacaaattaaatttaattccataaattaatcatgtgagtgtccgatctgctcatgaccgtgagcacggctagtataccagtcactaataagaatttgatcaccagtgacgattttctcatgacgctggttacttcagtcatagattgatacctctctatgaccaaatttacatcttcgtcaaaaagtacaattgacgaagattaggcttgaatatgaatgacaaaaatgacaggaacgtcatagaaacaaacttttgacgaaacaaattcgacacagattagatttgatatcgtcatcgctaatttgccttttttggtcgacgtaatgatgaaatatattggtcacagatgagttttagtaatcgttgctcagatttatttgggaaaaaattgctcccgcagagcttcgaaccagcgaccttaccttgcacaggtagtagcattaccactagaccacgcgcttgttgttataaccaatgagagtttttaacctgtaatccatttacactataacctattcccgttgttaagcgtttggttggaccaggccgtatcgcattgggctgcgaccgaacacaaatcgccggacacaaatcgccgccacggtcctcctcctggtgatcccgcgccataccgagcagcaaggtttccctcctcatggtgatctcgtgtcgcgcgttgtgtcctcttcaccgtcctctgccgccacacacatcgccggtgaggaccaccctcttcctctccctctccctgtggttcactattggtgattttgctactaggtctgctagtagtcaatgtgcttcatctgatttagaaaattcagaaagcaaaccaaacgctatattgttgtttccgaattttcttcatctgtattacccgattcaaccaaaccccacatgcattctgctagttgtttttattaccggactatcgaaacagcagaaatagaatggagaacaggacagcggcagggcgggaagaaaagccaaggtctgatgtgttgttttttgacaataaggttccatgtgtgtttgaattttatttcatatatgcatatgttcgatgtggttttcaattttgttcaatttaatcatagttagggagttaacgcaagttttaatttattgtcaaaatagatggatagaagatgggtttatgggaaacaattcacacctgcatatgtgaaaggagttgaagagttcatgaattttgttagtgaaagataccccgaagacacacacatccattgtccgtgcgtgaattgtcttaatcaaaggttgcgacctcagagtgaagtagaaacccatatacacatttatggaatgtcagctacatacacgaggtggattcatcatggggagtcggcagatacagaagttgagggtatagaggaggaggtcgaaggatatgatcatgactttgggatacatatggatgtggacgatgatgtttacgatgatgatcatgggtaccagagatgatcggtgaactgtttgcagtggtagaggctgatggagaagagccaagatttgcaggagttcttggagattcaaagaaggcacttagtccgagttctagccattcaaaattatcttttatggtgaggatgttgtatatgaagtctcgttatcgaatcaacaatacagcattttcagcaatgatgaagctgatgtcagatggataccctaacagtgagttgccaaaatcatatgatgaggccatgatatatcttaaagaattgggccttggatacgaaaacatccatgtgtgcaagaacaattgtgtgttgtttcgaaatgttaatgctaaaatgaatgagtgcatagtatgcaaggagtctaaatggaaagatgaaactagtttgaagcgggttccacataaggttttgaggcattttccactcttgccaaggttgaaaagaatttttgcttcaaaacaaacttctgaggaaacacgatggcacaagaaagtgaggaagccagtcgccaatttgatgagccatccagctgatggggaaacgtggaaggactttgaccgaaagtacccaggttttgctgatgatccgaggaacctgaggctagccttagctaccgatggattcaatccatttggcaacatgagtacccagtatagtatgtggccagtgcttgtgacaccgcttaatctcccaccatgggaatgtgtgaatccagcaaactgctttatgtctttactcatcccaggtccaagatgtccaggaaaggattttgatttgttccttgagcccctaattgaagaactgctcaagctatggaagggtgtcaatacctatgatgcatgtactggtaggaagttcgaccttcgtgctgctgtactacggtgtatacatgattatccagcgctggccacgttatctgggtgaacaacaaaagggtattatgcatgtatttattgcgacaagaatccattgtctctggcaataaggaacaagttatgctagattggacatcgtcgttgccttaaaaggacacattatggtggatagcatggatttcaatggtaagcgtgaaaacaaagttgagcctggcaggtttactgtggatgaggtcctacaagagctagagaaggtgaaagatgtcaggccaatgaagcaggctgacattactggaaataaaagatttgatgcttccacataatctcgatgtgatgcacatagagaaaaatgtatgtgaaaatattctttgcacactactcagtataccaggcaagtccaaggacacacataatgcaaggctagatttgtatgatatgggcataagacctgagctgcacttgcaacaagatggcaacttggcctgcagggctccacctgctccatatgtgttggggaaggatcagaaagtcgacttttgcaagttcctcaaaggtatcaagtttcctaatggatttgcggataacctagcaagatacataagtgaagatggttcaaaggtggttggaaaactgaaaacacattcttgccacatactcctacagagaatcatacccgctggtcttagaggactggtgaggaaggatgtatatgaagcaattgcagagctggggaccttctnnnnnnnnnnnnnnnnnnnnnnnnnnnnnnnnnnnnnnnnnnnnnnnnnnnnnnnnnnnnnnnnnnnnnnnnnnnnnnnnnnnnnnnnnnnnnnnnnnnnaatctttccatctgccttctttgatgtcatggtgcacttgtgtgtccatcttcccgatgaggcactgcttagaggacctgttcaatatggatggatgtacccaatagaaaggagactaggcactttgaaaaattttgtaaggaacagggctaggccggaaggatcaattgctgaggcaaatatggcaagtgataccttgacattttgttctaggtacatgaaggatgttgacactagatttaaccaggatgatgatagtggtacagagatgccattgcctaatgacatctctgtttttaagcatggtgctactcttgttggagctactaagactgagtacattgatgatgctatcatgaataagttagtttggtatgttctacataatgctgatgaagtagaggattatttgaagtaagtatcgtttacatgtttgagatttaatttttgttttatttatatttgaaaatattcttatgattaaagtat

SEQ ID NO: 13756 - DNA, 3358 bp, Zea Mays
aagacggcggagcgggtagttgaacgtggaggcgctctgagatcctagctatggcctggacttccccctgcataagtatcaacgcatcctcgccttctcacccctattgagccagccatcccttcccgtgaccgagaaagcaggcccgagaaagaggtccactgtcggtgctccgtgcttgcaccgatgattggtggccagggttgggtcgtgggcgttcggcagcgtgcgtggatcatgtgtgtgaagtatcaagctcagggatcggtccgagcacctggaattcctcgttgaacctcgtcgctgctgcacctctgctccgcatcgtggaccgaccccgacgtgtctttcgcgctgatgggcaagcaactgaggacccaagtgctcagcaggtggaaagtgccgagcagaagctcgttgaaggccgtatcgcattgggctgcgaccgaacacaaatcgccggacacaaatcgccgccacggtcctcctcctggtgatcccgcgccataccgagcagcaaggtttccctcctcatggtgatctcgtgtcgcgcgttgtgtcctcttcaccgtcctctgccgccacacacatcgccgtctgtacagggaggagctatcgcaacaaggtgcacgtccaaatgatgttgatcgaatggttcaacaaggatttgcaaagtggtttatgtcccatgtaagtcactaaacttttatgttataggtttactaaattttttggtatgcatatgtaattgttgagctgagtaattttgttgcgacagattgagaagaagcgtaatgagaatccagaattggttagcgaaggactgtgggcactgtcatgtggcccagctcggcgagttaagactagtacaacttgcaagattaatggagtgcggtttagcacagtggatcgtgagaagttcatgcagacacaaaatagtggtgtaatgactgaaggtgaacataatggggagaacatagatttttatggtgtccttaaagaggtaattgagttacaatataactcgaattgtcaagttcgtcggacggtggttctatttcgatgcgattggtacaaccaagtaggcaagactgtgggcattcgagatgacaaacatttcaaatccatcaatgtgcagtcattttggtacaagtctgatccttttatcttggcagaccaagcgaaaaagatattttacctggaagacacaactccacaatgtaaagatttccgagttgtgcagaaatttgaacatatgaatatttatgatgtggctgaaaaatatgagggccgtaatgatgtgcatcaggatgattattgttctgatactgagcatatagtgcaagaaggtgatgataatcaggttctacacaatgttgaaggtggagaagccactctaattgaaggcaatttagaggaactaataagaaaaaagaaggaagctactattattcttgaagatagtgaggatgaggaggaagatgatacaatgcttcaatattttaatgatggtggcgacgacaacaatgatgacatgtccatagaagatgaagatgaggatttctagtattgatagttgatttatgaacaagcctattctttagactaatacaacatatttctgatactgaccatggcttgattgaatgaattgaactcatgagcggtgtatgccagggaagacatcaacttcatgaactcgcgaccatcagcatcgacagtgaaaatattggatatctattgcactgtgcagtttgacaaaaaggtttataatggcgtgatggtggctgtctggacaatttgtttattatttccttcactagttataacgtcagaggcagatgttcttttgaactttgttacttggcagagttaaactgaagattctttcttttccttgatcgttctatcaatctgtttagttttacagttgttggtgcatcagttttctgcacaaacatgcaacataaaaggaaatcagtgtctatcactctatatgagtatctgagtaaaagtatatctggaagatcggttcgttgcatccttaataagatcgttaccaagattccatgacagatcgaaatatattttgatgttttcatctgtttgtagttacagtacctaataaagtttaatagagtagatcctgtcaaactatatcttctatgttttactttgttcttggagaattatatccttaccaagtgttggtggcagatccaaacatactttagtattttcaaaattatttgtggtacttgaaattaaattgatttgcattgactctcttgtacctctgtacaatgtgtcgaagtaatgcttgatacctgattagatctttgtacattttctcttctcaataatcaagatgagtcgtggtggtagtgccggtggtggtcaaagttctctgggttatctctttggaagcggtgagccccccaaaccagcagtggcaccagctgcaagtgctctacctgttgagaaaccatctgctgcaaagactgatgcgaccaagcaggttgttgctggggttaccagctgttgggacttgttctcaaatgctatgaattaagaacaaggcaacacagaaaatgttaaacattaaagtccttcgtccttcgaagcattatttcccttgagagataatgattttcggacgaaggttatgaaggacttaccttcatcaatacatataaataatgacgaaggaaacatataaaatataaaggataacataaacaattatgtattactatcaaatcatttctatttcattattatggaaaaatagaaatgataacaaattacgaatgtaccttaggcttgaaagaaggtaaaagtacaagcgtgacgcaaaagcaaatgccaagtcagcgtgaacagtatgggagcactgttcatctatttataggcacgggacgcagcccatgtaaagttacacccatgccctttacatttgctaataactttatagtaatccatcggggtctaaatagccttttcccctttaagtcgatttccttttctgctatcacgccgaagctcccctgtgcatagcttcggctctgcgctatccttcgtattctttatgcttctccacactgtggttttgatctaagtccaaaggtacctgttcatgtataatactccagaaacattgttaaatcatgtttttgagaaccttcggaagccgaagcccccaacaccagccaaaccaataactaccacagggctgatggtcagaacactggcaacttccttacggtatgctactttatgttctttcatttcacataggctttttacatattaagtgttgctatcatccattgactagctgagtgccacttccttacgg

SEQ ID NO: 13757 - DNA, 1695 bp, Zea Mays
atttctctcgccaacccctaaaccctaaccatcactggatttgggtcatcgccgacgaccttgatggtgaacacaaggaggcaaaacagtcagaaaggtccacaacaagaagaaggtatcttatggttcactctgcctaattcttagttgctaactattaccaagctggatctaaccaaacctaatgatgctagatacatcattcattcatcgacacgcatgtgagtgcatcactgtgtttataaaaatggcatggaagggccaatgatgcagcattccgcacactaggaaagttggtccccatccataactactgtgagagacacgattattctaacatgcacgcgaaagaaatcctcaacatagggtgtgtaattgattgattgcttccattggcttttgcttgtattagaccttatgcagcacaatctaagccagaataatcgtgtacaatatcttagtgtttagttatcctgcacaaacaagacacatttggtacagttgtgtttggttccttacgttgtgttatatgcagtcacatccatgttttagtagagaacttatgtttctagtataggtagaaagagatgagaatatctccactttttttgttcatcagcttgtgtaaatctacatcgcctaatcaatgtactagctagtactttgaacattgtttaagcttgcataaagatttccacaaccaaacaggcgaagtacactgcagaagcctagatacaggctaatgcaagccaccaaagagtcccataatgcctttttcctttacttagaagcatgagtacaatcataaaaacaatcttttaggaaaaacatgaaggctgaagccaacaattacgtagatcagggggaaaaactacagttatagtgcaaccacaattatgaaattgcagaatcataagcaagcttcattatgactgaatctacacatcttatctatttgctctacacatggcactactagctctttcctcttatcttccctgcaaatagtagtacctcttagcatttagtaaaatcctttatattatctaatacgcacaatgtgcttgttcttatctatcttgcaagtagttcaacatgagataactgattatgagagaagacgggataaacaagtggaggagaatataaagaagatgcaagatttgggtctgaataaatatacttctgttctaaataaatctttaccaccatctgcatcaacaaaggggaacaatgcagcaaacaagaaaactaatagttcagattcggattcatatgtctctgattatctccttgacgatgatgatcaaggagatcctgatgatgatgacactgaatcttatgagcagccacaacccctggcaattaagtatcctagaagtgctacaaacacaactcgtgcttcaaagaagaagacaaaccccaacatggctccaggaattaggttcagcaagacagtgagggcaggtccacaactagaggagcaaccttcaaaaggcttcagtctacagagacagatggccacaatgtacaggaaccaacatatgctaatgatgacataccaaacagccctactacacttggacttgttgatcatttcagcagagctgcagaggaagacatggcatccgctgctcatgatagtacaggtgatgctgaaggcaatgtagctagagatgaagaaactgaaggcaa

SEQ ID NO: 13758 - DNA, 3800 bp, Zea Mays
aaaaaattggtcagaaaaaaaaagatgaagccatttgtcgattgtagctctccggcatctgtctcagaatctttgcgcccgctgccgtccgccgctcctcctcccacaccggcgacctccgcccggtgttccatcctcccgcaccgcctcccgacgtccgcgtcgcccccacgcatccttaccttttgtcgattgcgcggtaccgtctaccccactaggcaaggcggtaccctccgcccagcgtagaggcgcgcctaagcgagcgcgtaagagctcctttttgaacacccttcctactgccgacggcagcggcgcatagaagagccaatccgccggtttgatctgaagcatggacaaacaatctgatgcccaggggtcggagaaggttgctgaggagaagcaacttgatgagaaagagttagaaaggaagctgaaaaaagatcaaaaggcaaaagagaaagaagagaaaaaacttaaggcaaagcaaaaggaggcggctaggctccaggcacaagcaacctcagacggaacaaagaaggctgagagaaaacaaaggaagaaagctgtggaggatgaaaatccacaggatttcatagacccaaacactcctaatgggcggaagaaattgctcgcgcctcagatggccaaacaatacagtccaagtgcagttgagagatcatggtatgcttggtgggaatcatcaggatattttggggcagattctgcaagcacaaaaccaccatttgtcatagttctgccacctccaaatgtgactggagctcttcacatcggccatgcacttacagtggctatagaggatgctatgatacgctggcgtaggatgtcaggctacaatgctctgtgggtccctggagtggaccatgctggcattgctacacaggttgttgtagaaaagaagcttatgcgtgaaaggaagctcacaaggcatgacatagggcgtgaaaattttgtttctgaagtactcaaatggaaagatcaatatggtggtacaatattgaatcaattgcgccggcttggggcttcacttgattggtcccgtgaggcttttacaatggatgagcaaagatcaaaagctgtaactgaagcttttgtcaggttacacaaggaaagcctgatatatagagattatcgccttgtgaattgggattgcacacttcgaactgcaatttctgacattgaggttgatcatattgatcttaaagaagacactatgttaaaggtccctggttatgccaatcctgtacagtttggtgtattgatatcttttgcctatcctcttgaggaaggactcggtgagattgttgtagcaaccaccagaatagaaacaatgctgggcgatacagcaatagctgttcaccctgaggatgaaaggtataagcatctgcatggaagatatgcagtccaccccttcaatggacgaaaactcaaaataatctgtgacgcggagttagttgatcccactttcggtactggggctgtcaagattactcctgctcatgatccaaatgactttgaggttggaaagcgtcataatcttgaattcatcaacatattcacagatgatggaaaaataaatagcaatggaggtgcacaattcgatggaatgccaagattcaccgctagagttgctgttatcgaggcactgaaggaaaagcaccatggccaaggcaggccttgacgctgtaaggtcaaaaaagattgaaattatcccccagcagtatgagcaagactggtacagatggcttgaaaatatacgtgattggtgtgtctcaaggcaactttggtggggtcatcgtatacctgcatggtatgtgacactagaagatgacctggataaaaaccttggttctaacaatgaccgctggatagttgcaagaaatgaaagcgatgcaaaacttgaggcacagaaaaagtatgtaggaatgaaattacgtctagatcaagaccctgatgtactggacacatggttttcatctggtcttttccccttaacagtacttggttggccgtctgataccactgacctccgtgctttctaccctacatcggtactagaaactggacttgatattctcttcttttgggtagcaaggatggtgatgatgggaatgcaacttggtggtgacgtgccatttcagaaggtttatttacatcctatgattcgggatgcacatggccgaaagatgtcaaaatcacttggtaacgttgttgaccctcttgaggtgataaatggcatgtcactggatggtcttctgaaacgtttggaagaaggcaatctggatccaaatgaattaaacattgcaagagatgggaagacgaaggattttcctgatggcatagcagaatgtggtaccgatgcgctccgcttcgcactgatatcgtacacctcccaggttcttatggcacccagttgagttttttcatgtttaatgtagcatacatggttttatgcaatcccccccccccccccttcagtctgacaggataaatcttgatatcaagagggtggttggatatagacaatggtgcaacaaattatggaatgccattcgttttgcgatgggcaaactgggtgatgattacattccgccggcaactgttgatgtgtctcttatgccaccaatatgcaagtggatactctcagtgcttaacaaggctgttggaaaaactgttacttctttagaagcatacaaattgtctgatgcaacatctgctatatactcgtggtggcagtatgagctatgcgatgtatttatagaagctatcaaaccttacttcagcgattctcaagagtttgaatcagcaagagctgcctccagagataccctgtggatttgcctggagacaggtctgcgtctgctccatccgttcatgccctatgtaacagaagagctctggcaacgtcttccacagcccaaagattctagtaggaggaaagattcgattatgatttcagagtatccatctcttgttgaggaatggagtaatggcggggttgaaaatgaaatggacattgtcttggatgctgtcaacaaaataaggtctctgaagcctccaacagattcaaatgaaagacggcctgcttttgcactttgccgaggccaagaggtcgctgctactatccaatgctatcaatctctaatcgtgtgtctttcttccatatcacatctcaagatcctgacagagagtgatgaaactccagccgattgtgcaactgctgttgtcaacaaagacttgtctgtgtaccttcagctccaaggagatttaaatgaagatgctgagcgtgaaaagctaaggaagaaaaaagatgaaattcaaaagctacaaaatgcactggcacagaaaatggacgcctctgggtatcgcgagaaggctccacagagcgtgcaggaggaggacatgagaaagctcaccgctttgttggaacaactagaggtcatcagtgaagctgagaagaaattagactcaaactgagcctgtaccgaagttggtccccacatttttcttgtttgcaaaaagctcctgtttgctcaggttttcaattgatggttcagatggaagccacacttttgcagcgtgtaagaatattcactggctgtacagaaccatatttttgggtgttcgattttttcaagttagaaacttctgatgatgcatatgggaagtctgtcagaatatgcagcagccgaaatctgttaatcaaatttattagaatggtctcaattgtctcattcctcatgctacacaatttagcttgcttattctttctacgaaaaaaa

SEQ ID NO: 13759 - DNA, 3758 bp, Zea Mays
cagaaaaaaaaagatgaagccatttgtcgattgtagctctccggcatctgtctcagaatctttgcgcccgctgccgtccgccgctcctcctcccacaccggcgacctccgcccggtgttccatcctcccgcaccgcctcccgacgtccgcgtcgcccccacgcatccttaccttttgtcgattgcgcggtaccgtctaccccactaggcaaggcggtaccctccgcccagcgtagaggcgcgcctaagcgagcgcgtaagagctcctttttgaacacccttcctactgccgacggcagcggcgcatagaagagccaatccgccggtttgatctgaagcatggacaaacaatctgatgcccaggggtcggagaaggttgctgaggagaaggttcgtgtactcactcaccacacttgtttcatggaaaaaggtccttcgaggcaacttgatgagaaagagttagaaaggaagctgaaaaaagatcaaaaggcaaaagagaaagaagagaaaaaacttaaggcaaagcaaaaggaggcggctaggctccaggcacaagcaacctcagacggaacaaagaaggctgagagaaaacaaaggaagaaagctgtggaggatgaaaatccacaggatttcatagacccaaacactcctaatgggcggaagaaattgctcgcgcctcagatggccaaacaatacagtccaagtgcagttgagagatcatggtatgcttggtgggaatcatcaggatattttggggcagattctgcaagcacaaaaccaccatttgtcatagttctgccacctccaaatgtgactggagctcttcacatcggccatgcacttacagtggctatagaggatgctatgatacgctggcgtaggatgtcaggctacaatgctctgtgggtccctggagtggaccatgctggcattgctacacaggttgttgtagaaaagaagcttatgcgtgaaaggaagctcacaaggcatgacatagggcgtgaaaattttgtttctgaagtactcaaatggaaagatcaatatggtggtacaatattgaatcaattgcgccggcttggggcttcacttgattggtcccgtgaggcttttacaatggatgagcaaagatcaaaagctgtaactgaagcttttgtcaggttacacaaggaaagcctgatatatagagattatcgccttgtgaattgggattgcacacttcgaactgcaatttctgacattgaggttgatcatattgatcttaaagaagacactatgttaaaggtccctggttatgccaatcctgtacagtttggtgtattgatatcttttgcctatcctcttgaggaaggactcggtgagattgttgtagcaaccaccagaatagaaacaatgctgggcgatacagcaatagctgttcaccctgaggatgaaaggtataagcatctgcatggaagatatgcagtccaccccttcaatggacgaaaactcaaaataatctgtgacgcggagttagttgatcccactttcggtactggggctgtcaagattactcctgctcatgatccaaatgactttgaggttggaaagcgtcataatcttgaattcatcaacatattcacagatgatggaaaaataaatagcaatggaggtgcacaattcgatggaatgccaagattcaccgctagagttgctgttatcgaggcactgaaggaaaagcaccatggccaaggcaggccttgacgctgtaaggtcaaaaaagattgaaattatcccccagcagtatgagcaagactggtacagatggcttgaaaatatacgtgattggtgtgtctcaaggcaactttggtggggtcatcgtatacctgcatggtatgtgacactagaagatgacctggataaaaaccttggttctaacaatgaccgctggatagttgcaagaaatgaaagcgatgcaaaacttgaggcacagaaaaagtatgtaggaatgaaattacgtctagatcaagaccctgatgtactggacacatggttttcatctggtcttttccccttaacagtacttggttggccgtctgataccactgacctccgtgctttctaccctacatcggtactagaaactggacttgatattctcttcttttgggtagcaaggatggtgatgatgggaatgcaacttggtggtgacgtgccatttcagaaggtttatttacatcctatgattcgggatgcacatggccgaaagatgtcaaaatcacttggtaacgttgttgaccctcttgaggtgataaatggcatgtcactggatggtcttctgaaacgtttggaagaaggcaatctggatccaaatgaattaaacattgcaagagatgggaagacgaaggattttcctgatggcatagcagaatgtggtaccgatgcgctccgcttcgcactgatatcgtacacctcccagtctgacaggataaatcttgatatcaagagggtggttggatatagacaatggtgcaacaaattatggaatgccattcgttttgcgatgggcaaactgggtgatgattacattccgccggcaactgttgatgtgtctcttatgccaccaatatgcaagtggatactctcagtgcttaacaaggctgttggaaaaactgttacttctttagaagcatacaaattgtctgatgcaacatctgctatatactcgtggtggcagtatgagctatgcgatgtatttatagaagctatcaaaccttacttcagcgattctcaagagtttgaatcagcaagagctgcctccagagataccctgtggatttgcctggagacaggtctgcgtctgctccatccgttcatgccctatgtaacagaagagctctggcaacgtcttccacagcccaaagattctagtaggaggaaagattcgattatgatttcagagtatccatctcttgttgaggaatggagtaatggcggggttgaaaatgaaatggacattgtcttggatgctgtcaacaaaataaggtctctgaagcctccaacagattcaaatgaaagacggcctgcttttgcactttgccgaggccaagaggtcgctgctactatccaatgctatcaatctctaatcgtgtgtctttcttccatatcacatctcaagatcctgacagagagtgatgaaactccagccgattgtgcaactgctgttgtcaacaaagacttgtctgtgtaccttcagctccaaggagatttaaatgaagatgctgagcgtgaaaagctaaggaagaaaaaagatgaaattcaaaagctacaaaatgcactggcacagaaaatggacgcctctgggtatcgcgagaaggctccacagagcgtgcaggaggaggacatgagaaagctcaccgctttgttggaacaactagaggtcatcagtgaagctgagaagaaattagactcaaactgagcctgtaccgaagttggtccccacatttttcttgtttgcaaaaagctcctgtttgctcaggttttcaattgatggttcagatggaagccacacttttgcagcgtgtaagaatattcactggctgtacagaaccatatttttgggtgttcgattttttcaagttagaaacttctgatgatgcatatgggaagtctgtcagaatatgcagcagccgaaatctgttaatcaaatttattagaatggtctcaattgtctcattcctcatgctacacaatttagcttgcttattctttctacgaaaaaaa

SEQ ID NO: 13760 - DNA, 914 bp, Zea Mays
gctctccggcatctgtctcagaatctttgcgcccgctgccgtccgccgctcctcctcccacaccggcgacctccgcccggtgttccatcctcccgcaccgcctcccgacgtccgcgtcgcccccacgcatccttaccttttgtcgattgcgcggtaccgtctaccccactaggcaaggcggtaccctccgcccagcgtagaggcgcgcctaagcgagcgcgtaagagctcctttttgaacacccttcctactgccgacggcagcggcgcatagaagagccaatccgccggtttgatctgaagcatggacaaacaatctgatgcccaggggtcggagaaggttgctgaggagaagcaacttgatgagaaagagttagaaaggaagctgaaaaaagatcaaaaggcaaaagagaaagaagagaaaaaacttaaggcacaagcaacctcagacggaacaaagaaggctgagagaaaacaaaggaagaaagctgtggaggatgaaaatccacaggatttcatagacccaaacactcctaatgggcggaagaaattgctcgcgcctcagatggccaaacaatacagtccaagtgcagttgagagatcatggtatgcttggtgggaatcatcaggatattttggggcagattctgcaagcacaaaaccaccatttgtcatagttctgccacctccaaatgtgactggagctcttcacatcggccatgcacttacagtggctatagaggatgctatgatacgctggcgtaggatgtcaggctacaatgctctgtgggtccctggagtggaccatgctggcattgctacacaggttgttgtagaaaagaagcttatgcgtgaaaggaagctcacaaggcatgacatagggcgtgaaaattttgtttctgaagtaagtatttc

SEQ ID NO: 13761 - DNA, 3830 bp, Zea Mays
gctctccggcatctgtctcagaatctttgcgcccgctgccgtccgccgctcctcctcccacaccggcgacctccgcccggtgttccatcctcccgcaccgcctcccgacgtccgcgtcgcccccacgcatccttaccttttgtcgattgcgcggtaccgtctaccccactaggcaaggcggtaccctccgcccagcgtagaggcgcgcctaagcgagcgcgtaagagctcctttttgaacacccttcctactgccgacggcagcggcgcatagaagagccaatccgccggtttgatctgaagcatggacaaacaatctgatgcccaggggtcggagaaggttgctgaggagaaggttcgtgtactcactcaccacacttgtttcatggaaaaaggtccttcgaggcaacttgatgagaaagagttagaaaggaagctgaaaaaagatcaaaaggcaaaagagaaagaagagaaaaaacttaaggcaaagcaaaaggaggcggctaggctccaggcacaagcaacctcagacggaacaaagaaggctgagagaaaacaaaggaagaaagctgtggaggatgaaaatccacaggatttcatagacccaaacactcctaatgggcggaagaaattgctcgcgcctcagatggccaaacaatacagtccaagtgcagttgagagatcatggtatgcttggtgggaatcatcaggatattttggggcagattctgcaagcacaaaaccaccatttgtcatagttctgccacctccaaatgtgactggagctcttcacatcggccatgcacttacagtggctatagaggatgctatgatacgctggcgtaggatgtcaggctacaatgctctgtgggtccctggagtggaccatgctggcattgctacacaggttgttgtagaaaagaagcttatgcgtgaaaggaagctcacaaggcatgacatagggcgtgaaaattttgtttctgaagtactcaaatggaaagatcaatatggtggtacaatattgaatcaattgcgccggcttggggcttcacttgattggtcccgtgaggcttttacaatggatgagcaaagatcaaaagctgtaactgaagcttttgtcaggttacacaaggaaagcctgatatatagagattatcgccttgtgaattgggattgcacacttcgaactgcaatttctgacattgaggttgatcatattgatcttaaagaagacactatgttaaaggtccctggttatgccaatcctgtacagtttggtgtattgatatcttttgcctatcctcttgaggaaggactcggtgagattgttgtagcaaccaccagaatagaaacaatgctgggcgatacagcaatagctgttcaccctgaggatgaaaggtataagcatctgcatggaagatatgcagtccaccccttcaatggacgaaaactcaaaataatctgtgacgcggagttagttgatcccactttcggtactggggctgtcaagattactcctgctcatgatccaaatgactttgaggttggaaagcgtcataatcttgaattcatcaacatattcacagatgatggaaaaataaatagcaatggaggtgcacaattcgatggaatgccaagattcaccgctagagttgctgttatcgaggcactgaaggaaaaggggttgtataaggacacaaagaagaatgaaatgagcttgggtgtttgttcaagaactaatgatgtagtggaacctatgataaaaccacagtggtttgttaattgcagcaccatggccaaggcaggccttgacgctgtaaggtcaaaaaagattgaaattatcccccagcagtatgagcaagactggtacagatggcttgaaaatatacgtgattggtgtgtctcaaggcaactttggtggggtcatcgtatacctgcatggtatgtgacactagaagatgacctggataaaaaccttggttctaacaatgaccgctggatagttgcaagaaatgaaagcgatgcaaaacttgaggcacagaaaaagtatgtaggaatgaaattacgtctagatcaagaccctgatgtactggacacatggttttcatctggtcttttccccttaacagtacttggttggccgtctgataccactgacctccgtgctttctaccctacatcggtactagaaactggacttgatattctcttcttttgggtagcaaggatggtgatgatgggaatgcaacttggtggtgacgtgccatttcagaaggtttatttacatcctatgattcgggatgcacatggccgaaagatgtcaaaatcacttggtaacgttgttgaccctcttgaggtgataaatggcatgtcactggatggtcttctgaaacgtttggaagaaggcaatctggatccaaatgaattaaacattgcaagagatgggaagacgaaggattttcctgatggcatagcagaatgtggtaccgatgcgctccgcttcgcactgatatcgtacacctcccagtctgacaggataaatcttgatatcaagagggtggttggatatagacaatggtgcaacaaattatggaatgccattcgttttgcgatgggcaaactgggtgatgattacattccgccggcaactgttgatgtgtctcttatgccaccaatatgcaagtggatactctcagtgcttaacaaggctgttggaaaaactgttacttctttagaagcatacaaattgtctgatgcaacatctgctatatactcgtggtggcagtatgagctatgcgatgtatttatagaagctatcaaaccttacttcagcgattctcaagagtttgaatcagcaagagctgcctccagagataccctgtggatttgcctggagacaggtctgcgtctgctccatccgttcatgccctatgtaacagaagagctctggcaacgtcttccacagcccaaagattctagtaggaggaaagattcgattatgatttcagagtatccatctcttgttgaggaatggagtaatggcggggttgaaaatgaaatggacattgtcttggatgctgtcaacaaaataaggtctctgaagcctccaacagattcaaatgaaagacggcctgcttttgcactttgccgaggccaagaggtcgctgctactatccaatgctatcaatctctaatcgtgtgtctttcttccatatcacatctcaagatcctgacagagagtgatgaaactccagccgattgtgcaactgctgttgtcaacaaagacttgtctgtgtaccttcagctccaaggagatttaaatgaagatgctgagcgtgaaaagctaaggaagaaaaaagatgaaattcaaaagctacaaaatgcactggcacagaaaatggacgcctctgggtatcgcgagaaggctccacagagcgtgcaggaggaggacatgagaaagctcaccgctttgttggaacaactagaggtcatcagtgaagctgagaagaaattagactcaaactgagcctgtaccgaagttggtccccacatttttcttgtttgcaaaaagctcctgtttgctcaggttttcaattgatggttcagatggaagccacacttttgcagcgtgtaagaatattcactggctgtacagaaccatatttttgggtgttcgattttttcaagttagaaacttctgatgatgcatatgggaagtctgtcagaatatgcagcagccgaaatctgttaatcaaatttattagaatggtctcaattgtctcattcctcatgctacacaatttagcttgcttattctttctacgaaaaaaa

SEQ ID NO: 13762 - DNA, 3490 bp, Zea Mays
cgccactcgaacccgcccgtccgcaatctgatgcccaggggtcggagaaggttgctgaggagaagcaacttgatgagaaagagttagaaaggaagctgaaaaaagatcaaaaggcaaaagagaaagaagagaaaaaacttaaggcaaagcaaaaggaggcggctaggctccaggcacaagcaacctcagacggaacaaagaaggctgagagaaaacaaaggaagaaagctgtggaggatgaaaatccacaggatttcatagacccaaacactcctaatgggcggaagaaattgctcgcgcctcagatggccaaacaatacagtccaagtgcagttgagagatcatggtatgcttggtgggaatcatcaggatattttggggcagattctgcaagcacaaaaccaccatttgtcatagttctgccacctccaaatgtgactggagctcttcacatcggccatgcacttacagtggctatagaggatgctatgatacgctggcgtaggatgtcaggctacaatgctctgtgggtccctggagtggaccatgctggcattgctacacaggttgttgtagaaaagaagcttatgcgtgaaaggaagctcacaaggcatgacatagggcgtgaaaattttgtttctgaagtactcaaatggaaagatcaatatggtggtacaatattgaatcaattgcgccggcttggggcttcacttgattggtcccgtgaggcttttacaatggatgagcaaagatcaaaagctgtaactgaagcttttgtcaggttacacaaggaaagcctgatatatagagattatcgccttgtgaattgggattgcacacttcgaactgcaatttctgacattgaggttgatcatattgatcttaaagaagacactatgttaaaggtccctggttatgccaatcctgtacagtttggtgtattgatatcttttgcctatcctcttgaggaaggactcggtgagattgttgtagcaaccaccagaatagaaacaatgctgggcgatacagcaatagctgttcaccctgaggatgaaaggtataagcatctgcatggaagatatgcagtccaccccttcaatggacgaaaactcaaaataatctgtgacgcggagttagttgatcccactttcggtactggggctgtcaagattactcctgctcatgatccaaatgactttgaggttggaaagcgtcataatcttgaattcatcaacatattcacagatgatggaaaaataaatagcaatggaggtgcacaattcgatggaatgccaagattcaccgctagagttgctgttatcgaggcactgaaggaaaaggggttgtataaggacacaaagaagaatgaaatgagcttgggtgtttgttcaagaactaatgatgtagtggaacctatgataaaaccacagtggtttgttaattgcagcaccatggccaaggcaggccttgacgctgtaaggtcaaaaaagattgaaattatcccccagcagtatgagcaagactggtacagatggcttgaaaatatacgtgattggtgtgtctcaaggcaactttggtggggtcatcgtatacctgcatggtatgtgacactagaagatgacctggataaaaaccttggttctaacaatgaccgctggatagttgcaagaaatgaaagcgatgcaaaacttgaggcacagaaaaagtatgtaggaatgaaattacgtctagatcaagaccctgatgtactggacacatggttttcatctggtcttttccccttaacagtacttggttggccgtctgataccactgacctccgtgctttctaccctacatcggtactagaaactggacttgatattctcttcttttgggtagcaaggatggtgatgatgggaatgcaacttggtggtgacgtgccatttcagaaggtttatttacatcctatgattcgggatgcacatggccgaaagatgtcaaaatcacttggtaacgttgttgaccctcttgaggtgataaatggcatgtcactggatggtcttctgaaacgtttggaagaaggcaatctggatccaaatgaattaaacattgcaagagatgggaagacgaaggattttcctgatggcatagcagaatgtggtaccgatgcgctccgcttcgcactgatatcgtacacctcccagtctgacaggataaatcttgatatcaagagggtggttggatatagacaatggtgcaacaaattatggaatgccattcgttttgcgatgggcaaactgggtgatgattacattccgccggcaactgttgatgtgtctcttatgccaccaatatgcaagtggatactctcagtgcttaacaaggctgttggaaaaactgttacttctttagaagcatacaaattgtctgatgcaacatctgctatatactcgtggtggcagtatgagctatgcgatgtatttatagaagctatcaaaccttacttcagcgattctcaagagtttgaatcagcaagagctgcctccagagataccctgtggatttgcctggagacaggtctgcgtctgctccatccgttcatgccctatgtaacagaagagctctggcaacgtcttccacagcccaaagattctagtaggaggaaagattcgattatgatttcagagtatccatctcttgttgaggaatggagtaatggcggggttgaaaatgaaatggacattgtcttggatgctgtcaacaaaataaggtctctgaagcctccaacagattcaaatgaaagacggcctgcttttgcactttgccgaggccaagaggtcgctgctactatccaatgctatcaatctctaatcgtgtgtctttcttccatatcacatctcaagatcctgacagagagtgatgaaactccagccgattgtgcaactgctgttgtcaacaaagacttgtctgtgtaccttcagctccaaggagatttaaatgaagatgctgagcgtgaaaagctaaggaagaaaaaagatgaaattcaaaagctacaaaatgcactggcacagaaaatggacgcctctgggtatcgcgagaaggctccacagagcgtgcaggaggaggacatgagaaagctcaccgctttgttggaacaactagaggtcatcagtgaagctgagaagaaattagactcaaactgagcctgtaccgaagttggtccccacatttttcttgtttgcaaaaagctcctgtttgctcaggttttcaattgatggttcagatggaagccacacttttgcagcgtgtaagaatattcactggctgtacagaaccatatttttgggtgttcgattttttcaagttagaaacttctgatgatgcatatgggaagtctgtcagaatatgcagcagccgaaatctgttaatcaaatttattagaatggtctcaattgtctcattcctcatgctacacaatttagcttgcttattctttctacgaaaaaaa

SEQ ID NO: 13763 - DNA, 1591 bp, Zea Mays
cttcgttttgttagcagtctatttgttcatgtgaggtttatttacatcctatgattcgggatgcacatggccgaaagatgtcaaaatcacttggtaacgttgttgaccctcttgaggtgataaatggcatgtcactggatggtcttctgaaacgtttggaagaaggcaatctggatccaaatgaattaaacattgcaagagatgggaagacgaaggattttcctgatggcatagcagaatgtggtaccgatgcgctccgcttcgcactgatatcgtacacctcccagtctgacaggataaatcttgatatcaagagggtggttggatatagacaatggtgcaacaaattatggaatgccattcgttttgcgatgggcaaactgggtgatgattacattccgccggcaactgttgatgtgtctcttatgccaccaatatgcaagtggatactctcagtgcttaacaaggctgttggaaaaactgttacttctttagaagcatacaaattgtctgatgcaacatctgctatatactcgtggtggcagtatgagctatgcgatgtatttatagaagctatcaaaccttacttcagcgattctcaagagtttgaatcagcaagagctgcctccagagataccctgtggatttgcctggagacaggtctgcgtctgctccatccgttcatgccctatgtaacagaagagctctggcaacgtcttccacagcccaaagattctagtaggaggaaagattcgattatgatttcagagtatccatctcttgttgaggaatggagtaatggcggggttgaaaatgaaatggacattgtcttggatgctgtcaacaaaataaggtctctgaagcctccaacagattcaaatgaaagacggcctgcttttgcactttgccgaggccaagaggtcgctgctactatccaatgctatcaatctctaatcgtgtgtctttcttccatatcacatctcaagatcctgacagagagtgatgaaactccagccgattgtgcaactgctgttgtcaacaaagacttgtctgtgtaccttcagctccaaggagatttaaatgaagatgctgagcgtgaaaagctaaggaagaaaaaagatgaaattcaaaagctacaaaatgcactggcacagaaaatggacgcctctgggtatcgcgagaaggctccacagagcgtgcaggaggaggacatgagaaagctcaccgctttgttggaacaactagaggtcatcagtgaagctgagaagaaattagactcaaactgagcctgtaccgaagttggtccccacatttttcttgtttgcaaaaagctcctgtttgctcaggttttcaattgatggttcagatggaagccacacttttgcagcgtgtaagaatattcactggctgtacagaaccatatttttgggtgttcgattttttcaagttagaaacttctgatgatgcatatgggaagtctgtcagaatatgcagcagccgaaatctgttaatcaaatttattagaatggtctcaattgtctcattcctcatgctacacaatttagcttgcttattctttctacgaaaaaaa

SEQ ID NO: 13764 - DNA, 1558 bp, Zea Mays
cccaaacgaacattaacccgcaaaatttgtaacgtacatgtacaattgcagttcctcgctctgcagagacaagtgggaagggaaaaaaaatcgacgaatcaaacaaaaaaaacgtggccaacaaaactgtcgcggcaacgttgctgcaaccgcgagcgatccgacgacgaggtctcggtgctgacgctgctgtcacggtgccgccgcggccgtcgaggacatggcggagaggcggctgggcgtggggcggaaggcgtcggcgcggcggcgcgtctgcgagggagtcgggcgcacgagcgccgccagcgcgcgcctgatgtggtcgccgccctccaccgcggcgatgcgcaccagcgggttggccatggacgcgcgccgcggggcgctgagcctgctggacaccagcgccgccgaggccgaggccgggagcgggccttggccacccctgtgtagggcgcagcggaaggagcccgggtgcgtggtgggcgagcacgcgcacgacgcccgcttcggccgtgccggcgcgacgacgggcagcgtggcgcgccggtgctggtgaggctgggaccgcgaggaggcgccgcgggcggtcgcgcggcgctgggggacgagcgacgctgctgcggacgccgccgtcgccgcggcagcagcagcagcagcagccatggcgctcggcggacgactggacggcgccgtcgctctcgccatcggggcgggcgtcctgacgcggttcggagacgggggaagagaatgtgcttggtcagtggtggtggtgctggcaatagccaacggggacagattcggcggtggactggtggcgtttcggcggcggtgtggccaaagccaaaccaagcgtggcggccggggcgggttgccgggagacggaaggggcgaggaggtctgcggcaaggttccggcgattcaaagtgacggcgcagccctaagcaatagcatcctccacgcatccttcagccaactggcttccctggagaataatggagcagcaaggaaatgatggtgtgaattcctcccggtcctcacctttctttcacaatgatcagtggacttacacgctagtcactgagcttgatcatctacagcatggccagaacacacatttccataacccaagttcatcacacatgagtatgcccccatcgtttcaacaattgttagaggtttacaacccatttctagagcgagccgaacaaccaaattcacaggaaacaactaaagaaacacattcaccactacctcaagttggttcaaagcaaaagaaggtttctagaagagggggtggattcactaaagaagaggatagagtaatttgttctgcgtttttgaatgtcagcaaagacccaattacgggtgtgaaccagtcttctggaggtactacaagcgcattttttgagtattttgatgctagaaagcccacaggttccaatagaagccagattgtaatagaacacaggtggagggggtatccaaaaggcaattaattggtttgttgggtgcaaatctttagttgacagaagaaatgagagtgggaagacaaaac

SEQ ID NO: 13765 - DNA, 418 bp, Zea Mays
cttgcatcgtcgccttattgctgttctggtgaggccatgtcgttcttgtcctactcatttccctaccggcatcaaatccttactgttgtttatacgtatgttttgtgtgagttgggaggtggagaagaaaggaactctagtgcatcacacactttgtgcttgacgaaatgtttgaatcagaatttatcatcgcatccgcagtttggtttaatcatgattcttcggcacttgctgagaaggacattgcagcgctgtctcctgagcttcgtgcacaagcaactgatccaaagagcacgcaaggtcacaggaccctggatggaagtttgggaggtggccagacactgtcacactgcaaaggactttgttcagtgtattttctgtttgaagattcttccttctagaattaaaagatttaaac

SEQ ID NO: 13766 - DNA, 356 bp, Zea Mays
cacacactttgtgcttgacgaaatgtttgaatcagaatttatcatcgcatccgcagtttggtttaatcatgtggtgccaaaaagtggtcgtttttcccttcctttgatctgtacagagatccatggtagccgccggggtgctggtaacgttgagattcttcggcacttgctgagaaggacattgcagcgctgtctcctgagcttcgtgcacaagcaactgatccaaagagcacgcaaggtcacaggaccctggatggaagtttgggaggtggccagacactgtcacactgcaaaggactttgttcagtgtattttctgtttgaagattcttccttctagaattaaaagatttaaac

SEQ ID NO: 13767 - DNA, 887 bp, Zea Mays
aacacaggggctcctgcataattaaatctggaaacagggggtttctcactgcataatgactccagtatcgctctatataacaagtggatccgatctagtcgccagtcgtcgtcgttaaaaccgagaagagaccaggccgaaggaaaacaatcctgaaaccaagccatgggtctgcaggaggaatttgaggagcatgctgagaaggcaaagaccttgcctgagagcacgagcaatgagaacaagctgatcctctacgggctctacaagcaagccacggttggagatgtgaataccgatcgtccgggcatattctaccaaaaggacagggccaagtgggatgcctggaaggctgttgaaggcaaatcgaaggatgaggcgatgaatgactacatcaccaaggtgaagcagctccaggaggaggctgccgcctcttaaaagtctcttaatagtgttgccaaacagctatttgtcagatgagctttgtgccatttcctcattagaagtatatcattcgatccattggggatctgtgaaccatgtacctgtttatgtaacttttttttttttcgaaagagcgcaggaggactgcgcacccatatattaaagtagagggaaaataaagggccataatgatgatatccatctatctatctatgtaactggtttatgtaccatgtacctgtttatgtaactggttaccagtgttatccatctatctatctataagagaaagagaaagataaaagagatagctaaattcacatagctcacagcaacttgtttttccagaactcaaagttgaaccagaatttgagttgcataataacactggtttgcaaactagtttgtatcttagataaatcagtaggtaagcataaggctgtctc

SEQ ID NO: 13768 - DNA, 1869 bp, Zea Mays
cacaagagaagtaaaaccaagtgtcagtctctgactccccctcccccccggttcctcactttctcctgtgccgtggtcttgacagtccgggcccactctcgagtctccgaccgcattgaactctagcgactgggcgccgcgctgctgcgactgcgactacgcgggcatggcggggaaggaggcggcggagagcagcagggccaggaggcgcatggatctgaacctgtacgtgggcctcccgccgctgtcgccgcctcgactctggctcgacacctcggcgccttcccgaacgacgtgggtgtcccactcgggtcccggtgccgcgctggacgctccaaggacacgcgagcccgaggaaccgctcgccccggcggcggcggcggcggcggcctactcgccgtcgaacgcgctcttcgccccggacccggaggagcacccggtgtttgatcccttagtgtactcctggctcgacggcagcggtgaagagtacaccgatgctcctgcgctgtcggcgccggctccaacgccggtggatggtcatggtgtctctgggccgcagtttctgatggctgccactgggctggacggggacgatcttgcggtaccaaggcctgtgcaccctagccgggtggcggcggctgctgctgctgctggtggactggagatggtcggcacgagcgtacttgggcagtccactcaaggtgcgactgcaagtgaagcaggggagctccggttcctgagggcgatacggatcagccagcagcacaacatcgtgaggtcaggaccagcgagccacactcaagtggcagctagcacggatgcgggtagcctggtcatggcaatgcaacacacacaaagcgctttcgaagcagcagcagatccggatggcggcggcgacaaggtgcgtggaagcgacgccgcagagaaggacgggtcctgtgactgcaactgcgactccagcttcgagtgcaacatctgcctcgagcgggccaagcagccggtggtcacgtcctgcggccacctcttctgctggccgtgcctgtaccggtggctgcacgcgcagtcgcccttctgcgactgccccgtctgcaagggcgaggtgttgctaacgagcatcacaccgatctacgggagaggcggcgacgaagaaggggactccggctcctccgccgtccccgacctgccgcccaggccgcaagcgaaccggagggacagcctgaggcagcagctgcagacggcgacggacgccagagggatcgccgcggtgctgagggagatgatccagaaccagggcatcgtgacctcggttcccgcaggccggcaacgggctggtagcgctcggaggcagcgaaggcagggtagcaacgcgtcgcgctccgcggtggtgaacgcgggcaatgctgcccctgagggcagcgatccgatccagccgccacactccaatggcggcaacggtgagcaggttgttcatgcagctcctcaacaaccaccaccggctgttgtgctgggcgagcctgggccaagtaggcggtcgaggcattcggagtccgcagccataagaaggacaaggaggaggccacagcagtagggagcagagtgttggcactcccttcagtaagaaaaaaagagagctacagatcatgcatcaaaatgttagttatcaccatgattaacatctcatggttaataatatactaggaatgtagtacatgccatcgctcgtttgccaggcaaaacgagtcgaaatgtcagtcccagtcccagcatgttgggaatatattttctgattgagcctctgtttctgttctgatatgccattataacttatctgatgtcgctattcccgagtttccaacatagttacattac

SEQ ID NO: 13769 - DNA, 1331 bp, Zea Mays
cggagcctataaaacagctcgagtgagagaccagtgagtgaactcatcactcccgcttccagcttcccgcagcgagcatcaaaaggagaagagcgagagagagcagcaggcatggaaatgggcgacagcttcgagtactactgggagatgcagcagtacctggagtcagaggagctcagcctctacatgggcacccaggacgatgccctgtcctgctacgactccagctcgccggatggctccatctccaactcgtcctgggcgccggcgggcgtggcggccacggcgtccgagaagcgggagggccccggcggcgcggcggccgcgaacaagaacatcctcatggagcgcgaccgccggcgcaagctcaacgagaagctctacgcgctgcgcagcgtcgtgcccaacatcacaaagatggacaaggcgtcgatcatcaaggacgcgatcgagtacatcgagcagctacaggcggaggagcggcgggcgctgcaggcgctcgaggccggcgagggggcgcgctgcggcggccacgggcacggcgaggaggcgcgcgtggtcctgcagcagcccgccgccgccccggcgcccgtggaggtcctggagctgcgcgtgtcggaggtgggcgaccgcgtgctggtggtgaacgtgacgtgcagcaagggccgcgacgccatggcccgcgtgtgccgcgccgtcgaggagctccggctccgcgtcatcaccgccagcgtcacctccgtcgccggctgcctcatgcacaccatcttcgtcgaggtacgtcgtcggcaggtggattcggaccagacgaatcgtatccagatcaagcacatgatcgaggccgctctcgcccagctagatgatgcctccgcgagcccgccgagcgtgatgagctactattagaatcggacaaccgtcacgctgacatgcacgagccggcctagctactgtggccgaccggtactgttccgtgcgcgtatataggaactaggaagaagtgggtgctttgtttgctatatatgaggcactaggtcagggggttttgtgatggggctttatgcaactttgatgtaatggaccgaaaacgacagattgagtgttggcggctagctcccatatgtttagagtctagggaaggaataaataatcgagacaagtcttatccctgtatttttgtagagaggtatttgaaacaagaagttcatcaaatacaagggaaaaatgtcatggcgacaaatatgttagaaatctatggagttctatgtttaatttaatctgaaaatagcataatatgtgacgacacacatgtgtatgtatatacttactagtac

SEQ ID NO: 13770 - DNA, 2061 bp, Zea Mays
cggagcctataaaacagctcgagtgagagaccagtgagtgaactcatcactcccgcttccagcttcccgcagcgagcatcaaaaggagaagagcgagagagagcagcaggcatggaaatgggcgacagcttcgagtactactgggagatgcagcagtacctggagtcagaggagctcagcctctacatgggcacccaggacgatgccctgtcctgctacgactccagctcgccggatggctccatctccaactcgtcctgggcgccggcgggcgtggcggccacggcgtccgagaagcgggagggccccggcggcgcggcggccgcgaacaagaacatcctcatggagcgcgaccgccggcgcaagctcaacgagaagctctacgcgctgcgcagcgtcgtgcccaacatcacaaagatggacaaggcgtcgatcatcaaggacgcgatcgagtacatcgagcagctacaggcggaggagcggcgggcgctgcaggcgctcgaggccggcgagggggcgcgctgcggcggccacgggcacggcgaggaggcgcgcgtggtcctgcagcagcccgccgccgccccggcgcccgtggaggtcctggagctgcgcgtgtcggaggtgggcgaccgcgtgctggtggtgaacgtgacgtgcagcaagggccgcgacgccatggcccgcgtgtgccgcgccgtcgaggagctccggctccgcgtcatcaccgccagcgtcacctccgtcgccggctgcctcatgcacaccatcttcgtcgaggtacgtcgtcggcaggcaagcactagcagcagcatatatgttcgcattgtgcattgtttgcgaagcaagcacagagtgctctgctttttcttgtcaagttttcgaatgcttaggaatttaggggatgttggttttgaccgtatagtttgacattttttctcctgttcttttctttattagggcttattaagactaatttagaaactttaaaagggatttacatatttctaagagaaattagtttattttttctgggtaagattagaatctactggaagaacagtgttctcaaactagaccttagataaaaaaaaagtggagtgaataaaagatcctgtgtttcataacgaacggcacgaattgaaaagggcagcgacgagtttcctgtactgcacgacgccatggctgccctgcccctcacatgtcgatagcacgtggaaaacgatgggcacgtgttcgagccacccgcaagtcgcgccgtggctgtttccatcatgcatgaattattagtactagcactagcaggaacacaacaaatctattttccacatgcttgatagcgactggtccgagtcctacgccgtcgccgggcacaaactgcacgtgctcggctatctcgcatatgattagtgtgtgtgggttggatcggatgcgagtgactgattggcatttttagcatcgataatattttactatttttggatgaaaaaaaagagacttacaatcctgtggttttctttgccaggtggattcggaccagacgaatcgtatccagatcaagcacatgatcgaggccgctctcgcccagctagatgatgcctccgcgagcccgccgagcgtgatgagctactattagaatcggacaaccgtcacgctgacatgcacgagccggcctagctactgtggccgaccggtactgttccgtgcgcgtatataggaactaggaagaagtgggtgctttgtttgctatatatgaggcactaggtcagggggttttgtgatggggctttatgcaactttgatgtaatggaccgaaaacgacagattgagtgttggcggctagctcccatatgtttagagtctagggaaggaataaataatcgagacaagtcttatccctgtatttttgtagagaggtatttgaaacaagaagttcatcaaatacaagggaaaaatgtcatggcgacaaatatgttagaaatctatggagttctatgtttaatttaatctgaaaatagcataatatgtgacgacacacatgtgtatgtatatacttactagtac

SEQ ID NO: 13771 - DNA, 960 bp, Zea Mays
cccaggtccagtccgtccgtccgtcggcattgcatcgcattgccagagggatcgacggcagatggacaaggcgtcgatcatcaaggacgcgatcgagtacatcgagcagctacaggcggaggagcggcgggcgctgcaggcgctcgaggccggcgagggggcgcgctgcggcggccacgggcacggcgaggaggcgcgcgtggtcctgcagcagcccgccgccgccccggcgcccgtggaggtcctggagctgcgcgtgtcggaggtgggcgaccgcgtgctggtggtgaacgtgacgtgcagcaagggccgcgacgccatggcccgcgtgtgccgcgccgtcgaggagctccggctccgcgtcatcaccgccagcgtcacctccgtcgccggctgcctcatgcacaccatcttcgtcgaggtggattcggaccagacgaatcgtatccagatcaagcacatgatcgaggccgctctcgcccagctagatgatgcctccgcgagcccgccgagcgtgatgagctactattagaatcggacaaccgtcacgctgacatgcacgagccggcctagctactgtggccgaccggtactgttccgtgcgcgtatataggaactaggaagaagtgggtgctttgtttgctatatatgaggcactaggtcagggggttttgtgatggggctttatgcaactttgatgtaatggaccgaaaacgacagattgagtgttggcggctagctcccatatgtttagagtctagggaaggaataaataatcgagacaagtcttatccctgtatttttgtagagaggtatttgaaacaagaagttcatcaaatacaagggaaaaatgtcatggcgacaaatatgttagaaatctatggagttctatgtttaatttaatctgaaaatagcataatatgtgacgacacacatgtgtatgtatatacttactagtac

SEQ ID NO: 13772 - DNA, 1842 bp, Zea Mays
aacccccccgcgcgcttgtctccttcccccggccatctccggcaccggatttttcgtcgccgccttgtcctggccccttccgcgaagacccattcccacacaccctttatgccaacttgccgcccccgcggattcgcgcgcaccgcggtcggtgtctaggcttgattggccctggcccaggagcacggcgaaaggcggcgtcttggtgtgaagcggccgcgctggattggttgccgccggtggtgctgatcgttgggcgtgtttgagagcgcgccgaaggctctgccttgtggggagcggtcgacaggttagggataggcggggggagtggggtcgtcgtgaaggaggcagcagcggttcgcgtggatcgaggaagggattttattgcgttgggatttggtaggtggtggcgctgctcttgccgttcttggcatgagcgttggagatggggacggactactacaatgtgctcaaggtgaaccggaacgccacggaggaggacctcaagaagtcgtaccgccggctggccatgaggtggcaccccgacaagaaccctggcgacgtcaagaaggaagccgaggccaaattcaagaagatctccgaggcctacgaggttctgagtgatccgcagaagagggcggcgtacgatcagtacggcgaggaaggcctgaaggcctccgcagacggcggtggtggtggtggtggttccacgtccacgaacggggccgccaaccaacgcttcaaccctcgcaacgccgaagacgtgttcgccgagttctttggcagcaacaagccgttcgagaacatggggcgagccaagtcaatgaggttccagacagaaggcgctggcaccttcggtgggttcggtgggaacgagagcaagttcagaccatacaacaacgattcggccggcaccggctccagtcaggctcggaagccgccgcccgtggagaccaaactgccctgcacgctcgaagagctgtacgcaggctcagcacgcaagatgaagatctccaggaacgttgtgaagccgaatgggcaactagggaccgaatcggagattctaacgatcgatataaagcccggctggaagaaggggaccaagatcacgttcccggacaagggcaacgagcagccgaaccaactccccgccgacctcgtcttcgtcatcgacgagaaaccccatgacctgtacacgagagagggcaacgacctcctggtccaccggaagatcgatctggtggacgcgttggcaggaacgacggtcagcctgaagacgctcgacgggcgtgacctggtgattaggctcacggacgtggtgacacctgggtacgagcttgtggtcgccaaggaggggatgcctatcgtcaaggagaacgggaggagaggcaacctgaggatcaagttcgacgtcggtttccctaagaggttgtcgtcggagcagcggcacaccattcggaaggttcttggaggccagcctcagcagcagtgagcacaggcgttcgaaacaagattgtctgccccttattggctacccatgcaatgcagatttgcagactagttcagatgttcttctctttcttcggctggcttgtactgtatgtttagttgttttttcctttgtggtgttttctgatcttcttctcccttgttggaaaaaatggtggtattgaagaccacaggtgtaatacaagaatgctgtctttgtgtcttcatttacatgtttcagatatcgtttggttcacatatttgtaagtaacagataacattagatcatgtttgtttagctctaatcgtaatgagatgccacactagaaattaataccaacatatttaaacttg

SEQ ID NO: 13773 - DNA, 1074 bp, Zea Mays
ttctctctctctcttttgccgttccacttgcgccggtcgttatattcccgcgtccaccaaaaccgttgccgccctttttgtttttcgtcgccacggagcaggatcgagcgcgagcgacgcagatgaaggcagcagaggacgcggcgggcccggaggcgacgccgacggcggcggcgcagacggtctggtacgaccccatgtcatcgccgcaggcgccggcgccgcagcagcagccggcgatagaggctgcggcgccgacctcgccgtcggtgagctccgaggcgcggcctctcagggtgtacgccgacggcatctacgatctcttccacttcggccacgcgcgcgcgctcgagcaggctaagaagtcatttcccaacacctacttgctggtaggttgctgcagcgatgagatcacccacatgtacaaagggaagaccgtcatgaccgaggacgagcgctacgaatcgcttcggcattgcaagtgaaatccattgggaagttcaaggagacgaagcgcaccgagggcatctcgacgtcggacatcatcatgaggatcttgaaggactacaaccagtacatcatgcggaacctgaccaggggctacagccgcaaagacctcggagtcagctacgttaaggagaagcagctgagggtcaacatggggatcagcaagctgagggagaaggtgaaggagcaccaagagaagttccacagcgcggccaagattgctggaaccaaccccgtggagtggatggagaatgccgaccgttggatcgtcgggttcctcgagaagttcgaggaaggatgccacatgatggaaaccgccattaaaggtcgaattcaggagggtctgaagaggcaaggcaggtcagagtcgaacctttccggagaggactccgactcgtaataatggtctgtagtatccaaatcaaactagacggaagcaggactggaggtcatactcgcgcagtctgtgtaacagtgtgagattgattagcatgtttttgtaggagatcaggaaccataccaggagattatgtactgatgttaagaacaatcgtatttatgcatgca

SEQ ID NO: 13774 - DNA, 2241 bp, Zea Mays
gttccatcttcatctcccctccccacatacccctgctgccgcacccgcacgcacgcacacaacagcagcacagcgtctcttcctcctcccaaaacctctctcctctccctttctctgtctctgagcgtgtgtctgtctgtcagtgagtaataaatggcagcgagcagcgtgcgtggctgaaggctgctgagcagagcagggcgagcgctcgctagtcggctagtgctgtgctgtgctgtgctgtgcagcggttgctcctcctggtcctgctactgctccgctctcctcgtcgcttgctcgtcttttttccacactgagatggcgccgatcagctgcccggtggagtgagctggtttctttgtttttttattattagggcggatttctttctcgcaaggagcaggaggaggaggagggggaaaggtttgtccgtttcttgcgagagcccgttgcagagatccagccaggcagcaggattcaagaacctgacctttttgtgctctactccccgagagattttcacccaaagtttggtccttggagccgattcgatccctggaaacaaccaagtgaaggtgccgcaaatccgttgtgactgcacaaaatcccaaaacgcctctgccacctatctatttgatcgttgggaacctagctccatccatctgagccaagaaagcagcagccgcagggcggaggggaggggagaggataggagagggcgtcctcttccgagcagcccgcattgccgcctgtcgatgagtgagcgctgcctccgatgccgtcggggtgctcggtgtccagtctcgcggcgcggttcgccttcttcccgccggagccggcgacgtacgccgtccggaaggacgaggccacgggccgcctcgtcgcctccggcgtgccgcgggacaacgccatggacgtcctgctcgtcgacaccagcagggggaacaaggtggtggccttctacttccggaacccctgcgcgcgcctcaccctgctctactcgcacggcaacgctgccgacctcggccagctgtacgacctctttgtgcagctcaaggtcaatctcaagatcaacctgatgggatatgactattctggctatggtgcatctactggcaaggtccacctgcaggcttcatggatgtccaaactatccatctcactgctgtggcatgatatgcagccaagtgaagagaatacatatgcagacattgaagcagtgtaccaatgcttagaaactgagtatgggatcagccaggaagacattatcttgtacggacaatctgtcggcagtggaccaacattacatttagcctctcgtttgcctagattgcgtggggtggttctccacagcgctatactgtcaggcctccgtgtggtttgccatgtgaactttactttctgctttgacatttacaaaaatgtcaagaaaataaaaaaggtcaaatgcccagtgctcgttattcatgggacggacgacgacgtggtggactggtcgcacgggaaggagctgtggaggctggcgagggagcctcacgacccgctctggatcaagggcggcgggcactgcaacctggagctgtacccggacttcatccgccacctgtcgcggttcgtccgcgagatggagaccgtgacgacgaaggcccggctgaggaagatccggccggccctccaccagctccgcaagaaggcggcgcaccgggcaagcacggcggcgacgacgaccaccaccaccaccttcaccgccaactgctgctgccgcgtccgcgtccgcaagccgacctgccccagctgcggctccttcggctgtggctgctgcgggccgcttaggagctgcctcgcgctccggtttcccaggtgctgccggcctcctgctgcctgcttcacctgcggcggctgctgttggtcatgcaggtgcaggagctgcttcaagtgctgctgctgctgatgatgatgttgagacgtgcgtcaatgagtgccgcccgccgatcgatccctgcgcgcgcgcgcgcgcgtatggtatagtgaagaggaatgacagtggtcatgggatccctgctaacaaaccctttaaacgccgtagactataaaaaaaacctagatttgagctggtggctgctgaacgttgtattaacagatcccaggactccccgccgtttgtggttcctctcgttgtagttgcttgtcagattggtgattcgtctcattattaatccgtctgatgtttgtggagtctag

SEQ ID NO: 13775 - DNA, 2055 bp, Zea Mays
gttccatcttcatctcccctccccacatacccctgctgccgcacccgcacgcacgcacacaacagcagcacagcgtctcttcctcctcccaaaacctctctcctctccctttctctgtctctgagcgtgtgtctgtctgtcagtgagtaataaatggcagcgagcagcgtgcgtggctgaaggctgctgagcagagcagggcgagcgctcgctagtcggctagtgctgtgctgtgctgtgctgtgcagcggttgctcctcctggtcctgctactgctccgctctcctcgtcgcttgctcgtcttttttccacactgggcggatttctttctcgcaaggagcaggaggaggaggagggggaaaggtttgtccgtttcttgcgagagcccgttgcagagatccagccaggcagcaggattcaagaacctgacctttttgtgctctactccccgagagattttcacccaaagtttggtccttggagccgattcgatccctggaaacaaccaagtgaaggtgccgcaaatccgttgtgactgcacaaaatcccaaaacgcctctgccacctatctatttgatcgttgggaacctagctccatccatctgagccaagaaagcagcagccgcagggcggaggggaggggagaggataggagagggcgtcctcttccgagcagcccgcattgccgcctgtcgatgagtgagcgctgcctccgatgccgtcggggtgctcggtgtccagtctcgcggcgcggttcgccttcttcccgccggagccggcgacgtacgccgtccggaaggacgaggccacgggccgcctcgtcgcctccggcgtgccgcgggacaacgccatggacgtcctgctcgtcgacaccagcagggggaacaaggtggtggccttctacttccggaacccctgcgcgcgcctcaccctgctctactcgcacggcaacgctgccgacctcggccagctgtacgacctctttgtgcagctcaaggtcaatctcaagatcaacctgatgggatatgactattctggctatggtgcatctactggcaagccaagtgaagagaatacatatgcagacattgaagcagtgtaccaatgcttagaaactgagtatgggatcagccaggaagacattatcttgtacggacaatctgtcggcagtggaccaacattacatttagcctctcgtttgcctagattgcgtggggtggttctccacagcgctatactgtcaggcctccgtgtggtttgccatgtgaactttactttctgctttgacatttacaaaaatgtcaagaaaataaaaaaggtcaaatgcccagtgctcgttattcatgggacggacgacgacgtggtggactggtcgcacgggaaggagctgtggaggctggcgagggagcctcacgacccgctctggatcaagggcggcgggcactgcaacctggagctgtacccggacttcatccgccacctgtcgcggttcgtccgcgagatggagaccgtgacgacgaaggcccggctgaggaagatccggccggccctccaccagctccgcaagaaggcggcgcaccgggcaagcacggcggcgacgacgaccaccaccaccaccttcaccgccaactgctgctgccgcgtccgcgtccgcaagccgacctgccccagctgcggctccttcggctgtggctgctgcgggccgcttaggagctgcctcgcgctccggtttcccaggagctgcttcaagtgctgctgctgctgatgatgatgttgagacgtgcgtcaatgagtgccgcccgccgatcgatccctgcgcgcgcgcgcgcgcgtatggtatagtgaagaggaatgacagtggtcatgggatccctgctaacaaaccctttaaacgccgtagactataaaaaaaacctagatttgagctggtggctgctgaacgttgtattaacagatcccaggactccccgccgtttgtggttcctctcgttgtagttgcttgtcagattggtgattcgtctcattattaatccgtctgatgtttgtggagtctag

SEQ ID NO: 13776 - DNA, 2082 bp, Zea Mays
catctcccctccccacatacccctgctgccgcacccgcacgcacgcacacaacagcagcacagcgtctcttcctcctcccaaaacctctctcctctccctttctctgtctctgagcgtgtgtctgtctgtcagtgagtaataaatggcagcgagcagcgtgcgtggctgaaggctgctgagcagagcagggcgagcgctcgctagtcggctagtgctgtgctgtgctgtgctgtgcagcggttgctcctcctggtcctgctactgctccgctctcctcgtcgcttgctcgtcttttttccacactgggcggatttctttctcgcaaggagcaggaggaggaggagggggaaaggtttgtccgtttcttgcgagagcccgttgcagagatccagccaggcagcaggattcaagaacctgacctttttgtgctctactccccgagagattttcacccaaagtttggtccttggagccgattcgatccctggaaacaaccaagtgaaggtgccgcaaatccgttgtgactgcacaaaatcccaaaacgcctctgccacctatctatttgatcgttgggaacctagctccatccatctgagccaagaaagcagcagccgcagggcggaggggaggggagaggataggagagggcgtcctcttccgagcagcccgcattgccgcctgtcgatgagtgagcgctgcctccgatgccgtcggggtgctcggtgtccagtctcgcggcgcggttcgccttcttcccgccggagccggcgacgtacgccgtccggaaggacgaggccacgggccgcctcgtcgcctccggcgtgccgcgggacaacgccatggacgtcctgctcgtcgacaccagcagggggaacaaggtggtggccttctacttccggaacccctgcgcgcgcctcaccctgctctactcgcacggcaacgctgccgacctcggccagctgtacgacctctttgtgcagctcaagatatgactattctggctatggtgcatctactggcaagccaagtgaagagaatacatatgcagacattgaagcagtgtaccaatgcttagaaactgagtatgggatcagccaggaagacattatcttgtacggacaatctgtcggcagtggaccaacattacatttagcctctcgtttgcctagattgcgtggggtggttctccacagcgctatactgtcaggcctccgtgtggtttgccatgtgaactttactttctgctttgacatttacaaaaatgtcaagaaaataaaaaaggtcaaatgcccagtgctcgttattcatgggacggacgacgacgtggtggactggtcgcacgggaaggagctgtggaggctggcgagggagcctcacgacccgctctggatcaagggcggcgggcactgcaacctggagctgtacccggacttcatccgccacctgtcgcggttcgtccgcgagatggagaccgtgacgacgaaggcccggctgaggaagatccggccggccctccaccagctccgcaagaaggcggcgcaccgggcaagcacggcggcgacgacgaccaccaccaccaccttcaccgccaactgctgctgccgcgtccgcgtccgcaagccgacctgccccagctgcggctccttcggctgtggctgctgcgggccgcttaggagctgcctcgcgctccggtttcccaggtgctgccggcctcctgctgcctgcttcacctgcggcggctgctgttggtcatgcaggtgcaggagctgcttcaagtgctgctgctgctgatgatgatgttgagacgtgcgtcaatgagtgccgcccgccgatcgatccctgcgcgcgcgcgcgcgcgtatggtatagtgaagaggaatgacagtggtcatgggatccctgctaacaaaccctttaaacgccgtagactataaaaaaaacctagatttgagctggtggctgctgaacgttgtattaacagatcccaggactccccgccgtttgtggttcctctcgttgtagttgcttgtcagattggtgattcgtctcattattaatccgtctgatgtttgtggagtctag

SEQ ID NO: 13777 - DNA, 3319 bp, Zea Mays
cacactgattattaccatataaatcgtcgagggaggccgggctttgccttccagaactcaccaccaccaccacgcacacacacacacgacacgcgcatagggacacggactcgacagagctgtgttagtgagtagatacctacagctacagagtggtagcaaaagagagagagggacgtgtgcagacgcgtacaaaaaaatacagagggaactgagctaagctagccagccccgaccgacactcggctggtgaattccggcccataatttctatatatcgcgttcccgtccctcccccccacgtacttcactcgacacctcccgcgccaccttcttctcttctcccctccctccctccctcccccccgctcctcctctgtcttccactcatcctcacacaacctagaagagcagacgaggcagctagcttcaggttcttggtctccgttgatcctctcctcccacccagaccctgctcggcctcttctctcttgccgagagagagagagagagagagagagagagatacaggggagccagctacctccggccgccgccaggcaggcagagagggagggcgcgcccggcattatggcggcggggcagcagcaggcgagcggcggcgccaagcacgggtgcgtgtgcgggttccccgtgtgcgcgtgcgccggcgccgcggcggtggcgtccgccgcgtcctccgccgacatggaccgcgtggccgtggccgccaccgagggccagatcggcgccgtcaacgacgagagctggatcgccgtcgacctcagcgacgacggcctgtccgccgacggcgccgacccgggcgtcgcgctcgaggaccgccccgtcttccgcaccgagaagatcaagggcgtcctcctccacccctacaggtgcttctgaaccacccgagccacagccgtcagctcggcccgccggcgagcgcggacaacccgctggacttgagcatggtggacgtgcggctcccgatgctggtgtacgtgtcccgcgagaagcggcccgggcacaaccaccagaagaaggccggcgccatgaacgcgctgacccggtgctccgcggtgctgtccaactcgcccttcatcctcaacctggactgcgaccactacatcaacaactcgcaggcgctgcgcgcgggcatctgcttcatgctcggccgcgacagcgacacggtggccttcgtgcagttcccgcagcgcttcgagggcgtggaccccacggacctgtacgccaaccacaaccgcatcttcttcgacggcacgctcagggcgctggacggcatgcagggccccatctacgtgggcacgggctgcctgttccgccgcatcacgctctacggcttcctgcccatgcccaagaagtcgtacggcaagtcggacgcgttcgcggacaccatcccgatggcgtcgcacccgtcgccgttcgcggccgcctcggccgcctccgtcgtggcggacgaggcgaccatcgccgaggccgtggcggtgtgcgcggcggcgtacgagaagaagaccgggtggggcagcgacatcgggtgggtgtacggcacggtgacggaggacgtggtgacggggtaccggatgcacatcaaggggtggcggtcccgctactgctccatctacccgcacgccttcatcggcaccgcccccatcaacctgacggagcggctgttccaggtgctccgctggtcgacgggttccctggagatcttcttctcccggaacaacccgctgttcgggagcacgttcctgcacccgctgcagcgcgtggcgtacatcaacatcacgacgtacccgttcacggccatcttcctcatcttctacacgacggtgccggcgctgtcgttcgtgacggggcacttcatcgtgcagcggcccaccaccatgttctacgtgtacctggccatcgtgctgggcacgctgctgatcctggccgtcctggaggtgaagtgggcgggcgtgacggtgttcgagtggttcaggaacgggcagttctggatgacggccagctgctccgcgtacctggccgcggtgtgccaggtgctggtgaaggtggtgttcaggcgggacatctcgttcaagctgacgtcgaagcagcccgcgggggacgagaagaaggacccctacgcagacctgtacgtggtgcgctggacctggctcatggtgacgcccatcatcatcatcctcgtcaacatcatcggctccgccgtggccttcgccaaggtgctggacggcgagtggacgcactggctcaaggtggccggcggcgtcttcttcaacttctgggtgctcttccacctctaccctttcgccaagggcatcctggggaggcacggcaagacccccgtggtggtgctcgtctggtgggccttcaccttcgtcatcaccgccgtgctgtacatcaacatcccccacatccacgggccaggcggcaagcacggcggcgcgatcggaaggcacggcggcgacgcacaccaccatggcaagaagttcgacggctactacctctggccgtgaagcgccgagcagccagcatcgtcatgcatgcacatataccgcctgccctgatggtgacgatggtgagccgccaaggtgaagactgaagagtacgttcccgttcatccatccatcgtctccttagtactgctgcccggtgattagtcgatgaagagtgaaggtgaaggctacccacacacacacatttggtcgacgtacccgccaaaatttgaattttttttcttcccccttcttccttctcattcttttttcttttagttttgtccagaaatcgaaaggtgtgttgatttgatttagtttttttaattaccgtgccccgtggtaattaattatgtacgtacttatatatatatacattacgccgaagaggaaggagcactttgtataagagaggaatggggaacgtacttatgggtggggggccggggtgtcagcgtctgcctgtctgtactgtacatggcttagaggagtcacatgcagagagggagggccctggctttggggtggtattcttttggtacatggatcaagaataaattgaatttcattcttgttgtttggaaaagaggtgtacaccctcctccctcctggactctggttcctgtggagagtatgtatctttattattactgatgtaccacctgtgtgttgtcggtactgtaattggatagtaagtactacactgatctgctggtctaatcaatgttgttgttttatatggataataataatgattagtaagtcaatggtgaacatgagcttgctgtccattactccattgcgtg

SEQ ID NO: 13778 - DNA, 3359 bp, Zea Mays
acggccggacccctccaattattgcacgacccaacatcggtgctgatcttcgtccggctgatcgcgttcacgctgttcgtaatctggcgcatctcgcaccgcaacccggacgcgctgtggctgtgggtgacgtcgatcgcgggcgagttctggttcggcttctcgtggctgctggaccagctgccgaagctgaacccgatcaaccgcgtgccggacctggcggcgctgcggcagcggttcgaccgcgcgggcgggggcgccggcggagggacgtcgctgctgccggggctggacgtgttcgtgacgacggcggacccgttcaaggagccgatcctgagcacggccaactccgtgctgtccatcctggccgccgactaccccgtggagcgcaacacgtgctacctctccgacgactccgggatgctgctcacctacgaggccatggcggaggccgccaagttcgccaccgtctgggtgcccttctgccgcaagcacggcatcgagccgcgcggccccgagagctacttcgacctcaagtcccacccttacatgggccgctcccaggaggacttcgtcaacgaccgccgccgcgtgcgcaaggactacgacgagttcaaggcgcgcatcaacggcctcgaccacgacatcaagcagaggtccgacgcgtacaacgccgccagggggctcaaggacggcgagcccagggcaacctggatggccgacggcacccagtgggagggcacatgggttgagccctccgagaaccaccgcaagggagaccacgccggcatcgtactggtgcttctgaaccacccgagccacagccgtcagctcggcccgccggcgagcgcggacaacccgctggacttgagcatggtggacgtgcggctcccgatgctggtgtacgtgtcccgcgagaagcggcccgggcacaaccaccagaagaaggccggcgccatgaacgcgctgacccggtgctccgcggtgctgtccaactcgcccttcatcctcaacctggactgcgaccactacatcaacaactcgcaggcgctgcgcgcgggcatctgcttcatgctcggccgcgacagcgacacggtggccttcgtgcagttcccgcagcgcttcgagggcgtggaccccacggacctgtacgccaaccacaaccgcatcttcttcgacggcacgctcagggcgctggacggcatgcagggccccatctacgtgggcacgggctgcctgttccgccgcatcacgctctacggcttcgacccgccgcggatcaacgtgggcgggccgtgcttcccggcgctgggcggcatgttcgccaaggccaagtacgagaagcccgggctggagctcaccaccaccaaggccgccgtggccaagggcaagcacggcttcctgcccatgcccaagaagtcgtacggcaagtcggacgcgttcgcggacaccatcccgatggcgtcgcacccgtcgccgttcgcggccgcctcggccgcctccgtcgtggcggacgaggcgaccatcgccgaggccgtggcggtgtgcgcggcggcgtacgagaagaagaccgggtggggcagcgacatcgggtgggtgtacggcacggtgacggaggacgtggtgacggggtaccggatgcacatcaaggggtggcggtcccgctactgctccatctacccgcacgccttcatcggcaccgcccccatcaacctgacggagcggctgttccaggtgctccgctggtcgacgggttccctggagatcttcttctcccggaacaacccgctgttcgggagcacgttcctgcacccgctgcagcgcgtggcgtacatcaacatcacgacgtacccgttcacggccatcttcctcatcttctacacgacggtgccggcgctgtcgttcgtgacggggcacttcatcgtgcagcggcccaccaccatgttctacgtgtacctggccatcgtgctgggcacgctgctgatcctggccgtcctggaggtgaagtgggcgggcgtgacggtgttcgagtggttcaggaacgggcagttctggatgacggccagctgctccgcgtacctggccgcggtgtgccaggtgctggtgaaggtggtgttcaggcgggacatctcgttcaagctgacgtcgaagcagcccgcgggggacgagaagaaggacccctacgcagacctgtacgtggtgcgctggacctggctcatggtgacgcccatcatcatcatcctcgtcaacatcatcggctccgccgtggccttcgccaaggtgctggacggcgagtggacgcactggctcaaggtggccggcggcgtcttcttcaacttctgggtgctcttccacctctaccctttcgccaagggcatcctggggaggcacggcaagacccccgtggtggtgctcgtctggtgggccttcaccttcgtcatcaccgccgtgctgtacatcaacatcccccacatccacgggccaggcggcaagcacggcggcgcgatcggaaggcacggcggcgacgcacaccaccatggcaagaagttcgacggctactacctctggccgtgaagcgccgagcagccagcatcgtcatgcatgcacatataccgcctgccctgatggtgacgatggtgagccgccaaggtgaagactgaagagtacgttcccgttcatccatccatcgtctccttagtactgctgcccggtgattagtcgatgaagagtgaaggtgaaggctacccacacacacacatttggtcgacgtacccgccaaaatttgaattttttttcttcccccttcttccttctcattcttttttcttttagttttgtccagaaatcgaaaggtgtgttgatttgatttagtttttttaattaccgtgccccgtggtaattaattatgtacgtacttatatatatatacattacgccgaagaggaaggagcactttgtataagagaggaatggggaacgtacttatgggtggggggccggggtgtcagcgtctgcctgtctgtactgtacatggcttagaggagtcacatgcagagagggagggccctggctttggggtggtattcttttggtacatggatcaagaataaattgaatttcattcttgttgtttggaaaagaggtgtacaccctcctccctcctggactctggttcctgtggagagtatgtatctttattattactgatgtaccacctgtgtgttgtcggtactgtaattggatagtaagtactacactgatctgctggtctaatcaatgttgttgttttatatggataataataatgattagtaagtcaatggtgaacatgagcttgctgtccattactccattgcgtg

SEQ ID NO: 13779 - DNA, 4364 bp, Zea Mays
ccaaactagcaaaagagtaataaagcagcacccaagaccttcacgaaacccactccgagctttcacgatacaatcacgcaatatttgtcgctgagaaattctcaactctggaagaaaaaaaatcgcagcacggaaaaagagagtccccctccccaccaccacatcccggtctagggtttgcgccatcccgaaccatccgctcgccgccggccgctgctgccgccatgggctccggtgacgacgagcgctccacctccaagcaccatcaccgcgataaggacaaggaccgtgaccgctcctcgtctcgccaccatcgcgacaaggaccgggaccgcgagcgctcctcgcggcaccaccgcgacgatggcgaccgggaccgggaccgccatcaccgggacaaggaccgggatcgagaggagcggaaggagagggagcgggaggagcgtaaagcacgggagcgggaggagcggaaggcacgggagcgggaggagcgggaggagcgggacagggagaaggagaaggagaaagagaaggagcgggcgcggcggcgcgaggagagggaccgcgaggagcgggagagttccaggcggcgcggggatgcggatggagaggaggacgacgaccgggaccgcaagcggcgccgccggtcctcgcaccaccaccaccgggacccagagccggagccggagcctgcatcccgggaagaggaggaggtggacgccgaggaggctgagcgccggcgccagcggaagaaggaggaggacatggaggccgagcagcagcgcctcgacgacgagatggagcgccggcgccggcgcgtcaaggagtggcaggagaagcgccgcgagcagcagcagcaggacggcagtgttgccagtggcgcttctgctgctgtggcggccgaggctgatggcgccaaagcggggaagaagtggaccttggatggcgaggagtctgacgaggaagaggacaaggaggacggcaagaaggctgaggggaatggtggtgctggtgacatggacgtgggtttgcccagtggaaatggtgatgccaacggtggtgctgagatggaggaggacgaaattgatccgctcgatgccttcatgaattccatggtgctgccagaggttgccaagctggagagtgctgcagtagcaatggatacagcccctgctgcaggtgcagatggcaagaatggtaagagctcaaaggatgtcattagtaatggggataagaaagggtcaaggaaagctacggggagaattatgcaaggggatgattcagactcggactacgatgatgctgatgatgatggggctggagaggatgatgaggatgatgaggaattcataaagcgtgtcaagaagacgaaggctgagaagttggcgatcgttgaccattcgaagattgactaccaaccgttccggaagaatttctatattgaggtgaaggacatcaccaagatgacatccgaggaagtggtagactaccggaagcacttggagctcaaggtgcatgggaaagatgtgcccaagccaataaagacatgggtgcagagtgggctgacaagcaaactccttgataccatcaagaagcttggttttgagaaaccgatgcctatacagacacaggctttgccgatcataatgagtggtcgtgattgtataggcatcgcaaaaactggatctggcaagactctagcatttgtcctcccaatgctgaggcatgttaaagatcagccccctgttgtccctggagatggccctattgggcttattatggctcctactagagagcttgtggtccagatacattcagacatcaagaagttctctaaggtgcttggcatcaactgtgttgcaatctatggtggttcgggagttgcacagcagatcagcgaattgaagaggggtgccgaaattgttgtttgtacaccgggaaggatgatcgatatcctttgcactagcagtggaaaaataactaaccttcgcagagtgactttcttggtgatggatgaagctgatagaatgtttgacatgggttttgagcctcagattactcgtatagttcagaatacccggccagatcggcagacagtacttttctctgccacatttccacggcaggtggagatactggcacgcaaggtgcttaccaagcctgttgaaattcaggtgggtgggaggagtgtcgtgaacaaagatatcacacaactggttgaggtccgaccagacaccgagaggttcttcaggctattagagttgcttggtgaatggtatgttaaggggaaaatccttgtttttgttcactcacaagataagtgtgattctctactcaaagacttgttccagcatgggtatccatgtctgtcccttcatggtggcaaagatcagactgaccgcgaatcaactattgctgatttcaagagcaacgtgtgcagcttgctgattgctactagtgttgctgctagaggattagatgttaaagaacttgaactggttgtcaattatgatgtccctaaccattatgaggactatgttcatcgtgttggtagaacaggtcgtgctggtagaaagggctttgccgttacttttatttctgatgaggatgagcgctatgcaacagaccttgttaaggctctggagctctctgagcaggctgttccacaggacctaaaagccctggctgatagatttatggctaaggtgaaacagggaactgagcaggcccatggcacaggctatggtggtagtggttttaagtttaacgaggaagaggatgaagcacggaagaccgcgaagaaggctcaggcaagggaatatggatatgaggaggacaagtcagattcagattctgatgatgaagggggagtgcgtaaggcaggaggtgatctggcagcacaagctattgccaatgctcatgcagctgctgctttggttgcaaacaaggctgctaataatgcaaatcagcaaataccaggatctgcaacagcccccttgattcctttactcacagcatcaaaccaacaaaatgatgaggccactgctcgggcacttcaggctgcaatgaacttgcaacaaaatctggcaaggatacaggcccatgcagttccagaacactatgaggctgaacttgagattaatgatttcccacagaatgcccgttggagaatcactcacaaagagacactggcccctattcaggactggactggtgctgctatcactacgaggggaacatatattcctcaaggaaaaattgttggtgcaaatgagcgcaagctttacctgtttatcgagggcccgacagagtcttctgtgaagaaggcgaaagcagaattaaaacgtgtccttgaggattgtgcaaaccaggctctaaatcttcctggatctgctcaaactggaaaatattctgttatttgagttgcagagtagataacaaagtggccgagtatttttttaggagcttataatggtttgcacacttcaaagccgctgatggattgctacttctgatgctcttgctgtctccagccttttattttgtctgatactcttttataagaagacttagaacacaggcggtgaccgagtgctgtaatgcaaaggaaggcggccagttttctggtgtacgtattgatttgcctattcggaagctgagaagctatagctttctctgttgatgcactattgttactgttgcaagcggagggcatcttataggggtgttgcttaggaaaaatagatgaaactggtaagatttggctcgatttgctgagacttgagaaaatgtgaatgatcatggagcaattttacctttctatcggtctatcttaggttatctccaataatttactcattctctaaattgcctaatgtgcttgcgctcttaatggtgtatgaaatgctatatatgcctggggccctaatattatctatgaacagtgtttgccctaatgtttcgtcgcttcgtctcatcttccctgaaaagtgtgcctgttatactacccatacttcttttggcgcagataaaaataacagatgaaatcggtaaagattcttttttcttgaacccgaggaagtatggatgatgctgcgtgcatgaacaagattgtgaaattgcatgcctgaattctggcgagtgatgattcatctatgtttccggtcatcctgataagcttgcgcagtatcgtctccgcggttatggtgtccagatttttgagttcaattcatggtgtcaacaaatagcacggcagtttacattggaataaatttcttgagtcaaatcagaaagctgcgcaaaaaacgagaggatatacttcacgcacaactcaaatcatttgtaaatgagttgcactagaaaat

SEQ ID NO: 13780 - DNA, 4027 bp, Zea Mays
caagaccttcacgaaacccactccgagctttcacgatacaatcacgcaatatttgtcgctgagaaattctcaactctggaagaaaaaaaatcgcagcacggaaaaagagagtccccctccccaccaccacatcccggtctagggtttgcgccatcccgaaccatccgctcgccgccggccgctgctgccgccatgggctccggtgacgacgagcgctccacctccaagcaccatcaccgcgataaggacaaggaccgtgaccgctcctcgtctcgccaccatcgcgacaaggaccgggaccgcgagcgctcctcgcggcaccaccgcgacgatggcgaccgggaccgggaccgccatcaccgggacaaggaccgggatcgagaggagcggaaggagagggagcgggaggagcgtaaagcacgggagcgggaggagcggaaggcacgggagcgggaggagcgggaggagcgggacagggagaaggagaaggagaaagagaaggagcgggcgcggcggcgcgaggagagggaccgcgaggagcgggagagttccaggcggcgcggggatgcggatggagaggaggacgacgaccgggaccgcaagcggcgccgccggtcctcgcaccaccaccaccgggacccagagccggagccggagcctgcatcccgggaagaggaggaggtggacgccgaggaggctgagcgccggcgccagcggaagaaggaggaggacatggaggccgagcagcagcgcctcgacgacgagatggagcgccggcgccggcgcgtcaaggagtggcaggagaagcgccgcgagcagcagcagcaggacggcagtgttgccagtggcgcttctgctgctgtggcggccgaggctgatggcgccaaagcggggaagaagtggaccttggatggcgaggagtctgacgaggaagaggacaaggaggacggcaagaaggctgaggggaatggtggtgctggtgacatggacgtgggtttgcccagtggaaatggtgatgccaacggtggtgctgagatggaggaggacgaaattgatccgctcgatgccttcatgaattccatggtgctgccagaggttgccaagctggagagtgctgcagtagcaatggatacagcccctgctgcaggtgcagatggcaagaatggtaagagctcaaaggatgtcattagtaatggggataagaaagggtcaaggaaagctacggggagaattatgcaaggggatgattcagactcggactacgatgatgctgatgatgatggggctggagaggatgatgaggatgatgaggaattcataaagcgtgtcaagaagacgaaggctgagaagttggcgatcgttgaccattcgaagattgactaccaaccgttccggaagaatttctatattgaggtgaaggacatcaccaagatgacatccgaggaagtggtagactaccggaagcacttggagctcaaggtgcatgggaaagatgtgcccaagccaataaagacatgggtgcagagtgggctgacaagcaaactccttgataccatcaagaagcttggttttgagaaaccgatgcctatacagacacaggctttgccgatcataatgagtggtcgtgattgtataggcatcgcaaaaactggatctggcaagactctagcatttgtcctcccaatgctgaggcatgttaaagatcagccccctgttgtccctggagatggccctattgggcttattatggctcctactagagagcttgtggtccagatacattcagacatcaagaagttctctaaggtgcttggcatcaactgtgttgcaatctatggtggttcgggagttgcacagcagatcagcgaattgaagaggggtgccgaaattgttgtttgtacaccgggaaggatgatcgatatcctttgcactagcagtggaaaaataactaaccttcgcagagtgactttcttggtgatggatgaagctgatagaatgtttgacatgggttttgagcctcagattactcgtatagttcagaatacccggccagatcggcagacagtacttttctctgccacatttccacggcaggtggagatactggcacgcaaggtgcttaccaagcctgttgaaattcaggtgggtgggaggagtgtcgtgaacaaagatatcacacaactggttgaggtccgaccagacaccgagaggttcttcaggctattagagttgcttggtgaatggtatgttaaggggaaaatccttgtttttgttcactcacaagataagtgtgattctctactcaaagacttgttccagcatgggtatccatgtctgtcccttcatggtggcaaagatcagactgaccgcgaatcaactattgctgatttcaagagcaacgtgtgcagcttgctgattgctactagtgttgctgctagaggattagatgttaaagaacttgaactggttgtcaattatgatgtccctaaccattatgaggactatgttcatcgtgttggtagaacaggtcgtgctggtagaaagggctttgccgttacttttatttctgatgaggatgagcgctatgcaacagaccttgttaaggctctggagctctctgagcaggctgttccacaggacctaaaagccctggctgatagatttatggctaaggtgaaacagggaactgagcaggcccatggcacaggctatggtggtagtggttttaagtttaacgaggaagaggatgaagcacggaagaccgcgaagaaggctcaggcaagggaatatggatatgaggaggacaagtcagattcagattctgatgatgaagggggagtgcgtaaggcaggaggtgatctggcagcacaagctattgccaatgctcatgcagctgctgctttggttgcaaacaaggctgctaataatgcaaatcagcaaataccaggatctgcaacagcccccttgattcctttactcacagcatcaaaccaacaaaatgatgaggccactgctcgggcacttcaggctgcaatgaacttgcaacaaaatctggcaaggatacaggcccatgcagttccagaacactatgaggctgaacttgagattaatgatttcccacagaatgcccgttggagaatcactcacaaagagacactggcccctattcaggactggactggtgctgctatcactacgaggggaacatatattcctcaaggaaaaattgttggtgcaaatgagcgcaagctttacctgtttatcgagggcccgacagagtcttctgtgaagaaggcgaaagcagaattaaaacgtgtccttgaggattgtgcaaaccaggctctaaatcttcctggatctgctcaaactggaaaatattctgttatttgagttgcagagtagataacaaagtggccgagtatttttttaggagcttataatggtttgcacacttcaaagccgctgatggattgctacttctgatgctcttgctgtctccagccttttattttgtctgatactcttttataagaagacttagaacacaggcggtgaccgagtgctgtaatgcaaaggaaggcggccagttttctggtgtacgtattgatttgcctattcggaagctgagaagctatagctttctctgttgatgcactattgttactgttgcaagcggagggcatcttatagataaaaataacagatgaaatcggtaaagattcttttttcttgaacccgaggaagtatggatgatgctgcgtgcatgaacaagattgtgaaattgcatgcctgaattctggcgagtgatgattcatctatgtttccggtcatcctgataagcttgcgcagtatcgtctccgcggttatggtgtccagatttttgagttcaattcatggtgtcaacaaatagcacggcagtttacattggaataaatttcttgagtcaaatcagaaagctgcgcaaaaaacgagaggatatacttcacgcacaactcaaatcatttgtaaatgagttgcactagaaaat

SEQ ID NO: 13781 - DNA, 1830 bp, Zea Mays
cgacttgctcgtccggttcagttcagtggcgccgtcgtgcctcgacgacggcgggagacgccgcaagcaggtgagagtgagacgggcggtgactagcgggcgcttaggccgacatcggccccgcagcggcggggtagggtgcgtcgacacgcgggactgcgacttgggggggattgattcccttcgctgtgagttctctcttctccggcgcgtgcgcgcgggatcgaaggtagggtttgggccccaaagttcgtgtctttggggacagcggcggcgatggactacaccaacgccatccacatcatcccggacgccgcgggccccgacgcctgggccaacgcggcgtcggccgcgggcgccgacgccagcatctgggccaccgaggacgactaccgccagtggagcgccgaaccaggctacggcgaccggaacccctcgtcgcgggcggggagcgagcagccgccgccgggcaagaaggctcgcggcgggggcggcggcagcgatagcggcggcggtggcagcacgagcaagtcgcgcgccattggcaagatgttcttcaagaccaagctctgctgcaagttccgggccgggacctgtccctacgtcaccaactgcaacttcgcgcatggcatggaggagctccggaagccaccgcccaactggcaggagatcgtggccgcccacgaggaggccacggagcagcgggaggagcaccagatccccatcatgacatctggaagtgttgtagctggagacggcggcggtggcagtggtggcggctcgcaggggggcagggcattcaagggccgtcactgcaagaagttctacactgaagagggctgcccctatggtgacacatgcaccttcctgcatgatgagcagtctaaggcacgggagagcgtggccatcagtctctcgcccaccgttggtggtgggggatacaatgctgcctccgccaacggagtgatggtgcagaagccgtccaactggaagacaaggatctgtaacaagtgggagatgactggatactgcccatttgggagcaaatgccactttgctcatggttctaccgaacttcacaagtacggagggggcctcgtggacatcgacggcagggacatcttgtccactcctgattcgaagcaagccggtggctctgctaaagctcctctagagtctgctgctgcgtccactgcgttgccccctcatgcagacgtgtaccatctcggcatccagtcgcagcgctcggccatcgccagccagaggtctggacagctgcaaaggcccatccagaaatggaagggccctgacaagatcagcaggatctatggagactggatagatgagaacgaatagaagaaggatcttctacggtgggccgaagggaagctgttacttggtatccgtccgactccacatcagctggtggaagctttacctggcttagaagatctcgttagcgctgcaaaaccagagtcaagatcatctttgcaagacctgtattggggagataaactgctggaacatagtgccgctttcttccgttgaactcagtagcattgctatgcttgtgtaatttgtgtgttggatggaggagcataatagcatatagcgagtcatggtgcaccctgtacagggtggctgagctgcatcctgaaggctggttgttcaggtgcgtccgtgactgtctgttggttcttgttttcgggctattattattgggccggatatttctagccttactctttggcccattgagcagtgcgctgtgtaccaagcagttaaggccaataaacagggtattttttcccctgaggtctagtttggaaa

SEQ ID NO: 13782 - DNA, 1023 bp, Zea Mays
cttccttccatcaactccaatgaccagcactaacctatgcctttctcgccttctttcgccatcacttcctctctccttcgtccttgtccctgtcgtttctctctcttggccagcatcgacgacgactccatcctgcacctcccatctctggcccttttcttcgcctctccgtcccactccagcgagctgctttctcctcccaaaatataatccgatccacatgaacaataagcaccaccatcagcaagcaagcaagcagcaggataaattaacttaggagtacgtacgtgagagagaaattaaaagaaaccccaagcgcagagagagagagcgcgcgcgcgcggcagcttcagccttcagctatagctgcccttttcgtctctcctccccacatcccagaaaccattctttactcccctccaagaaaacaagcaccacacaaaccctaaagaaattcagcgcacgcagcaagcgcgcctctcatcctctccttcctcgccgtctactattttcatcatcaccgccaccacttcctctctcgcgccgccaattattaatattatcgaaagatggcaggcctggatttgggcacaagctcctacctgcaccaccaccaccaccagtccctgcacctccaccacgaagacggcggccgcccgccgggctccaagaacaagcccaagccgcccgtgatcatcacccgggagagcgccaacgcgctccgggcgcacatcctcgaggtcgccgccggctgcgacgtcttcgaggcgctcaccgcatacgcgcgccgcaggcagcgcggcgtctgcgtgctctcggcggccgggaccgtcgccaacgtcacgctgcgccagccgcagtcgtcccaggccggcccggcctcgccggcggtcgccacgctccacggcaggttcgagatactctccctcgccggctccttcctcccgccccccgcgccgccgggggccaccagcctcgcggccttcctggcaggggggcaggggcaggtcgtcggcggtagcg

SEQ ID NO: 13783 - DNA, 1532 bp, Zea Mays
cctagagcaagaatgcaaaggtttcttatcaactctagaaccgaggatttcaggagtctctttgtgtcggcgtgctcatgcaacatgtagctattctttggatgacaagttacagggagagctagatgatacacagggagaacagagaaagctagaaacagttggtgcgtttcagaaaataccaatggtgatgcctgcaactgatatactaatgtcagcacaaaggaaatctagaaacgtgccaccaacaaagggtatagcaaatattgctaagcgtgaaaggaacaaaggtgcgaaacagcttgatgccttaatgaaagaactttctgtaccgctgagaacatacacagaaaacttcccaaagaggagagatttgcatccttatgagaggtctctcattgagttgacttttggcgagggttattatgagcaggttctaggacgtgtagatactctcaggaaaaggattacttctgttggaaagcaacatgcttcagtctgtgctaagtcaacaacaaaacgtgaagcagaggagcgcctcactgagggcagaaagaaactcgaagaggctttccagcatgggaagcacgccattgatgatttagtaaatgtagcaaaggctttgcgttctatgcctgttgttgatctacatattccaacactatgtctagttggatcacccaatgtagggaagtcatctttagtccggatattatcatctggaaaacctgaggtctgcagctacccattcacaacaagagggattctaatgggtcacattgtatctaatcaggaacgttttcaggttacggacactccaggactcctgacaaggcatgatgatgacagaaataacatagagcgattgacactagctgtcctttcttatctacctatcgctgtcctgtatgtgcatgatctatccgaagactgtgggacctcagtggccgatcagtacatcacgtacaagcatattaaggacagattcggtgaccgcctatggcttgatgttatttccaaatgcgatcttttgggaaagaaagagcccataagttttcacgatgctgatgaagatgtagcacggtacagaagattggggccagaaggcgccctccaagtatctgtgcagaccgaaatcggcgtcaaacagcttaaggaaagagtgcatgagctgctgacctctcagatggctcggatcaaatctagcaaggcggagcatgaaacacatgaagtagggactagtgttgtttactgaagtttgacaataataaggattcgaatatcatgctgggtgtccgcgtaaacattcaatgtcgatgatggtaacacattccatcagttgtccttttgtccatttggaaagggtggtcaaaattgcccattatgcgttctttagtagggtaccaccacctgtccgaaaaaaaaaagattatcgttcgtcttctccatggtagaaagattgtcgatagagctcgggaaaagattattgaaacaaaaaatcatttaaatgatcaagatgtctaataggagat

SEQ ID NO: 13784 - DNA, 1846 bp, Zea Mays
caacatcatgtctgtaatggtgggcgtgagaaactgactgatgcgggtcttggcctcttggcctcttggtccaagcgattattttccgtgggccgttgggtccgtggaacatatccgttgcagaagactacagattacagaagcgctcgctcgctgttgttgctgctgccaactgaagggatgcgagccacggccaccgcaggaggccgtgcggtgttccacctccaacacctccgcccgcgcccgccatggcgagctcttcctcctgctgccaccacgcacctctcccgctccgcgccagcgaggcgagccgaccaccgttgcctccccaaaggtttcttatcaactctagaaccgaggatttcaggagtctctttgtgtcggcgtgctcatgcaacatgtagctattctttggatgacaagttacagggagagctagatgatacacagggagaacagagaaagctagaaacagttggtgcgtttcagaaaataccaatggtgatgcctgcaactgatatactaatgtcagcacaaaggaaatctagaaacgtgccaccaacaaagggtatagcaaatattgctaagcgtgaaaggaacaaaggtgcgaaacagcttgatgccttaatgaaagaactttctgtaccgctgagaacatacacagaaaacttcccaaagaggagagatttgcatccttatgagaggtctctcattgagttgacttttggcgagggttattatgagcaggttctaggacgtgtagatactctcaggaaaaggattacttctgttggaaagcaacatgcttcagtctgtgctaagtcaacaacaaaacgtgaagcagaggagcgcctcactgagggcagaaagaaactcgaagaggctttccagcatgggaagcacgccattgatgatttagtaaatgtagcaaaggctttgcgttctatgcctgttgttgatctacatattccaacactatgtctagttggatcacccaatgtagggaagtcatctttagtccggatattatcatctggaaaacctgaggtctgcagctacccattcacaacaagagggattctaatgggtcacattgtatctaatcaggaacgttttcaggttacggacactccaggactcctgacaaggcatgatgatgacagaaataacatagagcgattgacactagctgtcctttcttatctacctatcgctgtcctgtatgtgcatgatctatccgaagactgtgggacctcagtggccgatcagtacatcacgtacaagcatattaaggacagattcggtgaccgcctatggcttgatgttatttccaaatgcgatcttttgggaaagaaagagcccataagttttcacgatgctgatgaagatgtagcacggtacagaagattggggccagaaggcgccctccaagtatctgtgcagaccgaaatcggcgtcaaacagcttaaggaaagagtgcatgagctgctgacctctcagatggctcggatcaaatctagcaaggcggagcatgaaacacatgaagtagggactagtgttgtttactgaagtttgacaataataaggattcgaatatcatgctgggtgtccgcgtaaacattcaatgtcgatgatggtaacacattccatcagttgtccttttgtccatttggaaagggtggtcaaaattgcccattatgcgttctttagtagggtaccaccacctgtccgaaaaaaaaaagattatcgttcgtcttctccatggtagaaagattgtcgatagagctcgggaaaagattattgaaacaaaaaatcatttaaatgatcaagatgtctaataggagat

SEQ ID NO: 13785 - DNA, 1845 bp, Zea Mays
caacatcatgtctgtaatggtgggcgtgagaaactgactgatgcggtcttggcctcttggcctcttggtccaagcgattattttccgtgggccgttgggtccgtggaacatatccgttgcagaagactacagattacagaagcgctcgctcgctgttgttgctgctgccaactgaagggatgcgagccacggccaccgcaggaggccgtgcggtgttccacctccaacacctccgcccgcgcccgccatggcgagctcttcctcctgctgccaccacgcacctctcccgctccgcgccagcgaggcgagccgaccaccgttgcctccccaaaggtttcttatcaactctagaaccgaggatttcaggagtctctttgtgtcggcgtgctcatgcaacatgtagctattctttggatgacaagttacagggagagctagatgatacacagggagaacagagaaagctagaaacagttggtgcgtttcagaaaataccaatggtgatgcctgcaactgatatactaatgtcagcacaaaggaaatctagaaacgtgccaccaacaaagggtatagcaaatattgctaagcgtgaaaggaacaaaggtgcgaaacagcttgatgccttaatgaaagaactttctgtaccgctgagaacatacacagaaaacttcccaaagaggagagatttgcatccttatgagaggtctctcattgagttgacttttggcgagggttattatgagcaggttctaggacgtgtagatactctcaggaaaaggattacttctgttggaaagcaacatgcttcagtctgtgctaagtcaacaacaaaacgtgaagcagaggagcgcctcactgagggcagaaagaaactcgaagaggctttccagcatgggaagcacgccattgatgatttagtaaatgtagcaaaggctttgcgttctatgcctgttgttgatctacatattccaacactatgtctagttggatcacccaatgtagggaagtcatctttagtccggatattatcatctggaaaacctgaggtctgcagctacccattcacaacaagagggattctaatgggtcacattgtatctaatcaggaacgttttcaggttacggacactccaggactcctgacaaggcatgatgatgacagaaataacatagagcgattgacactagctgtcctttcttatctacctatcgctgtcctgtatgtgcatgatctatccgaagactgtgggacctcagtggccgatcagtacatcacgtacaagcatattaaggacagattcggtgaccgcctatggcttgatgttatttccaaatgcgatcttttgggaaagaaagagcccataagttttcacgatgctgatgaagatgtagcacggtacagaagattggggccagaaggcgccctccaagtatctgtgcagaccgaaatcggcgtcaaacagcttaaggaaagagtgcatgagctgctgacctctcagatggctcggatcaaatctagcaaggcggagcatgaaacacatgaagtagggactagtgttgtttactgaagtttgacaataataaggattcgaatatcatgctgggtgtccgcgtaaacattcaatgtcgatgatggtaacacattccatcagttgtccttttgtccatttggaaagggtggtcaaaattgcccattatgcgttctttagtagggtaccaccacctgtccgaaaaaaaaaagattatcgttcgtcttctccatggtagaaagattgtcgatagagctcgggaaaagattattgaaacaaaaaatcatttaaatgatcaagatgtctaataggagat

SEQ ID NO: 13786 - DNA, 1824 bp, Zea Mays
gtaatggtgggcgtgagaaactgactgatgcggtcttggcctcttggcctcttggtccaagcgattattttccgtgggccgttgggtccgtggaacatatccgttgcagaagactacagattacagaagcgctcgctcgctgttgttgctgctgccaactgaagggatgcgagccacggccaccgcaggaggccgtgcggtgttccacctccaacacctccgcccgcgcccgccatggcgagctcttcctcctgctgccaccacgcacctctcccgctccgcgccagcgaggcgagccgaccaccgttgcctccccaaaggtttcttatcaactctagaaccgaggatttcaggagtctctttgtgtcggcgtgctcatgcaacatgtagctattctttggatgacaagttacagggagagctagatgatacacagggagaacagagaaagctagaaacagttggtgcgtttcagaaaataccaatggtgatgcctgcaactgatatactaatgtcagcacaaaggaaatctagaaacgtgccaccaacaaagggtatagcaaatattgctaagcgtgaaaggaacaaaggaactttctgtaccgctgagaacatacacagaaaacttcccaaagaggagagatttgcatccttatgagaggtctctcattgagttgacttttggcgagggttattatgagcagtaccctgccaggttctaggacgtgtagatactctcaggaaaaggattacttctgttggaaagcaacatgcttcagtctgtgctaagtcaacaacaaaacgtgaagcagaggagcgcctcactgaggtttgttcagggcagaaagaaactcgaagaggctttccagcatgggaagcacgccattgatgatttagtaaatgtagcaaaggctttgcgttctatgcctgttgttgatctacatattccaacactatgtctagttggatcacccaatgtagggaagtcatctttagtccggatattatcatctggaaaacctgaggtctgcagctacccattcacaacaagagggattctaatgggtcacattgtatctaatcaggaacgttttcaggttacggacactccaggactcctgacaaggcatgatgatgacagaaataacatagagcgattgacactagctgtcctttcttatctacctatcgctgtcctgtatgtgcatgatctatccgaagactgtgggacctcagtggccgatcagtacatcacgtacaagcatattaaggacagattcggtgaccgcctatggcttgatgttatttccaaatgcgatcttttgggaaagaaagagcccataagttttcacgatgctgatgaagatgtagcacggtacagaagattggggccagaaggcgccctccaagtatctgtgcagaccgaaatcggcgtcaaacagcttaaggaaagagtgcatgagctgctgacctctcagatggctcggatcaaatctagcaaggcggagcatgaaacacatgaagtagggactagtgttgtttactgaagtttgacaataataaggattcgaatatcatgctgggtgtccgcgtaaacattcaatgtcgatgatggtaacacattccatcagttgtccttttgtccatttggaaagggtggtcaaaattgcccattatgcgttctttagtagggtaccaccacctgtccgaaaaaaaaaagattatcgttcgtcttctccatggtagaaagattgtcgatagagctcgggaaaagattattgaaacaaaaaatcatttaaatgatcaagatgtctaataggagat

SEQ ID NO: 13787 - DNA, 1801 bp, Zea Mays
aaaaaacaaaataaaaaaattgggtgtttacaacgaattttaggtcttggcctcttggcctcttggtccaagcgattattttccgtgggccgttgggtccgtggaacatatccgttgcagaagactacagattacagaagcgctcgctcgctgttgttgctgctgccaactgaagggatgcgagccacggccaccgcaggaggccgtgcggtgttccacctccaacacctccgcccgcgcccgccatggcgagctcttcctcctgctgccaccacgcacctctcccgctccgcgccagcgaggcgagccgaccaccgttgcctccccaaaggagtctctttgtgtcggcgtgctcatgcaacatgtagctattctttggatgacaagttacagggagagctagatgatacacagggagaacagagaaagctagaaacagttggtgcgtttcagaaaataccaatggtgatgcctgcaactgatatactaatgtcagcacaaaggaaatctagaaacgtgccaccaacaaagggtatagcaaatattgctaagcgtgaaaggaacaaaggtgcgaaacagcttgatgccttaatgaaagaactttctgtaccgctgagaacatacacagaaaacttcccaaagaggagagatttgcatccttatgagaggtctctcattgagttgacttttggcgagggttattatgagcaggttctaggacgtgtagatactctcaggaaaaggattacttctgttggaaagcaacatgcttcagtctgtgctaagtcaacaacaaaacgtgaagcagaggagcgcctcactgagggcagaaagaaactcgaagaggctttccagcatgggaagcacgccattgatgatttagtaaatgctttgcgttctatgcctgttgttgatctacatattccaacactatgtctagttggatcacccaatgtagggaagtcatctttagtccggatattatcatctggaaaacctgaggtctgcagctacccattcacaacaagagggattctaatgggtcacattgtatctaatcaggaacgttttcaggttacggacactccaggactcctgacaaggcatgatgatgacagaaataacatagagcgattgacactagctgtcctttcttatctacctatcgctgtcctgtatgtgcatgatctatccgaagactgtgggacctcagtggccgatcagtacatcacgtacaagcatattaaggacagattcggtgaccgcctatggcttgatgttatttccaaatgcgatcttttgggaaagaaagagcccataagttttcacgatgctgatgaagatgtagcacggtacagaagattggggccagaaggcgccctccaagtatctgtgcagaccgaaatcggcgtcaaacagcttaaggaaagagtgcatgagctgctgacctctcagatggctcggatcaaatctagcaaggcggagcatgaaacacatgaagtagggactagtgttgtttactgaagtttgacaataataaggattcgaatatcatgctgggtgtccgcgtaaacattcaatgtcgatgatggtaacacattccatcagttgtccttttgtccatttggaaagggtggtcaaaattgcccattatgcgttctttagtagggtaccaccacctgtccgaaaaaaaaaagattatcgttcgtcttctccatggtagaaagattgtcgatagagctcgggaaaagattattgaaacaaaaaatcatttaaatgatcaagatgtctaataggagat

SEQ ID NO: 13788 - DNA, 1417 bp, Zea Mays
cactgaccttatgatgcacttggagaacagagaaagctagaaacagttggtgcgtttcagaaaataccaatggtgatgcctgcaactgatatactaatgtcagcacaaaggaaatctagaaacgtgccaccaacaaagggtatagcaaatattgctaagcgtgaaaggaacaaaggtgcgaaacagcttgatgccttaatgaaagaactttctgtaccgctgagaacatacacagaaaacttcccaaagaggagagatttgcatccttatgagaggtctctcattgagttgacttttggcgagggttattatgagcaggttctaggacgtgtagatactctcaggaaaaggattacttctgttggaaagcaacatgcttcagtctgtgctaagtcaacaacaaaacgtgaagcagaggagcgcctcactgagggcagaaagaaactcgaagaggctttccagcatgggaagcacgccattgatgatttagtaaatgtagcaaaggctttgcgttctatgcctgttgttgatctacatattccaacactatgtctagttggatcacccaatgtagggaagtcatctttagtccggatattatcatctggaaaacctgaggtctgcagctacccattcacaacaagagggattctaatgggtcacattgtatctaatcaggaacgttttcaggttacggacactccaggactcctgacaaggcatgatgatgacagaaataacatagagcgattgacactagctgtcctttcttatctacctatcgctgtcctgtatgtgcatgatctatccgaagactgtgggacctcagtggccgatcagtacatcacgtacaagcatattaaggacagattcggtgaccgcctatggcttgatgttatttccaaatgcgatcttttgggaaagaaagagcccataagttttcacgatgctgatgaagatgtagcacggtacagaagattggggccagaaggcgccctccaagtatctgtgcagaccgaaatcggcgtcaaacagcttaaggaaagagtgcatgagctgctgacctctcagatggctcggatcaaatctagcaaggcggagcatgaaacacatgaagtagggactagtgttgtttactgaagtttgacaataataaggattcgaatatcatgctgggtgtccgcgtaaacattcaatgtcgatgatggtaacacattccatcagttgtccttttgtccatttggaaagggtggtcaaaattgcccattatgcgttctttagtagggtaccaccacctgtccgaaaaaaaaaagattatcgttcgtcttctccatggtagaaagattgtcgatagagctcgggaaaagattattgaaacaaaaaatcatttaaatgatcaagatgtctaataggagat

SEQ ID NO: 13789 - DNA, 2497 bp, Zea Mays
ccgcaccacgtctcctacactcctccgcctgccgtcctgtcctgcgcccttactcctcggacgccccccacgccaccaatccccaaccccccattccgcactcccctctccctgccccgccgcgcttccttcgctgctaaagcggctgcgatggcgctctgggcgctgccggtcggcttccgcttccaccccaccgacgaggagctcgtcagccactacctcaagggcaagatcaccggccagatcaactccgaggccgaggtcatccccgagatcgacatctgcaagtgcgagccgtgggacctcccaggtaagtctctgatccggtccgacgatcctgagtggttcttcttggcgcccaaggaccgcaagtaccccaacggtagcaggtcgaacagggccaccgtggccgggtactggaaggctactggcccggacaggaacatcaagtccaagggcgacaagagcaaacagtttaccatcggcaagaagaagacccttgtcttccaccgtggacgcgccccgaagggcgagcgcacagggtggattatgcacgagtaccgcaccaccgagcctcagttcgagtctggcaagcagggtggttatgttctttatcgcctcttctggaaaccagaggagaaaactgagcgctccagcccaaaggaaatggatagaagtggcaactcgcctactactattcgttcttcacgtgacaaccaagaggcgaatgaggaagctaatacaccattaaataaaaaatctctagaatctgctctgcatgatccgattgagctgcccaattctgctgaaacccctgctgggccaaggaaaatgtgcctggcggacagaaatgataatttggtggctactgcaccggttgtttcccatatacctttccagggacatgctgctggtgtagctaaggttgatccttcagctgctgcttcagcccacttcgttaatccccagaatggaaatgacgactgcaacaattttatgtctgatttcacccccattctaccgcatgaaaatgcattcttcactggtacacagcaaggagcttttggttttgatggaaatggcatcatgaatcatcctgatgccctggatgctttcttgaaccaaacacttgttgatactgatgaacattcatcgacaacatcaaaagttcagtatgattctgacattccaacagaatttgcgaaccattggaatatgcaggatgagcatcaagactggtgggaaaagttagattttgagccatatgaaccaactttgcttccttatgacaccactgacctagacgtactctcagtagactctggcgccgattccttcaatgacctcttcaatgtgactggcattactcttaggcctcaacagttggactccactgtgcaaccagactgtgtgttccctgatcagggcactgcactaaggaggctgaagctacaggttgttgagtgtggggagagcataactaaagatgagagtgaagatgaagtatcatgtgttgaaagtccaaactattttgatgaatctgtcgagttcgctgcagagaagggtgtggcttcttatggggatggggctgactcaactgggattgttattagaagccgttaccctgccccaagttcaagctcagagagttcattcactcaacagggaactgctatgcgaaggctacggttgcagttgggccttaacgaaggcacatgtcctagtagtggtgattcatcaagctgcatcgtagatgaatcagaaagtcagcagaaagcagagattgaagaggatgcaagcacgaacctagctggaagtgttgataatctacctggcaatagccatgatgatgagcaaaaggacatccctgaacatggagttaaatctgtcctgaggctgcggaaaacttctgcggaaagtctgaaggatgtgaagcaggaggattgtctggagccagacgggagagcaccgatgcagagggtaggcttccaatcatccatcatctggctggttctttcggtggctgtgctgctgcttctctattgtggcgtatggatgagtatgatatgtatcctggtgcggtgttttgcgcacatgggttcctggcatcaacctgatgtgtgaacttctgtcataacatgcgtttgacagcagtaagacatcccgacatatgccaatgcagctaaaaataaaaaaaagaggtgttattgtaggtgttactaatgttgtagctgttgtgcagttgtaaatcccccttcggcagctggttttatttcctgatgtaatgtaagcaagagcaaggtcctgtcagatgcgtgcgctgaaagtctgaacctccgataatatctgatgcttcttgtagatagctgtttcagaattttcggttaatgaacccagttactgcttgcttgttgatctattttctgtgttgctatctgatgggattgttgtggtgaattcgagttcattgggaatacatgacagaattgtgaatgcg

SEQ ID NO: 13790 - DNA, 2363 bp, Zea Mays
ctgtctcgcgattacttgcactagagagagagatttgtttcgccttgctgtgctggtaagtctctgatccggtccgacgatcctgagtggttcttcttggcgcccaaggaccgcaagtaccccaacggtagcaggtcgaacagggccaccgtggccgggtactggaaggctactggcccggacaggaacatcaagtccaagggcgacaagagcaaacagtttaccatcggcaagaagaagacccttgtcttccaccgtggacgcgccccgaagggcgagcgcacagggtggattatgcacgagtaccgcaccaccgagcctcagttcgagtctggcaagcagggtggttatgttctttatcgcctcttctggaaaccagaggagaaaactgagcgctccagcccaaaggaaatggatagaagtggcaactcgcctactactattcgttcttcacgtgacaaccaagaggcgaatgaggaagctaatacaccattaaataaaaaatctctagaatctgctctgcatgatccgattgagctgcccaattctgctgaaacccctgctgggccaaggaaaatgtgcctggcggacagaaatgataatttggtggctactgcaccggttgtttcccatatacctttccagggacatgctgctggtgtagctaaggttgatccttcagctgctgcttcagcccacttcgttaatccccagaatggaaatgacgactgcaacaattttatgtctgatttcacccccattctaccgcatgaaaatgcattcttcactggtacacagcaaggagcttttggttttgatggaaatggcatcatgaatcatcctgatgccctggatgctttcttgaaccaaacacttgttgatactgatgaacattcatcgacaacatcaaaagttcagtatgattctgacattccaacagaatttgcgaaccattggaatatgcaggatgagcatcaagactggtgggaaaagttagattttgagccatatgaaccaactttgcttccttatgacaccactgacctagacgtactctcagtagactctggcgccgattccttcaatgacctcttcaatgtgactggcattactcttaggcctcaacagttggactccactgtgcaaccagactgtgtgttccctgatcagggcactgcactaaggaggctgaagctacaggttgttgagtgtggggagagcataactaaagatgagagtgaagatgaagtatcatgtgttgaaagtccaaactattttgatgaatctgtcgagttcgctgcagagaagggtgtggcttcttatggggatggggctgactcaactgggattgttattagaagccgttaccctgccccaagttcaagctcagagagttcattcactcaacagggaactgctatgcgaaggctacggttgcagttgggccttaacgaaggcacatgtcctagtagtggtgattcatcaagctgcatcgtagatgaatcagaaagtcagcagaaagcagagattgaagaggatgcaagcacgaacctagctggaagtgttgataatctacctggcaatagccatgatgatgagcaaaaggacatccctgaacatggagttaaatctgtcctgaggctgcggaaaacttctgcggaaagtctgaaggatgtgaagcaggaggattgtctggagccagacgggagagcaccgatgcagagggtaggcttccaatcatccatcatctggctggttctttcggtggctgtgctgctgcttctctattgtggcgtatggatgagtatgatatgtatcctggtgcggtgttttgcgcacatgggttcctggcatcaacctgatgtgtgaacttctgtcataacatgcgtttgacagcagtaagacatcccgacatatgccaatgcagctaaaaataaaaaaaagaggtagcaagtgaagagggagaaaaaagagatgtgttattgtaggtcttagtacatcctagtcttgccaatgcagctcaaaagaaaaaagaggtagcaagtgaggagggagaaaaaaaaagaggtgttattgtaggtgttactaatgttgtagctgttgtgcagttgtaaatcccccttcggcagctggttttatttcctgatgtaatgtaagcaagagcaaggtcctgtcagatgcgtgcgctgaaagtctgaacctccgataatatctgatgcttcttgtagatagctgtttcagaattttcggttaatgaacccagttactgcttgcttgttgatctattttctgtgttgctatctgatgggattgttgtggtgaattcgagttcattgggaatacatgacagaattgtgaatgcg

SEQ ID NO: 13791 - DNA, 2404 bp, Zea Mays
cctatacacaccgcacaatcttctgtgccccatatgtacccattttaaccttgaccaaccagacgcaccggcctcgccggcgatgccctcctccacctccgccggcggcggcgccattcccgccggcccaccgtcgacgctctctccgaacgcggctccctacaccttcctcgcgcgtcagtcccgcgccccacccggacgcctccaagatggtgatgctccaaggttgattgataataactttgtgttgtatggagaggacaacagttcttattcggtgccactggcagcacaatcaggaatgaagcagagtgacactgtttactcaagcagctcgcatggaacacaccaaggtcagccaagctccgcacgtggaattcctgtcggtgtttatccatctccaacgtcctcaattgcgatagtttcagagccatcagtgaccataggttctgatttcaaccagcaccttgttccattgacctcagcaaattggctataaggaaaaatgatgagtccaacaaagagactgggaaacatgtctccttcagcaggaacttacaactcggtagtcctgctcatggaaatggcaattcaaatggcgccatggctctttcgaaagagctaaatcctgattttggcgtgaagcctcttgtcttgtctgcatgcactagcccatgtgttacaatggctgatgatttgaaccctgatccatcggagtgttctgtggattcaccttgctggcgagggacagcttctcgcctctctccatttgatggccttccaacatcaattgtgcaatcagtgaaacaggaactagtgcctattgatgcagggaaggaacaaagctctaccactgattgcgaggctccaactaaacttcagaatttggtctgttcaaagagtacacaaaaccattcccaatcccatgttaaattgggtctgtccaaagaacctggagacatttgtgcaaatatcacacaatattcccatcgaaagaagcactttgcagaacatagtgcagtgaattgcaatgcagaccaacactgtttagcagtgatagatgattgcataaagcgatctggcctaaactctgctgctcctgattttgttcccttagctgttaggaaatcaaataccagcgatggttcctgttcttcatctggaacgaacgtatcgggaattctgaaagagatcaatagtttgtcggaggtgttatgcaataattattctgatgaaattaagctagaggagcatgaccacagcctcctccaatcagtaattgggaatcttcagagttatcttcacaaagcaagcaaggttcctgctatggttgattctgacaagtcagggggactaaaggcttgctatgctcagaatgcagtttcaaaacctgtcgcaggagactacaacggtagtttcactgccgataatggaaaaggcataagtatctctaatcttggtgattctagtcctttggtcggtgacttaaggaaaaagagcgtgacagggtaccagcctgcactcagcaattttccaaaggagctctcatgggaggagcggtcacaggctcttatctataagaaactgtggtttgatgcagaacgcacaaactgtgctttgaagtatcaacttaaacaaacgcgtgtggaaatcgacctagagtcaagcacagctcatattggcgggggtccaagaaacagttctttccatctatgtgatgtgggtgtagatccaagtagttcctatggatctgccataacttgcccaccgatgatgctcaagggccatcctggagaaagaaagagtcataacctcctttctgctgctgaccacattcagtcaggagacagcagtgctctgtcaagaccaaaaggttacatagccgtgccagagaatattgaggatggatatttcttgtcagggccggaagaaaccggtgtccgccgccatgcacgtcctggtctacaaagtaggcccctcggaaggttgaacacaagtacgtcagatggaatgtcatcctcgtatgtcactggaagggatgacattctgcgtggcagctgcgagtttggatcttcagattgggagcatgtgttgaaggaagaaatcggctcaacctaaaaaaaaatttgaagggatctggcaataagtatatagtactgtacatgtatgagctaccacgaagctaggaattcggatcttcttgattttttttttgcttgacaaggctgatgaatgggcactggttggaatggtgctgctctagcctacggaaaaccccttatttatcttgtcttgggaacaatgcctataaatcataacttggatggctatgctaattttctactgtgccgaatgcagatgttattttggcacacgattaagaagttcaggagtgccatatttc

SEQ ID NO: 13792 - DNA, 2908 bp, Zea Mays
cctatacacaccgcacaatcttctgtgccccatatgtacccattttaaccttgaccaaccagacgcaccggcctcgccggcgatgccctcctccacctccgccggcggcggcgccattcccgccggcccaccgtcgacgctctctccgaacgcggctccctacaccttcctcgcgcgtcagtcccgcgccccacccggacgcctccaagatggtgatgctccaaggttgattgataataactttgtgttgtatggagaggacaacagttcttattcggtgccactggcagcacaatcaggaatgaagcagagtgacactgtttactcaagcagctcgcatggaacacaccaaggtaagggaagcagacagccaagggtgacgatcagaagccctccaaataagacttcagaaactaacaacaccatttttggttctgttagcaaattggctataaggaaaaatgatgagtccaacaaagagactgggaaacatgtctccttcagcaggaacttacaactcggtagtcctgctcatggaaatggcaattcaaatggcgccatggctctttcgaaagagctaaatcctgattttggcgtgaagcctcttgtcttgtctgcatgcactagcccatgtgttacaatggctgatgatttgaaccctgatccatcggagtgttctgtggattcaccttgctggcgagggacagcttctcgcctctctccatttgatggccttccaacatcaattgtgcaatcagtgaaacaggaactagtgcctattgatgcagggaaggaacaaagctctaccactgattgcgaggctccaactaaacttcagaatttggtctgttcaaagagtacacaaaaccattcccaatcccatgttaaattgggtctgtccaaagaacctggagacatttgtgcaaatatcacacaatattcccatcgaaagaagcactttgcagaacatagtgcagtgaattgcaatgcagaccaacactgtttagcagtgatagatgattgcataaagcgatctggcctaaactctgctgctcctgattttgttcccttagctgttaggaaatcaaataccagcgatggttcctgttcttcatctggaacgaacgtatcgggaattctgaaagagatcaatagtttgtcggaggtgttatgcaataattattctgatgaaattaagctagaggagcatgaccacagcctcctccaatcagtaattgggaatcttcagagttatcttcacaaagcaagcaaggttcctgctatggttgattctgacaagtcagggggactaaaggcttgctatgctcagaatgcagtttcaaaacctgtcgcaggagactacaacggtagtttcactgccgataatggaaaaggcataagtatctctaatcttggtgattctagtcctttggtcggtgacttaaggaaaaagagcgtgacagggtaccaggtaacatttcctacacgtttaagaaagttttgttattttgaacgtggagagtatctgcattttgtctcccagtaagtacagattacaagatatgtggtgaaccgtctgttcggtaacttttctaataatcatgtaaaacaatttgctgctaccattttctcagaaaatatcttatgatttatttcctatttctttcgtaccattgtgttaaaaaaacttgaccggagggggttaagccgctcccaggacattcatataagaagtcacggagccacaagttccggtcgagaaaacccccgaaccgagttttcgtagcccgagagtggacgagaaaacccccaaaccattttttaacccaggtctgaaaattcgtttccgcgaggaattgaattcagaacctgagagttgctactacaccacctaactagttagaccaagggctgttcgcataccattgtattaagatgcaacaggagctgattgatgaacttgaatggtattactttatcttaccctttctaacaaggtactcttaatgatttcagcagcctgcactcagcaattttccaaaggagctctcatgggaggagcggtcacaggctcttatctataagaaactgtggtttgatgcagaacgcacaaactgtgctttgaagtatcaacttaaacaaacgcgtgtggaaatcgacctagagtcaagcacagctcatattggcgggggtccaagaaacagttctttccatctatgtgatgtgggtgtagatccaagtagttcctatggatctgccataacttgcccaccgatgatgctcaagggccatcctggagaaagaaagagtcataacctcctttctgctgctgaccacattcagtcaggagacagcagtgctctgtcaagaccaaaaggttacatagccgtgccagagaatattgaggatggatatttcttgtcagggccggaagaaaccggtgtccgccgccatgcacgtcctggtctacaaagtaggcccctcggaaggttgaacacaagtacgtcagatggaatgtcatcctcgtatgtcactggaagggatgacattctgcgtggcagctgcgagtttggatcttcagattgggagcatgtgttgaaggaagaaatcggctcaacctaaaaaaaaatttgaagggatctggcaataagtatatagtactgtacatgtatgagctaccacgaagctaggaattcggatcttcttgattttttttttgcttgacaaggctgatgaatgggcactggttggaatggtgctgctctagcctacggaaaaccccttatttatcttgtcttgggaacaatgcctataaatcataacttggatggctatgctaattttctactgtgccgaatgcagatgttattttggcacacgattaagaagttcaggagtgccatatttc

SEQ ID NO: 13793 - DNA, 3701 bp, Zea Mays
cagaagggaaggtggcggctaaaaaaataaactaaactagttgtggtaccatattggaaacctaaccctagaataaggctatctctagtatggcgcttcccctcccgcctcttggcctccctcccccaccccttcgtctccctcctctggccggcgcctcagccccttcatcccacagcctcacgccggttcttgctccaaggccggcggccactacccttccctccccggcgtcggctgcttcccctattccctcccgctccccaggttccttgcccggtggacattcgaaagctcagcggtggagagaggaaggcggttcgtcttctgctgttgcgcaggatcgcagtgaggtccagcgctccttcaaggatgtgctgttggccgtgaagcctcctgcccctggtggtgctggcggtgttgatgctgatgatggctgggtgagagttgaaggtcgccaggctcgacgtcgagcttctaaccgttcgaagccccttcccaggcctgtccctgtcgatttgcgcgggaagtgcttcaattgtttctcgccttcccatcgtgcagctgtgtgtcggagcctggttcgttgcttcttctgccggcggcctgggcaccgagcgatcgtgtgcccctgccggcagacggcctcgccccctccgcggcgtgctctggtgtggcgcccggtctccaggaagcccccttcgacagattctcctgccggtgacatggagggatgctcgttggccggcatggctggcccttctggaggcttgaagaaacgcactcgtcgtggtcagagaaggaggaagactggtcctgagggagggcatcctgttctggtggcgcctccacccacgcctgtgagccccgctcgacatgtaaggatcatcgggcgctccagggaggttgatcgggccgaggctgaccttcgtcgggcgctgatcgtcacagttcttggccacatgagttctgatagcgccgctattgttctggacgcgctcgcctcaaggttttcttttgaagctgatgcgctccatcttcagcgtgctgcgtcgaactcttttctggtcttcttccccacagaggatcatgctactcgtgtcttcaatggtgggcagtcacttttcattcctcctgtaaggttgcacctcaagcgttggtctcgtcaggccttggcctctggtggaagcgccctgcctctgctgctggatatcgagctgagggggattcctgcccacctctgggagcttggtactgctgaagttcttttgaatgggttttgtctgattcaggaactgcacccagaatcagtggagggcattgatatatctgttctcaagctaagggcgtggagttttgatccggattgtttgcctgttgttttggatcttcatgttcaagagcctcttgttgaggagggagagggtgccattttccctcgctctttgatttatcctattacagtgaaggttacccgttccggtgttaggccggaggggagcttgcctccgcctccgccatcacctcctggtgatgtcgacgaagaccatgatcaagatcatcagaggcggcggctgcttcagcatggcccctcggcttcctcgtctcggacctcggtgcactcgcggctgggcccgcgtgccccttcgtcttcggtggctggtggaccagttgatgccgcaattctcccgtctgcttcgggtgaagagttgacggcgcctgtgtcttccagtccgctggtttcctcggttcagatgttgggggcaccagttgaggccgctactctcccgatcacctcggtcgtagagttggcggcgcctgggccacccccaccttgcttggacgcttctccggcggttcctccccaggtggaggaggcatcgcgtgctgttggctctcacgcccaggatgtaccggtcagtttggatgaaaggagtttggtgtctacctcgctgccctctgctggcttgcaagaccacagtttgaatgggctccccgctgctggctctcagttttcttctgcgggctcaagggctgttgatgttgagttgggttttcagggtgattgcagtttagagacattgagttctatctttgatctgcctatggggccagctatgtctttggcatgcaggttgaatgccaagccaccttgtttcaaagtatattctagaaggaagaaggctattgtggttgaggagcggatactgtctaccccattgcaagaattcaaagatggtcttacaaagccgactgatgagctgttgccccctcctgctctgattgtcaagcgaagaaagatgatgcctagcaatttcaagcctcggcgtagcaggagggtggcaaagtttccccctgagttgggatctgacgctgctgctaaagtctgcaggcatttgggtttctgtgatgagcatgaaaatatttctttccgagatgctagtaattatgctaggctgtttcattcaacactgtccagggatcatgttgctgccctagcggctctgtttggctgggaggtgccccatgtggagcagatctgagctggttgctgtggtcggtttggtagcctccttttttgttttccatggaatctggctgttttttgatttggaatgtgaggggtctcaataatcgtgctaaaagagactctgttaagtcgctagttgtaagcctcaaacctgctgtcatttgtcttcaggaaaccaaaatgtgctccgtttcagattttgacattctttctattcttgggtcaggatacagtaattttgtttatggccctgctcatgggtctagagggggtatactagttgcttggcatgatggatcttttgcatcagtggcctcagtgatcaaggataattctgtctcggttcagttgaagagcgtttctggtcctctttggtggttcactggggtttatgggccccatcaagatagcttaaagcctgcctttcttcaagagttgagagacatcaggaatgcctgtgtaggcccgtggatcattgctggtgacttcaatcagatttacaagtcagaggacaagaataattcaaatgtcaatagggctttgttgggcaatttcagagatttgatcaactctttggatctgaaggagattcctttgaatggtaggagatttacttggtcaaaccagagggaaaatcccactcttgttaagttggatcatgttttctgttctacctgttgggaggaggctttccccgattgctttctttacagcagtgcatctgaaacttctgatcattgtcctctgatccttaaactcagtttggatcttaaagggaagcgtagatttcatttcgagagcttttggcctaaactcccgggttttatggaagaggttgctgcttcttgggaccagccggttcaggcttcttgcccttttgagagggtgtcgataaagtttaaaagattagcgagaagattgcaatcttgggggcataacgcggtcggcaatgtcagttctcagctgggggtggctcgtgaggtgctgcacaggatggagatggctcaggacagcagggtgttgtcgtctgaggaggtgtggctgctgcgcaaattgaagcagcattgccttgtccttgcttctttggaaaggacagttgcacggttaaggtcccgggtccattatttgaaggaaggagatgccaacacaaaatttttccacttgcaggctc

SEQ ID NO: 13794 - DNA, 678 bp, Zea Mays
aaacacatagccccgcgacctccgccccccacaccgtccccgcctcctctctcattctctctctctctcaagctcctctctcactcgatctctctcgaaccctctagcgattgtgaaagcaccgcctccctcggcgcctctagatctgtgctcgaaccggcgaaccctaatctagtgccttttgttctgtgttcgtagccgtgaggaatcgatcttgtgctccaactttgccgtgagggaccgatctggtgctatgactttgtcgtgaggggaccgatatggtgctccaactttgtcgtgagggatcgatctggagctccgactttgataagttgttaatattgtgcttgtgatttgtacgtgcttgatggtcgccgatgacgacaccgtggctggccaaatcggtggcagtgaggttgcaattccttcaactgatcctatcattatagattccgaccctgatgtggcagaggtcgaggagacagacacacatactagttctcgggtaagaaatagagcttccacatctgatatgtggaatgacttcgacaagaggacacacctactagttctcgggtaagaaatagagcttccacatctgatatgtggaatgacttcgacaagattcgtatatgaacttcaatagcattacaaaatttgctgacgttctgtacatat

SEQ ID NO: 13795 - DNA, 1990 bp, Zea Mays
cgcgatgcccgcccccattcccgccccgacagatcgtgttcgtcctctagatcgctgagacgaccgtcgtctcctccttgccccgctcgcgcaaagcccgggccctcccacccgatatcgcaacagaggtccaccccgcccctctgtttaatcccgcgtgacatgcatcagatgcagatgcaacaccgccacgacgtcgaacggtgatagtgagatgtcccacgccacctcctcctctgcgctccccgttccccaggtcgcgcgcacctgctcccgcaccggagaacccaccgcacgtcggcctcgtcccgagatggcggcgacgctgtgcttcatgggggttgcgagggagtctctgtctctggacgcgcccgtcgccgcccccaagctcgggagggagcggcgctcggccctcgcgagcgcgaactcggggccacaatgctggaggtggaggggcctggcgatgcgctgccagacggggtccaccgcagcgcccttcctcaggacggaggaggcccccgcggccgcgtcgggggcaaggaatgcccaggcggggttcaccatcgtcatgaagttcgatggctcgtcgctcgcttcagtcgagcggatgcgggaggtggctggcctcattcttagtgcaggggaaaggacacgccttcctctcgaccgcacggaagggaagattcataccacagccgacagagtcaggcgcaagatggctatcacagaaccgatatagagattgatgtgtttgccgtgcgctccggcatcagcgattccgacaggccccacggcggtcgcaacccagccagcggcgagaaccctgggacaaggacaattactagcgtcggcgctacaacaagcggatcaggccaagaggacctgcttgtggccaccaatattacaaaggcgtgtaagagtgaatccagtctcgctgctccgccatcgaagccagaattttgcatgttcgtctcggtgtgtcgttacacaatttgcggatgctgcaacgacactgaagcctgcgtagaggtgacgggcggcgaagaagctagccaagctgtgaaaacggacatagacatatggggtttgtgctagaggatgctaaaggtctatcacttaatggggacctcaatgtgcatccagtgattgcaaggtcttttcccctacacatccaatctttttgtttatgaactatactcatcaagtcttggtggtgttcctaatgcaaatggggattcaatgacaacacgagtagctgttgatcaccatatgcatcaagatttttcaaccaacaaattaaagcatttaactttggcacaactacataatcagccaaaatatgaagcttagtttctcacgataaagaccttggtaggatgtcaaggagcaccctgtcgtcatctatatgaagggttatcctgatgctcctaggtgtgggttcattgcattaggagtgaaggtcgtccagcaatatggtaatttgtctataagtgcggcttatttcaaatgcaagttacggtggtatcgtcttcaagcacacctcttcaagcagcaattgccgatgttcaaaaggtatcgtagtttaacacacaagttactgtggtttgtcaaaaaaagaacaatagcacatcttgctgttatcataccactttaatttgttgaaaggaaaaggttccaaatagaaggcgaatgttgagttgtaactcatttgtattttttcggtgcttggtggggaagtaaaatactcttctaaaagtgttgtggagttcctgtttcgaatcctaatttggcagatacgatacctctgcatgtaggatctgaggcttactattaccgttgatacacatcctatgctcgctgaactactacagagatgtggagttcttcgtttctatgtaatcgttgtgcactaatattttgcagaatattttgtgtgtcgttgcaaagcatgggcacatacctagtacatatttaaacactgaatggagaa

SEQ ID NO: 13796 - DNA, 1951 bp, Zea Mays
cgcgatgcccgcccccattcccgccccgacagatcgtgttcgtcctctagatcgctgagacgaccgtcgtctcctccttgccccgctcgcgcaaagcccgggccctcccacccgatatcgcaacagaggtccaccccgcccctctgtttaatcccgcgtgacatgcatcagatgcagatgcaacaccgccacgacgtcgaacggtgatagtgagatgtcccacgccacctcctcctctgcgctccccgttccccaggtcgcgcgcacctgctcccgcaccggagaacccaccgcacgtcggcctcgtcccgagatggcggcgacgctgtgcttcatgggggttgcgagggagtctctgtctctggacgcgcccgtcgccgcccccaagctcgggagggagcggcgctcggccctcgcgagcgcgaactcggggccacaatgctggaggtggaggggcctggcgatgcgctgccagacggggtccaccgcagcgcccttcctcaggacggaggaggcccccgcggccgcgtcgggggcaaggaatgcccaggcggggttcaccatcgtcatgaagttcgatggctcgtcgctcgcttcagtcgagcggatgcgggaggtggctggcctcattcttagtgcaggggaaaggacacgccttcctctcgaccgcacggaagggaagattcataccacagccgacagagtcaggcgcaagatggctatcacagaaccgatatagagattgatgtgtttgccgtgcgctccggcatcagcgattccgacaggccccacggcggtcgcaacccagccagcggcgagaaccctgggacaaggacaattactagcgtcggcgctacaacaagcggatcaggccaagaggacctgcttgtggccaccaatattacaaaggcgtgtaagagtgaatccagtctcgctgctccgccatcgaagccagaattttgcatgttcgtctcggtgtgtcgttacacaatttgcggatgctgcaacgacactgaagcctgcgtagaggtgacgggcggcgaagaagctagccaagctgtgaaaacggacatagacatatggggtttgtgctagaggatgctaaaggtctatcacttaatggggacctcaatgtgcatccagtgattgcaaggtcttttcccctacacatccaatctttttgtttatgaactatactcatcaagtcttggtggtgttcctaatgcaaatggggattcaatgacaacacgagtagctgttgatcaccatatgcatcaagatttttcaaccaacaagtaaaagttcagacatgtctttcagtcacattattgctctggatgtcaaggagcaccctgtcgtcatctatatgaagggttatcctgatgctcctaggtgtgggttcattgcattaggagtgaaggtcgtccagcaatatggtaatttgtctataagtgcggcttatttcaaatgcaagttacggtggtatcgtcttcaagcacacctcttcaagcagcaattgccgatgttcaaaaggtatcgtagtttaacacacaagttactgtggtttgtcaaaaaaagaacaatagcacatcttgctgttatcataccactttaatttgttgaaaggaaaaggttccaaatagaaggcgaatgttgagttgtaactcatttgtattttttcggtgcttggtggggaagtaaaatactcttctaaaagtgttgtggagttcctgtttcgaatcctaatttggcagatacgatacctctgcatgtaggatctgaggcttactattaccgttgatacacatcctatgctcgctgaactactacagagatgtggagttcttcgtttctatgtaatcgttgtgcactaatattttgcagaatattttgtgtgtcgttgcaaagcatgggcacatacctagtacatatttaaacactgaatggagaa

SEQ ID NO: 13797 - DNA, 1781 bp, Zea Mays
gtcgtctcctccttgccccgctcgcgcaaagcccgggccctcccacccgatatcgcaacagaggtccaccccgcccctctgtttaatcccgcgtgacatgcatcagatgcagatgcaacaccgccacgacgtcgaacggtgatagtgagatgtcccacgccacctcctcctctgcgctccccgttccccaggtcgcgcgcacctgctcccgcaccggagaacccaccgcacgtcggcctcgtcccgagatggcggcgacgctgtgcttcatgggggttgcgagggagtctctgtctctggacgcgcccgtcgccgcccccaagctcgggagggagcggcgctcggccctcgcgagcgcgaactcggggccacaatgctggaggtggaggggcctggcgatgcgctgccagacggggtccaccgcagcgcccttcctcaggacggaggaggcccccgcggccgcgtcgggggcaaggaatgcccaggcggggttcaccatcgtcatgaagttcgatggctcgtcgctcgcttcagtcgagcggatgcgggaggtggctggcctcattcttagtgcaggggaaaggacacgccttcctctcgaccgcacggaagggaagattcataccacagccgacagagtcaggcgcaagatggctatcacagaaccgatatagagattgatgtgtttgccgtgcgctccggcatcagcgattccgacaggccccacggcggtcgcaacccagccagcggcgagaaccctgggacaaggacaattactagcgtcggcgctacaacaagcggatcaggccaagaggacctgcttgtggccaccaatattacaaaggcgtcctgcgtagaggtgacgggcggcgaagaagctagccaagctgtgaaaacggacatagacatatggggtttgtgctagaggatgctaaaggtctatcacttaatggggacctcaatgtgcatccagtgattgcaaggtcttttcccctacacatccaatctttttgtttatgaactatactcatcaagtcttggtggtgttcctaatgcaaatggggattcaatgacaacacgagtagctgttgatcaccatatgcatcaagatttttcaaccaacaagtaaaagttcagacatgtctttcagtcacattattgctctggatgtcaaggagcaccctgtcgtcatctatatgaagggttatcctgatgctcctaggtgtgggttcattgcattaggagtgaaggtcgtccagcaatatggtaatttgtctataagtgcggcttatttcaaatgcaagttacggtggtatcgtcttcaagcacacctcttcaagcagcaattgccgatgttcaaaaggtatcgtagtttaacacacaagttactgtggtttgtcaaaaaaagaacaatagcacatcttgctgttatcataccactttaatttgttgaaaggaaaaggttccaaatagaaggcgaatgttgagttgtaactcatttgtattttttcggtgcttggtggggaagtaaaatactcttctaaaagtgttgtggagttcctgtttcgaatcctaatttggcagatacgatacctctgcatgtaggatctgaggcttactattaccgttgatacacatcctatgctcgctgaactactacagagatgtggagttcttcgtttctatgtaatcgttgtgcactaatattttgcagaatattttgtgtgtcgttgcaaagcatgggcacatacctagtacatatttaaacactgaatggagaa

SEQ ID NO: 13798 - DNA, 1016 bp, Zea Mays
gtgccctccccttttctgcagcaagtggatgcccccagcccctcccttgttcccatggccgaccacctctgctgctcccatggtggagaagaaggttaagttcaacgctccttaggtgttcgatggtatgctcgaactggtggccgtcttcgttcttgttgaaatcgagtcggagcatgttgtggtacgctagttgaaaatcgtgcgaagcgaagggtgtggatcaaaacaactcacaagacgatgtcggccgatgatcctgaagctagatgaactaagcgggtgtcagaataaaagttgatcgtcaagtggccatcatctaacaacactaacatagtgttatcccaggcaagccccggtgcatttgccaccttccttgtattacaaaattttatcacttatatgctgcattaggtaataggagttgaatgattaaacacttgatgcattaccatccttgaaagattgattatcataccttgttacctattttataaaaactagtaatgcttagttatgcttatagattaagaaaaatgtttttgatctatgactcatgattttttaaaaaagaaaaagggcttgggatgatggaggcatcctccgcggggatgaattcatcattcaagcagggtacctctgtcaggtatcaaactttgagaatttgtttaaaatgagaccagacgttgagctggacaggtcgcccgtctgtgtcgttcaaggaccgtaccgatcgtaggcctgttgatctaggaccttttaactggccacatacctcgtcatgggtaagcctgaacccggctactccatatgtgaaaagacaatcgcgcactgggagtggagagatggcgggagtggcgtgtacccacctggcacgtggctggatggtggagtaccgtactctcgggtggcgcggaccggttcacgtagtggaggacccgtgggaatggtagacatatgcaagggttaagtgctacatatgtcgtgtggttggagatccccagctgggtattaat

SEQ ID NO: 13799 - DNA, 988 bp, Zea Mays
gttcccatggccgaccacctctgctgctcccatgtaaaatccttggagaattaggtggagaagaaggttaagttcaacgctccttaggtgttcgatggtatgctcgaactggtggccgtcttcgttcttgctgaaatcgagtcggagcatgatgtggtacgctagttgaaaatcgtgcgaagcgaagggtgtggatcaaaacaactcacaagacgatgtcggccgatgatcctgaagctagatgaactaagcgggtgtcagaataaaagttgatcgtcaagtggccatcatctaacaacactaacatagtgttatcccaggcaagccccggtgcatttgccaccttccttgtattacaaaattttatcacttatatgctgcattaggtaataggagttgaatgattaaacacttgatgcattaccatccttgaaagattgattatcataccttgttacctattttataaaaactagtaatgcttagttatgcttatagattaagaaaaatgtttttgatctatgactcatgattttttaaaaaagaaaaagggcttgggatgatggaggcatcctccgcggggatgaattcatcattcaagcagggtacctctgtcaggtatcaaactttgagaatttgtttaaaatgagaccagacgttgagctggacaggtcgcccgtctgtgtcgttcaaggaccgtaccgatcgtaggcctgttgatctaggaccttttaactggccacatacctcgtcatgggtaagcctgaacccggctactccatatgtgaaaagacaatcgcgcactgggagtggagagatggcgggagtggcgtgtacccacctggcacgtggctggatggtggagtaccgtactctcgggtggcgcggaccggttcacgtagtggaggacccgtgggaatggtagacatatgcaagggttaagtgctacatatgtcgtgtggttggagatccccagctgggtattaat

SEQ ID NO: 13800 - DNA, 1916 bp, Zea Mays
actagtttgactggtatcttttgtttcgttcggttacatctcgcgcagacctaatctgtgaactaaattatctgtgtagtcttttgtaacaaaaattggagaaaataaaaaaaaagaatctgaatttcttttctcccttccaccgcctaaaccctctgacttatccccttcgtgaagccaccattcgtggtgccgatctcatccacctcatgcccagaaatttccggaattcttccacgtactcaatttctggaacctcccgtacgtcctcatcacctgcacaagccgacgcttgttctcatcctctagctgccgcccttgctttccatggcggcgcttcctgctgctggcaacagcaccgaccgccctccctgctcgccgttcctattctctggcgctcgcccctgccccagccatggacgccgtcgacctcgacttcctctggccgcggcatccgtcctgctccccgctccatccatttctccctcctatggcgcactccttcccctagtcgcccatggccgcgccctctgctcctccccctggcgtctccttctctggttacagctgtggaacagcagctgcccttgtccctccctggctctagctctccaagccgatgctgctcgctacccctctccaagctgacgccccaaccatggcactctctgctcctccaagccggcgacccctcctctctggttcagcgcaggggactccctccatggctggcgcccctgatggccggacctccacctcgccattgccggttgctcctgcactagattatcttcaagcccggtcgcggtatagcagcaacaaccatgaaaccccatcgtgtcgcgccctcgacgtgttcgacagaatatcgcagcaagcagtgccctccccttttctgcagcaagtggatgcccccagcccctcccttgttcccatggccgaccacctctgctgctcccatgtaaaatccttggagaattaggtggagaagaaggttaagttcaacgctccttaggtgttcgatggtatgctcgaactggtggccgtcttcgttcttgctgaaatcgagtcggagcatgatgtggtacgctagttgaaaatcgtgcgaagcgaagggtgtggatcaaaacaactcacaagacgatgtcggccgatgatcctgaagctagatgaactaagcgggtgtcagaataaaagttgatcgtcaagtggccatcatctaacaacactaacatagtgttatcccaggcaagccccggtgcatttgccaccttccttgtattacaaaattttatcacttatatgctgcattaggtaataggagttgaatgattaaacacttgatgcattaccatccttgaaagattgattatcataccttgttacctattttataaaaactagtaatgcttagttatgcttatagattaagaaaaatgtttttgatctatgactcatgattttttaaaaaagaaaaagggcttgggatgatggaggcatcctccgcggggatgaattcatcattcaagcagggtacctctgtcaggtatcaaactttgagaatttgtttaaaatgagaccagacgttgagctggacaggtcgcccgtctgtgtcgttcaaggaccgtaccgatcgtaggcctgttgatctaggaccttttaactggccacatacctcgtcatgggtaagcctgaacccggctactccatatgtgaaaagacaatcgcgcactgggagtggagagatggcgggagtggcgtgtacccacctggcacgtggctggatggtggagtaccgtactctcgggtggcgcggaccggttcacgtagtggaggacccgtgggaatggtagacatatgcaagggttaagtgctacatatgtcgtgtggttggagatccccagctgggtattaat

SEQ ID NO: 13801 - DNA, 1781 bp, Zea Mays
gtatcttttgtttcgttcggttacatctcgcgcagacctaatctgtgaactaaattatctgtgtagtcttttgtaacaaaaattggagaaaataaaaaaaaagaatctgaatttcttttctcccttccaccgcctaaaccctctgacttatccccttcgtgaagccaccattcgtggtgccgatctcatccacctcatgcccagaaatttccggaattcttccacgtactcaatttctggaacctcccgtacgtcctcatcacctgcacaagccgacgcttgttctcatcctctagctgccgcccttgctttccatggcggcgcttcctgctgctggcaacagcaccgaccgccctccctgctcgccgttcctattctctggcgctcgcccctgccccagccatggacgccgtcgacctcgacttcctctggccgcggcatccgtcctgctccccgctccatccatttctccctcctatggcgcactccttcccctagtcgcccatggccgcgccctctgctcctccccctggcgtctccttctctggttacagctgtggaacagcagctgcccttgtccctccctggctctagctctccaagccgatgctgctcgctacccctctccaagctgacgccccaaccatggcactctctgctcctccaagccggcgacccctcctctctggttcagcgcaggggactccctccatggctggcgcccctgatggccggacctccacctcgccattgccggttgctcctgcactagattatcttcaagcccggtcgcggtatagcagcaacaaccatgaaaccccatcgtgtcgcgccctcgacgtgttcgacagaatatcgcagcaagcagtgccctccccttttctgcagcaagtggatgcccccagcccctcccttgttcccatggccgaccacctctgctgctcccatggtacgctagttgaaaatcgtgcgaagcgaagggtgtggatcaaaacaactcacaagacgatgtcggccgatgatcctgaagctagatgaactaagcgggtgtcagaataaaagttgatcgtcaagtggccatcatctaacaacactaacatagtgttatcccaggcaagccccggtgcatttgccaccttccttgtattacaaaattttatcacttatatgctgcattaggtaataggagttgaatgattaaacacttgatgcattaccatccttgaaagattgattatcataccttgttacctattttataaaaactagtaatgcttagttatgcttatagattaagaaaaatgtttttgatctatgactcatgattttttaaaaaagaaaaagggcttgggatgatggaggcatcctccgcggggatgaattcatcattcaagcagggtacctctgtcaggtatcaaactttgagaatttgtttaaaatgagaccagacgttgagctggacaggtcgcccgtctgtgtcgttcaaggaccgtaccgatcgtaggcctgttgatctaggaccttttaactggccacatacctcgtcatgggtaagcctgaacccggctactccatatgtgaaaagacaatcgcgcactgggagtggagagatggcgggagtggcgtgtacccacctggcacgtggctggatggtggagtaccgtactctcgggtggcgcggaccggttcacgtagtggaggacccgtgggaatggtagacatatgcaagggttaagtgctacatatgtcgtgtggttggagatccccagctgggtattaat

SEQ ID NO: 13802 - DNA, 637 bp, Zea Mays
gttctatttatgattttggttcgatgatgataatgatgttcctcgatgaggaaatggttcacgggtttgttattactaaaatttggcttccactgataataaaatacctgaccaagtaaaagcaactgcttgagcttaaccccacataaagctagtccacctcagccaaacgggacatttgctgagtatgttgatgtgtactcacccttgctttcacaaaacaccaggttacctttggtgcaatctatgcttaggtaaagaagaaggcgtcgaggcggatctccaggagttccggggcttcgatgagttcgaggattaggctagcgactacccccagtcagctgcctgtggtgggtttatttacgttggctacgtttctattctgggtactttgattatattatgtaaatgactctagtcttttatattattacttactctttattgtattcgaagcattgtgctatgatgagtcatttatgtaatcgctgtgtacgtgaatttctgatcctggcacgtacatggttcactgaatttgggggtataaaatttcttttctaatattcaccaaattcaggtgttaccctctcttttccttccttttcttatctttctttctaaatgatgaagagttatt

SEQ ID NO: 13803 - DNA, 1363 bp, Zea Mays
atgcgcaagcagctgggcgcagcaggcttgctggcggagctgcgcatggggttccggcagttggcagacccgatcgcgcctccgcctgttcggctgtcccctgtgccctgcggcctgcggccctgcccaacacccaacgcactgccgctacccagctacggcagcgggcagccacctgcctgtccgccgtgtccggctgtcccctgcccaggcgcccagcccaacggccaacgcagagaacgcacgaagtatgaatcaggttttcaaaagcgtaagaaacaaaaaagaatagagggtttaattcagtctcaaaaaggagctatggatagattcgttattaaagaatcacaagtatcccctgtgaatcagccagctgatggaggccctgcaattgatagtactgctgctaacaacgaggttgatgatgttcctattgataacacaaacgtagggatgggcaataatagtgataatttgaatacttcagcgtctatgaatgatgtgacagttgcatcagcagaacgaagcttttctaaattgaagctattgaagtcatatttgcgctctacaatgttacaacaaagacttactgatttggcccagatatcacttgagagtgaattattggagaagattgaatatgagcgtattattgaagaattcatttcaagtaacaccaaaaagaatgaagttgttcaaataaatatgatacaacaaagcgttgaatagggtctcggattatgccggcccggccctgtggccgagatggcgctcgccgaggtggctgccatgatgtaggtgggcgccgacgacgacggtgacgcactcattcttgcgacgctcgggatgcagcggcggaggatgagctcatttttgtcgaccgggagcttgatgttggcgctggggctggccggagccctatcaagcgcagggtggagttcaagctaccagagagctgcgactgagcaacacatgaaaagctgggaccagattcaagagggatagaggcaagcagccaacacgcagaagctcacctgctcaggacaacaccagggatctacggtttcttgcactgtactgcatcacattccatcgcaagaacaaaaccatcccgctccttgcaaacatccaaagatacaagttttcacggatgtagtctagtttagatatgttagatattatgtctacaatatttcataaactttatcaggagttatgtgcgtatattatggtaatgacgatagaacaatcatgtgtcgatgttgatgtttcttatgttatgttaacgacaacctgggaaccgtaatggataaactgtaatgttttctatgtttttaacgtcatgtgtgttattttttatttg

SEQ ID NO: 13804 - DNA, 3797 bp, Zea Mays
gggggagcatcgtcgtccctgcatgcatccatcaacctgtgtcgtgtgcagcagtgcagtgcaggcagctaggccagccacaccgcccacaggacaggagccatgccaggtctctcccacaccacacggcaggacaggagtgggcgacgacggacggacggacggagcaacagcaacaggaacccaactccttcctttgggcgtcacgggagttcgacttccggcggagaaaaggctccccgccttttccactttccccaacgctccccttatctcctccttcctggcgtccgcgcaaccaaccacgcgcgcgcgcgctccgctagccagccagctcgttctctctatctctatctatctatctgtctgtctgtctcagctagagctcgaggcagcatcatcagagcttgcttgctcgcatgctagcttgccgtcgtcctgcgttggtccttgctgggtcgtcttgtgttcatttctcatcgtcggagagaagagggagtatagctagctagctagctaggaggggaggtgcgtggtggtccgtatatatacatgcgcatggagggggccggaggaggcgcaggcggaggcggcgccggcgctggagggtgcctgggtatgggccacggcggggaggcgcagatcaagggcacgcacacgcacggcggccgctacgtgcagtacaacgtgtacggaaacctcctggaggtctccgccaagtacgtcccgcccatccgccccgtcggccgcggcgcctgcggcatcatctgtgctgctgtgaacgcgcagactcgcgaggaggtcgccatcaagaagatcggcaacgcgtttgacaaccagatcgacgccaagcgcactctccgagaaatcaagctgcttaggcacatgaatcatgaaaatgtgagtagccatgtatatgtatatatttctctaccttgtgatgaacatatatatttatatatatactccacgctacaggacttttttttgtcattgtatgtatttattagctatatatacatgtatgtatagttcattagctatatacataatacatccgtgcatatatgtaacagagcaacaaattctttttccctgcaggtcatttcaataaaggacatcatacgcccgcccaggagggagaacttcaacgacgtctacatcgtctacgagctgatggacactgaccttcaccacctcctacggtcaaaccagcaactaaccgacgaccactgccagtacttcgtgtaccagctgctccgcgggctcaagtacgtgcactcggcgaacgtcctgcacagggacctgaggccgagcaacatgctgctgaacgccaagtgcgacctgaagatcggggacttcgggctggcgaggaccacgacggagaccgacttcatgatggagtacgtcgtcacgcggtggtacagggcgcctgagctcctgctcaactgctccgagtacacccaggccatcgacatgtggtccgtgggctgcatcttcggcgagatggtcaccagagagcccctgtttcctggcaaggattatgtccaccagctgaggctgataaccgagctggtaggctcacctgacgacaccagcctcgggttcctccggagcgaccacgcccgcagatacgtgaggtccctgcctcagcatcccaagcaacagttccgcgtgcggttccccaccatgtctagcggcgccatggacttgcttgagaggatgctcgtgttcgatcccagcaagaggattactgttgatgaggctctgtgccacccatacctggcgtcccttcacgaggtaaacgacgagcccatctgtccggcgcctttcagcttcgacttcgagcagccatcgctcaccgaagaagctataaaggagctcatctggaaggagtctctcaagttcaaccctgacccgatccactaaatataatagctccctcccagctgtgtacacacgagcaaactaggacggcatgtctatcagctagctccatggggggcgaaaggcatatatagcaggatgactgtacaagtgaccacccctcatcatcatcaccttcatctcattcgcatggcttgtcaatggtgcgacaccctaacgtccaagtctggtcaataatttgtagtggagaaaactggcagcgccttgttaggttgtgtctatcttccttcgtttgtatgcttaagaagcttgtcactgcctgtgaaccatggtactactgcagttgtccacacactacagacagcagctcaccacgtcaccttacccgaatttgttccagcaattggcaccgttcccctgggcattacgcaaacattgcccatacaacagcataacgttcttcaaaccacaggcgcatgacaacaagctaggtcacacaccaaaactattttttaatagcaccaacaacatgcgtagcaacacgtttgttttaagggcactggcatcaagctttaatagacacatgaattgaacaggtaatcacaaattgacgggacaagcagacacagatctagagatatgattcggactctcttcccagctgggatgatcccaatcagaaacatgtagagcaactgaaaggtcaataagcactagcgagactgttgcattgaaacaatcctatattccagatgctaaatccagaatggaaatagaagtacatgcagtatagatcagccaggactaaaaagaatggaaattggagttatgttgttggcagcctgccaactttgactataccataactatcagcagacaaattgaactgcttaataagttactcaaggacatgctacctggtaattagaaaaacatgaatgtttacaaaactaatcggatgactgtaaaacaaatccacaagagtatagataaagcaaacagtattttaagaatctaaaattgaaatattctataaatcataaggagttgaagaactacacaggatgtaacatgtatcacaaaagactgtataatgcagggattgaaagaacctgtagtaaacaactggtaaaggtctattaaagagcatatggacatcctatgtaaaacaaatcaagaaatttgtgaattacagtccgttcacattacagctacagctacagcatcattcctttgcaacattccatgagttatgatgtcaacaactaacatcagacatgaagcccaaaatgattgctgatggcattagtgtacaagatgtcagacataccacaatacaatgctgtcacttgaggggaaccatatcttagcatccataaaactcagccaaacctaacaacagatgaaaattttcaaacataaaactactatatgatacattagaaaatggaatgtggataaaaagaatacctggctgccagcagaaaatggtcctccaggctacataaaatgaaaacagtaacctacgtaatatttaagtgtcaaagctaaggcaaacacaatcacacagcaatggaaaccaagtgtaataacctgcatgccagcttaaccctgaggtattttgccgttaccacagctactgaattactgtccagaattaataataccagaccaaaagtcatcatatcattgtcactttgtgctggaatagaattgcaacttaagggccaccggaccacagaatgcttcatgattacccttttatcatctcatatacttatgcattattttaggcaaaaacgaacgttaataataaaacaatttatgctgaaaatttatataattccacactttatcaggcaaccatgaataaaatttcactatcctggaacatgtggagcaactgcaat

SEQ ID NO: 13805 - DNA, 3715 bp, Zea Mays
ccatcaacctgtgtcgtgtgcagcagtgcagtgcaggcagctaggccagccacaccgcccacaggacaggagccatgccaggtctctcccacaccacacggcaggacaggagtgggcgacgacggacggacggacggagcaacagcaacaggaacccaactccttcctttgggcgtcacgggagttcgacttccggcggagaaaaggctccccgccttttccactttccccaacgctccccttatctcctccttcctggcgtccgcgcaaccaaccacgcgcgcgcgcgctccgctagccagccagctcgttctctctatctctatctatctatctgtctgtctgtctcagctagagctcgaggcagcatcatcagagcttgcttgctcgcatgctagcttgccgtcgtcctgcgttggtccttgctgggtcgtcttgtgttcatttctcatcgtcggagagaagagggagtatagctagctagctagctaggaggggaggtgcgtggtggtccgtatatatacatgcgcatggagggggccggaggaggcgcaggcggaggcggcgccggcgctggagggtgcctgggtatgggccacggcggggaggcgcagatcaagggcacgcacacgcacggcggccgctacgtgcagtacaacgtgtacggaaacctcctggaggtctccgccaagtacgtcccgcccatccgccccgtcggccgcggcgcctgcggcatcatctgtgctgctgtgaacgcgcagactcgcgaggaggtcgccatcaagaagatcggcaacgcgtttgacaaccagatcgacgccaagcgcactctccgagaaatcaagctgcttaggcacatgaatcatgaaaatgtgagtagccatgtatatgtatatatttctctaccttgtgatgaacatatatatttatatatatactccacgctacaggacttttttttgtcattgtatgtatttattagctatatatacatgtatgtatagttcattagctatatacataatacatccgtgcatatatgtaacagagcaacaaattctttttccctgcaggtcatttcaataaaggacatcatacgcccgcccaggagggagaacttcaacgacgtctacatcgtctacgagctgatggacactgaccttcaccacctcctacggtcaaaccagcaactaaccgacgaccactgccagtacttcgtgtaccagctgctccgcgggctcaagtacgtgcactcggcgaacgtcctgcacagggacctgaggccgagcaacatgctgctgaacgccaagtgcgacctgaagatcggggacttcgggctggcgaggaccacgacggagaccgacttcatgatggagtacgtcgtcacgcggtggtacagggcgcctgagctcctgctcaactgctccgagtacacccaggccatcgacatgtggtccgtgggctgcatcttcggcgagatggtcaccagagagcccctgtttcctgacgacaccagcctcgggttcctccggagcgaccacgcccgcagatacgtgaggtccctgcctcagcatcccaagcaacagttccgcgtgcggttccccaccatgtctagcggcgccatggacttgcttgagaggatgctcgtgttcgatcccagcaagaggattactgttgatgaggctctgtgccacccatacctggcgtcccttcacgaggtaaacgacgagcccatctgtccggcgcctttcagcttcgacttcgagcagccatcgctcaccgaagaagctataaaggagctcatctggaaggagtctctcaagttcaaccctgacccgatccactaaatataatagctccctcccagctgtgtacacacgagcaaactaggacggcatgtctatcagctagctccatggggggcgaaaggcatatatagcaggatgactgtacaagtgaccacccctcatcatcatcaccttcatctcattcgcatggcttgtcaatggtgcgacaccctaacgtccaagtctggtcaataatttgtagtggagaaaactggcagcgccttgttaggttgtgtctatcttccttcgtttgtatgcttaagaagcttgtcactgcctgtgaaccatggtactactgcagttgtccacacactacagacagcagctcaccacgtcaccttacccgaatttgttccagcaattggcaccgttcccctgggcattacgcaaacattgcccatacaacagcataacgttcttcaaaccacaggcgcatgacaacaagctaggtcacacaccaaaactattttttaatagcaccaacaacatgcgtagcaacacgtttgttttaagggcactggcatcaagctttaatagacacatgaattgaacaggtaatcacaaattgacgggacaagcagacacagatctagagatatgattcggactctcttcccagctgggatgatcccaatcagaaacatgtagagcaactgaaaggtcaataagcactagcgagactgttgcattgaaacaatcctatattccagatgctaaatccagaatggaaatagaagtacatgcagtatagatcagccaggactaaaaagaatggaaattggagttatgttgttggcagcctgccaactttgactataccataactatcagcagacaaattgaactgcttaataagttactcaaggacatgctacctggtaattagaaaaacatgaatgtttacaaaactaatcggatgactgtaaaacaaatccacaagagtatagataaagcaaacagtattttaagaatctaaaattgaaatattctataaatcataaggagttgaagaactacacaggatgtaacatgtatcacaaaagactgtataatgcagggattgaaagaacctgtagtaaacaactggtaaaggtctattaaagagcatatggacatcctatgtaaaacaaatcaagaaatttgtgaattacagtccgttcacattacagctacagctacagcatcattcctttgcaacattccatgagttatgatgtcaacaactaacatcagacatgaagcccaaaatgattgctgatggcattagtgtacaagatgtcagacataccacaatacaatgctgtcacttgaggggaaccatatcttagcatccataaaactcagccaaacctaacaacagatgaaaattttcaaacataaaactactatatgatacattagaaaatggaatgtggataaaaagaatacctggctgccagcagaaaatggtcctccaggctacataaaatgaaaacagtaacctacgtaatatttaagtgtcaaagctaaggcaaacacaatcacacagcaatggaaaccaagtgtaataacctgcatgccagcttaaccctgaggtattttgccgttaccacagctactgaattactgtccagaattaataataccagaccaaaagtcatcatatcattgtcactttgtgctggaatagaattgcaacttaagggccaccggaccacagaatgcttcatgattacccttttatcatctcatatacttatgcattattttaggcaaaaacgaacgttaataataaaacaatttatgctgaaaatttatataattccacactttatcaggcaaccatgaataaaatttcactatcctggaacatgtggagcaactgcaat

SEQ ID NO: 13806 - DNA, 3568 bp, Zea Mays
ccatcaacctgtgtcgtgtgcagcagtgcagtgcaggcagctaggccagccacaccgcccacaggacaggagccatgccaggtctctcccacaccacacggcaggacaggagtgggcgacgacggacggacggacggagcaacagcaacaggaacccaactccttcctttgggcgtcacgggagttcgacttccggcggagaaaaggctccccgccttttccactttccccaacgctccccttatctcctccttcctggcgtccgcgcaaccaaccacgcgcgcgcgcgctccgctagccagccagctcgttctctctatctctatctatctatctgtctgtctgtctcagctagagctcgaggcagcatcatcagagcttgcttgctcgcatgctagcttgccgtcgtcctgcgttggtccttgctgggtcgtcttgtgttcatttctcatcgtcggagagaagagggagtatagctagctagctagctaggaggggaggtgcgtggtggtccgtatatatacatgcgcatggagggggccggaggaggcgcaggcggaggcggcgccggcgctggagggtgcctgggtatgggccacggcggggaggcgcagatcaagggcacgcacacgcacggcggccgctacgtgcagtacaacgtgtacggaaacctcctggaggtctccgccaagtacgtcccgcccatccgccccgtcggccgcggcgcctgcggcatcatctgtgctgctgtgaacgcgcagactcgcgaggaggtcgccatcaagaagatcggcaacgcgtttgacaaccagatcgacgccaagcgcactctccgagaaatcaagctgcttaggcacatgaatcatgaaaatgtcatttcaataaaggacatcatacgcccgcccaggagggagaacttcaacgacgtctacatcgtctacgagctgatggacactgaccttcaccacctcctacggtcaaaccagcaactaaccgacgaccactgccagtacttcgtgtaccagctgctccgcgggctcaagtacgtgcactcggcgaacgtcctgcacagggacctgaggccgagcaacatgctgctgaacgccaagtgcgacctgaagatcggggacttcgggctggcgaggaccacgacggagaccgacttcatgatggagtacgtcgtcacgcggtggtacagggcgcctgagctcctgctcaactgctccgagtacacccaggccatcgacatgtggtccgtgggctgcatcttcggcgagatggtcaccagagagcccctgtttcctggcaaggattatgtccaccagctgaggctgataaccgagctggtaggctcacctgacgacaccagcctcgggttcctccggagcgaccacgcccgcagatacgtgaggtccctgcctcagcatcccaagcaacagttccgcgtgcggttccccaccatgtctagcggcgccatggacttgcttgagaggatgctcgtgttcgatcccagcaagaggattactgttgatgaggctctgtgccacccatacctggcgtcccttcacgaggtaaacgacgagcccatctgtccggcgcctttcagcttcgacttcgagcagccatcgctcaccgaagaagctataaaggagctcatctggaaggagtctctcaagttcaaccctgacccgatccactaaatataatagctccctcccagctgtgtacacacgagcaaactaggacggcatgtctatcagctagctccatggggggcgaaaggcatatatagcaggatgactgtacaagtgaccacccctcatcatcatcaccttcatctcattcgcatggcttgtcaatggtgcgacaccctaacgtccaagtctggtcaataatttgtagtggagaaaactggcagcgccttgttaggttgtgtctatcttccttcgtttgtatgcttaagaagcttgtcactgcctgtgaaccatggtactactgcagttgtccacacactacagacagcagctcaccacgtcaccttacccgaatttgttccagcaattggcaccgttcccctgggcattacgcaaacattgcccatacaacagcataacgttcttcaaaccacaggcgcatgacaacaagctaggtcacacaccaaaactattttttaatagcaccaacaacatgcgtagcaacacgtttgttttaagggcactggcatcaagctttaatagacacatgaattgaacaggtaatcacaaattgacgggacaagcagacacagatctagagatatgattcggactctcttcccagctgggatgatcccaatcagaaacatgtagagcaactgaaaggtcaataagcactagcgagactgttgcattgaaacaatcctatattccagatgctaaatccagaatggaaatagaagtacatgcagtatagatcagccaggactaaaaagaatggaaattggagttatgttgttggcagcctgccaactttgactataccataactatcagcagacaaattgaactgcttaataagttactcaaggacatgctacctggtaattagaaaaacatgaatgtttacaaaactaatcggatgactgtaaaacaaatccacaagagtatagataaagcaaacagtattttaagaatctaaaattgaaatattctataaatcataaggagttgaagaactacacaggatgtaacatgtatcacaaaagactgtataatgcagggattgaaagaacctgtagtaaacaactggtaaaggtctattaaagagcatatggacatcctatgtaaaacaaatcaagaaatttgtgaattacagtccgttcacattacagctacagctacagcatcattcctttgcaacattccatgagttatgatgtcaacaactaacatcagacatgaagcccaaaatgattgctgatggcattagtgtacaagatgtcagacataccacaatacaatgctgtcacttgaggggaaccatatcttagcatccataaaactcagccaaacctaacaacagatgaaaattttcaaacataaaactactatatgatacattagaaaatggaatgtggataaaaagaatacctggctgccagcagaaaatggtcctccaggctacataaaatgaaaacagtaacctacgtaatatttaagtgtcaaagctaaggcaaacacaatcacacagcaatggaaaccaagtgtaataacctgcatgccagcttaaccctgaggtattttgccgttaccacagctactgaattactgtccagaattaataataccagaccaaaagtcatcatatcattgtcactttgtgctggaatagaattgcaacttaagggccaccggaccacagaatgcttcatgattacccttttatcatctcatatacttatgcattattttaggcaaaaacgaacgttaataataaaacaatttatgctgaaaatttatataattccacactttatcaggcaaccatgaataaaatttcactatcctggaacatgtggagcaactgcaat

SEQ ID NO: 13807 - DNA, 6302 bp, Zea Mays
tctttccccagaggcaccctcaatcccctttcccctcctccctccagactctcggaggcgggcgcgcggatctgtcggccggggccgatccagtcgattccaccggacaaggccgccaaaaacacactcgctcgacgcagcgagcggggccggcccttcgtgccgcggggcgcccggtggcgagggccgcagcgcgcagcgatctgaaaccctaggtggtggtgggcgccgccgccgtgtgtagacgcgatggatgcgaggttcccgtactcgccggccgaggtggccaaggtcgagttcgtgcagttcggcatcctcagccccgacgagatcacaaatgtcggtgattcaaatagaacacgcagagaccatggagaggggcaaaccgaagcctggtgggctcagtgaccctcgattggggactatcgaccggaaaattaagtgcgagacatgcatggcagggatggcagagtgtccaggccactttgggcaccttgagcttgccaagccgatgttccacatcggattcattaagactgtgctctccatcatgcgttgtgtttgctttaactgctccaagatcctcgcggatgaggatgaaaccaaatttaagcaggctttaaaaatccggaatccaaagaatagattgaagaggatatatgatgcttgcaagagcaaaaaagtctgtgcaggtggcgatgaccttgatgttcaggaacaggatactgatgagcctattaagaaaagaggtggctgtggtgctcagcagccaaatattacagtcgatggcatgaagatggttgctgagtttaaagctccaaagaagaaaactgatgatcaggatcaactccctgagccagtggaacgcaagcaaatcctctcagctgagagggtccttaatgttcttaagcgtataagtgatgaggactgtcttctgttgggcctgaatcccaaatatgcccgtcctgattggatgatacttcaagttcttcctgttcctccaccccctgttagaccatctgtcatgatggacacctcttccagaagtgaggatgatctgactcatcagttagctatgataatacgacataatgagaatttgaggaggcaagagagaaatggtgctccagctcacattataacagagtttgctcagctgttgcaatttcatattgcaacatacttcgataatgatcttcctggccaacccagggccacacaacgttctggaaggcctattaaatcaatttgcagcaggctgaaagctaaagaaggcaggattagaggaaacttgatgggcaagcgtgttgatttctcggcccgtacagttatcacaccagatccgaacataaacattgatgaattgggagtaccatggagtattgctttgaacctgacatatcctgaaactgtcactccatataatattgagaggttgaaggaacttgttgaatatgggcctcaccctcctccaggaaagaccggtgcaaaatatattatcagggaagatggtcagaggcttgatcttcggtatgtgaagaaaagcagtgatcagcatctggagcttggttacaaggtggagaggcatctcaatgatggggattttgttcttttcaatcggcaaccaagtcttcataaaatgtctatcatggggcatcgcatcaaaattatgccctactcaactttccggttgaacttgtctgtcacttcaccatacaatgctgacttcgacggtgatgagatgaatatgcatgtcccccagtcatttgagaccagagcagaagttctggagttaatgatggtgccaaaatgcattgtctctccacaatcaaataggcctgtaatgggtattgtccaagacacactgcttgggtgtcgcaaaattactaaaagggacactctaattgaaaaggatgtatttatgaacatcttgatgtggtggcaagatttcgatggaaagattcctgcacctaccattttgaaacctaggcctatttggactgggaaacaagtttttaacttaattatccccaagcaaataaatttaattcggttttcagcatggcattcggaagaagaaaaaggatttattactcccggtgatactatggtcaggatagagaagggagagcttctgtctggcacactttgcaaaaagagtcttggaacaggctccggaagtcttatccatgtcatttgggaagaggttggtccagatgctgcccggaagttcttaggacacacacagtggcttgtaaactactggcttcttcaaaatggtttcagtattggaattggggatactattgcagatgcatccaccatggaaacaattaatgatacaatatctaaagctaagaatgctgtgaaggagcttattaaaaaagctcatgagaagcagttggaagctgagccaggacgcactatgatggaatcatttgaaaacagagtgaaccaggttcttaacaaagcccgtgatgatgctggtagcagtgctcagaatagcttgtctgaaagcaacaatttgaaggctatggtcactgcaggttcaaaaggcagtttcattaacatttcacaaatgactgcttgtgtgggacagcagaatgttgagggcaagcggatcccttttggtttcattgatcggacgttgccacatttcacaaaagatgactatggtcctgaaagtcgtggatttgtggaaaattcttacctccgaggtctgacaccgcaagaatttttctttcacgctatgggtggtagggaaggtcttatagacactgctgtgaaaacctctgagactgggtatatccagaggagacttgtgaaagctatggaggacatcatggttaaatatgatggtactgtaagaaattctcttggagatgtcatccagttcttgtatggagaagatggcatggatgctgtttggattgaatctcaaaaattggactcattgaagatgaagaagcctgagttcgataatgtattccgttatgagctggatgatgagaattggagacctaactacatgctacctgaacatgttgacgatttgaagaccatacgtgaattcagaaatgtgttcgaggcagaggttcaaaagctagaagctgatcggtaccagcttgggtctgagatcaccacaactggtgacaattcgtggcctatgcctgtgaacctcaagcgactcatctggaatgctcagaagacattcaagattgattttagaagaccttctgacatgcacccgatggaaattgtggaagcgatagataaactgcaagaaagacttaaggttgtacctggtgatgatgctatgagcattgaggcccagaagaatgcaaccttgttctttaatatcctacttcgtagcacgtttgctagcaagagggtcttgaaggaatacaggcttacaaaggaagcttttgaatgggttattggtgagattgaatcgaggtttcttcagtctttggtggcccctggcgagatgattggatgtgtggctgcacaatctattggagaaccagcaactcagatgaccctgaataccttccattatgctggtgtcagtgccaagaatgtcacccttggagttcccaggttgagggagatcattaatgttgccaagaagataaagacaccatctttgtctgtttacctgaagcctcaggtgaaccagaagaaagaattggctaagaatgtccagtgtgctttggagtacactacactgcgtagtgttacccacgccacagagatatggtatgatcctgatcctctagggaccatcattgaagaggacacagagtttgttcagtcctattatgaaatgcctgatgaggacattgacccggataaaatttctccttggttgctgcgtattgagcttaaccgtgagatgatggttgataagaagttgagcatggctgatattgccgagaagattaaccgtgagtttgatgatgatttatcatgcattttcaatgatgataatgcggataagcttatcctccgtatccgcatcacaaatgatgaagctccaaaaggagaaatacaagatgagtctgctgaggatgatgtcttcctaaaaaagatagagggcaatatgttgacagagatggcgcttcgaggcattccagatatcaacaaagtgttcatcaaagaagggaaggtcaataccttctatcaagatgacggtttcaaagcagctaatgaatggatgcttgatacagaaggtgtgaatcttttagctgtcatgtgtcacgaggatgttgatgctacaaggacaacaagtaaccatctgattgaagtgattgaggtacttggaattgaggctgtccgtcgatctctcttggatgagcttcgggtggtgatatctttcgatgggtcatatgtgaactaccggcatctggccattctttgtgatacaatgacatacagaggtcacttgatggctattacaaggcatggtatcaaccgcaacgacactggacctcttatgagatgttcctttgaagagactgttgacatcttacttgatgctgctgtatatgctgaatctgaccacctgagaggtgttactgaaaacataatgcttggtcagcttgctcctattggtactggaggctgtgcactatatctgaatgaccagatgttgcagcaagcaattgaacttcaactcccaagctatgtcgaaggcctagactttggcatgactccagcacgatcacccatcactgggacaccttaccatgaaggaatgatgtcgccaagttatctgctgagtccaaacatcagggcttcgcctattaatacagatgcttcgttctcgccgtatgttgggcacatggcattctcaccattcccttcaccaggtggttactccccatcgtcagggggatacagcccatcttctccggttttcaccccagagaaaggatatagccctctctctccatcatatagccctgcatcaccaagctatagtcccacctcaccgtcttacactcctggctctcccacctacagtccaacaagcccgaattactccccaaccagcccgacgtactcgcctaccagcccatcgtactcacccacatctccgagctacagcccaacatcaccaagctacagccctacatcaccaagctacagccctacatctcctagctatagtcctacatcaccaagctacagccccacctcaccagtttatagcccaacctcaccagcatacagccccacatcacccgcttacagccccacatcgccatcctacagtccaacttcaccatcttatagccctacatcaccttcatacagccctacgtccccttcatacagccctacctccccctcatacagccctacctctccctcctacagcccgacatcacctgcttacagcccgacatcaccaggatacagcccaacgtcaccgagctacagccctacatctccgagctacagtcctacatctccgagctacaatccttcatcagccaagtacagcccttcacatgcatactctccaagcagccccaggatgagtccatacagccagacttctccaagctacagtccaacgtcaccgacttactctcctacatcaccatcatattcacaaccaagtccatcgtacagcccaacgagcccgttcaacacctctggaggacccagcccagactacagcccgacctctccaaattacagccctagcggaagctactcccccactgcaccgggctactccccgtcgtccacaggccagggtaatgacaaggatgataagagcgctcgttgaagaggcacaggagaacaaggcgctctagagcactcgatgaaggcactcggtgatggccacatgggaagatcgaggcacttttttttcccttgagtttttgtatggttgatgaactctgagagcaaacttgtatttttccgagctgctaatagcagaaatagttgtttatgtatgatactagaactaaggactggactgtgctgcgacttgataagtggttaaccgcgtggtcgcccctcagagagtaacacatgtagtaatgtttaatgataatatcgtgactgtacttggtactactatgctatggtgtactagtgtattgcatgcgcgcgtggagcagagtgatctgcgtgtgtatagtgtagtgtgatggtgattaaatagaaaacttagttatacagtagataaatgttgtggtatatattgtaatgcaaatttaaagtggttagacaggtcatacatgcagtttgtttgtgaggtaaacaaacaacataatattcat

SEQ ID NO: 13808 - DNA, 5989 bp, Zea Mays
tctttccccagaggcaccctcaatcccctttcccctcctccctccagactctcggaggcgggcgcgcggatctgtcggccggggccgatccagtcgattccaccggacaaggccgccaaaaacacactcgctcgacgcagcgagcggggccggcccttcgtgccgcggggcgcccggtggcgagggccgcagcgcgcagcgatctgaaaccctaggtggtggtgggcgccgccgccgtgtgtagacgcgatggatgcgaggttcccgtactcgccggccgaggtggccaaggtcgagttcgtgcagttcggcatcctcagccccgacgagatcagacaaatgtcggtgattcaaatagaacacgcagagaccatggagaggggcaaaccgaagcctggtgggctcagtgaccctcgattggggactatcgaccggaaaattaagtgcgagacatgcatggcagggatggcagagtgtccaggccactttgggcaccttgagcttgccaagccgatgttccacatcggattcattaagactgtgctctccatcatgcgttgtgtttgctttaactgctccaagatcctcgcggatgaggatgaaaccaaatttaagcaggctttaaaaatccggaatccaaagaatagattgaagaggatatatgatgcttgcaagagcaaaaaagtctgtgcaggtggcgatgaccttgatgttcaggaacaggatactgatgagcctattaagaaaagaggtggctgtggtgctcagcagccaaatattacagtcgatggcatgaagatggttgctgagtttaaagctccaaagaagaaaactgatgatcaggatcaactccctgagccagtggaacgcaagcaaatcctctcagctgagagggtccttaatgttcttaagcgtataagtgatgaggactgtcttctgttgggcctgaatcccaaatatgcccgtcctgattggatgatacttcaagttcttcctgttcctccaccccctgttagaccatctgtcatgatggacacctcttccagaagtgaggatgatctgactcatcagttagctatgataatacgacataatgagaatttgaggaggcaagagagaaatggtgctccagctcacattataacagagtttgctcagctgttgcaatttcatattgcaacatacttcgataatgatcttcctggccaacccagggccacacaacgttctggaaggcctattaaatcaatttgcagcaggctgaaagctaaagaaggcaggattagaggaaacttgatgggcaagcgtgttgatttctcggcccgtacagttatcacaccagatccgaacataaacattgatgaattgggagtaccatggagtattgctttgaacctgacatatcctgaaactgtcactccatataatattgagaggttgaaggaacttgttgaatatgggcctcaccctcctccaggaaagaccggtgcaaaatatattatcagggaagatggtcagaggcttgatcttcggtatgtgaagaaaagcagtgatcagcatctggagcttggttacaaggtggagaggcatctcaatgatggggattttgttcttttcaatcggcaaccaagtcttcataaaatgtctatcatggggcatcgcatcaaaattatgccctactcaactttccggttgaacttgtctgtcacttcaccatacaatgctgacttcgacggtgatgagatgaatatgcatgtcccccagtcatttgagaccagagcagaagttctggagttaatgatggtgccaaaatgcattgtctctccacaatcaaataggcctgtaatgggtattgtccaagacacactgcttgggtgtcgcaaaattactaaaagggacactctaattgaaaaggatgtatttatgaacatcttgatgtggtggcaagatttcgatggaaagattcctgcacctaccattttgaaacctaggcctatttggactgggaaacaagtttttaacttaattatccccaagcaaataaatttaattcggttttcagcatggcattcggaagaagaaaaaggatttattactcccggtgatactatggtcaggatagagaagggagagcttctgtctggcacactttgcaaaaagagtcttggaacaggctccggaagtcttatccatgtcatttgggaagaggttggtccagatgctgcccggaagttcttaggacacacacagtggcttgtaaactactggcttcttcaaaatggtttcagtattggaattggggatactattgcagatgcatccaccatggaaacaattaatgatacaatatctaaagctaagaatgctgtgaaggagcttattaaaaaagctcatgagaagcagttggaagctgagccaggacgcactatgatggaatcatttgaaaacagagtgaaccaggttcttaacaaagcccgtgatgatgctggtagcagtgctcagaatagcttgtctgaaagcaacaatttgaaggctatggtcactgcaggttcaaaaggcagtttcattaacatttcacaaatgactgcttgtgtgggacagcagaatgttgagggcaagcggatcccttttggtttcattgatcggacgttgccacatttcacaaaagatgactatggtcctgaaagtcgtggatttgtggaaaattcttacctccgaggtctgacaccgcaagaatttttctttcacgctatgggtggtagggaaggtcttatagacactgctgtgaaaacctctgagactgggtatatccagaggagacttgtgaaagctatggaggacatcatggttaaatatgatggtactgtaagaaattctcttggagatgtcatccagttcttgtatggagaagatggcatggatgctgtttggattgaatctcaaaaattggactcattgaagatgaagaagcctgagttcgataatgtattccgttatgagctggatgatgagaattggagacctaactacatgctacctgaacatgttgacgatttgaagaccatacgtgaattcagaaatgtgttcgaggcagaggttcaaaagctagaagctgatcggtaccagcttgggtctgagatcaccacaactggtgacaattcgtggcctatgcctgtgaacctcaagcgactcatctggaatgctcagaagacattcaagattgattttagaagaccttctgacatgcacccgatggaaattgtggaagcgatagataaactgcaagaaagacttaaggttgtacctggtgatgatgctatgagcattgaggcccagaagaatgcaaccttgttctttaatatcctacttcgtagcacgtttgctagcaagagggtcttgaaggaatacaggcttacaaaggaagcttttgaatgggttattggtgagattgaatcgaggtttcttcagtctttggtggcccctggcgagatgattggatgtgtggctgcacaatctattggagaaccagcaactcagatgaccctgaataccttccattatgctggtgtcagtgccaagaatgtcacccttggagttcccaggttgagggagatcattaatgttgccaagaagataaagacaccatctttgtctgtttacctgaagcctcaggtgaaccagaagaaagaattggctaagaatgtccagtgtgctttggagtacactacactgcgtagtgttacccacgccacagagatatggtatgatcctgatcctctagggaccatcattgaagaggacacagagtttgttcagtcctattatgaaatgcctgatgaggacattgacccggataaaatttctccttggttgctgcgtattgagcttaaccgtgagatgatggttgataagaagttgagcatggctgatattgccgagaagattaaccgtgagtttgatgatgatttatcatgcattttcaatgatgataatgcggataagcttatcctccgtatccgcatcacaaatgatgaagctccaaaaggagaaatacaagatgagtctgctgaggatgatgtcttcctaaaaaagatagagggcaatatgttgacagagatggcgcttcgaggcattccagatatcaacaaagtgttcatcaaagaagggaaggtcaataccttctatcaagatgacggtttcaaagcagctaatgaatggatgcttgatacagaaggtgtgaatcttttagctgtcatgtgtcacgaggatgttgatgctacaaggacaacaagtaaccatctgattgaagtgattgaggtacttggaattgaggctgtccgtcgatctctcttggatgagcttcgggtggtgatatctttcgatgggtcatatgtgaactaccggcatctggccattctttgtgatacaatgacatacagaggtcacttgatggctattacaaggcatggtatcaaccgcaacgacactggacctcttatgagatgttcctttgaagagactgttgacatcttacttgatgctgctgtatatgctgaatctgaccacctgagaggtgttactgaaaacataatgcttggtcagcttgctcctattggtactggaggctgtgcactatatctgaatgaccagatgttgcagcaagcaattgaacttcaactcccaagctatgtcgaaggcctagactttggcatgactccagcacgatcacccatcactgggacaccttaccatgaaggaatgatgtcgccaagttatctgctgagtccaaacatcagggcttcgcctattaatacagatgcttcgttctcgccgtatgttgggcacatggcattctcaccattcccttcaccaggtggttactccccatcgtcagggggatacagcccatcttctccggttttcaccccagagaaaggatatagccctctctctccatcatatagccctgcatcaccaagctatagtcccacctcaccgtcttacactcctggctctcccacctacagtccaacaagcccgaattactccccaaccagcccgacgtactcgcctaccagcccatcgtactcacccacatctccgagctacagcccaacgtcaccgagctacagccctacatctccgagctacagtcctacatctccgagctacaatccttcatcagccaagtacagcccttcacatgcatactctccaagcagccccaggatgagtccatacagccagacttctccaagctacagtccaacgtcaccgacttactctcctacatcaccatcatattcacaaccaagtccatcgtacagcccaacgagcccgttcaacacctctggaggacccagcccagactacagcccgacctctccaaattacagccctagcggaagctactcccccactgcaccgggctactccccgtcgtccacaggccagggtaatgacaaggatgataagagcgctcgttgaagaggcacaggagaacaaggcgctctagagcactcgatgaaggcactcggtgatggccacatgggaagatcgaggcacttttttttcccttgagtttttgtatggttgatgaactctgagagcaaacttgtatttttccgagctgctaatagcagaaatagttgtttatgtatgatactagaactaaggactggactgtgctgcgacttgataagtggttaaccgcgtggtcgcccctcagagagtaacacatgtagtaatgtttaatgataatatcgtgactgtacttggtactactatgctatggtgtactagtgtattgcatgcgcgcgtggagcagagtgatctgcgtgtgtatagtgtagtgtgatggtgattaaatagaaaacttagttatacagtagataaatgttgtggtatatattgtaatgcaaatttaaagtggttagacaggtcatacatgcagtttgtttgtgaggtaaacaaacaacataatattcat

SEQ ID NO: 13809 - DNA, 6169 bp, Zea Mays
tctttccccagaggcaccctcaatcccctttcccctcctccctccagactctcggaggcgggcgcgcggatctgtcggccggggccgatccagtcgattccaccggacaaggccgccaaaaacacactcgctcgacgcagcgagcggggccggcccttcgtgccgcggggcgcccggtggcgagggccgcagcgcgcagcgatctgaaaccctaggtggtggtgggcgccgccgccgtgtgtagacgcgatggatgcgaggttcccgtactcgccggccgaggtggccaaggtcgagttcgtgcagttcggcatcctcagccccgacgagatcagacaaatgtcggtgattcaaatagaacacgcagagaccatggagaggggcaaaccgaagcctggtgggctcagtgaccctcgattggggactatcgaccggaaaattaagtgcgagacatgcatggcagggatggcagagtgtccaggccactttgggcaccttgagcttgccaagccgatgttccacatcggattcattaagactgtgctctccatcatgcgttgtgtttgctttaactgctccaagatcctcgcggatgaggatgaaaccaaatttaagcaggctttaaaaatccggaatccaaagaatagattgaagaggatatatgatgcttgcaagagcaaaaaagtctgtgcaggtggcgatgaccttgatgttcaggaacaggatactgatgagcctattaagaaaagaggtggctgtggtgctcagcagccaaatattacagtcgatggcatgaagatggttgctgagtttaaagctccaaagaagaaaactgatgatcaggatcaactccctgagccagtggaacgcaagcaaatcctctcagctgagagggtccttaatgttcttaagcgtataagtgatgaggactgtcttctgttgggcctgaatcccaaatatgcccgtcctgattggatgatacttcaagttcttcctgttcctccaccccctgttagaccatctgtcatgatggacacctcttccagaagtgaggatgatctgactcatcagttagctatgataatacgacataatgagaatttgaggaggcaagagagaaatggtgctccagctcacattataacagagtttgctcagctgttgcaatttcatattgcaacatacttcgataatgatcttcctggccaacccagggccacacaacgttctggaaggcctattaaatcaatttgcagcaggctgaaagctaaagaaggcaggattagaggaaacttgatgggcaagcgtgttgatttctcggcccgtacagttatcacaccagatccgaacataaacattgatgaattgggagtaccatggagtattgctttgaacctgacatatcctgaaactgtcactccatataatattgagaggttgaaggaacttgttgaatatgggcctcaccctcctccaggaaagaccggtgcaaaatatattatcagggaagatggtcagaggcttgatcttcggtatgtgaagaaaagcagtgatcagcatctcaatgatggggattttgttcttttcaatcggcaaccaagtcttcataaaatgtctatcatggggcatcgcatcaaaattatgccctactcaactttccggttgaacttgtctgtcacttcaccatacaatgctgacttcgacggtgatgagatgaatatgcatgtcccccagtcatttgagaccagagcagaagttctggagttaatgatggtgccaaaatgcattgtctctccacaatcaaataggcctgtaatgggtattgtccaagacacactgcttgggtgtcgcaaaattactaaaagggacactctaattgaaaaggatgtatttatgaacatcttgatgtggtggcaagatttcgatggaaagattcctgcacctaccattttgaaacctaggcctatttggactgggaaacaagtttttaacttaattatccccaagcaaataaatttaattcggttttcagcatggcattcggaagaagaaaaaggatttattactcccggtgatactatggtcaggatagagaagggagagcttctgtctggcacactttgcaaaaagagtcttggaacaggctccggaagtcttatccatgtcatttgggaagaggttggtccagatgctgcccggaagttcttaggacacacacagtggcttgtaaactactggcttcttcaaaatggtttcagtattggaattggggatactattgcagatgcatccaccatggaaacaattaatgatacaatatctaaagctaagaatgctgtgaaggagcttattaaaaaagctcatgagaagcagttggaagctgagccaggacgcactatgatggaatcatttgaaaacagagtgaaccaggttcttaacaaagcccgtgatgatgctggtagcagtgctcagaatagcttgtctgaaagcaacaatttgaaggctatggtcactgcaggttcaaaaggcagtttcattaacatttcacaaatgactgcttgtgtgggacagcagaatgttgagggcaagcggatcccttttggtttcattgatcggacgttgccacatttcacaaaagatgactatggtcctgaaagtcgtggatttgtggaaaattcttacctccgaggtctgacaccgcaagaatttttctttcacgctatgggtggtagggaaggtcttatagacactgctgtgaaaacctctgagactgggtatatccagaggagacttgtgaaagctatggaggacatcatggttaaatatgatggtactgtaagaaattctcttggagatgtcatccagttcttgtatggagaagatggcatggatgctgtttggattgaatctcaaaaattggactcattgaagatgaagaagcctgagttcgataatgtattccgttatgagctggatgatgagaattggagacctaactacatgctacctgaacatgttgacgatttgaagaccatacgtgaattcagaaatgtgttcgaggcagaggttcaaaagctagaagctgatcggtaccagcttgggtctgagatcaccacaactggtgacaattcgtggcctatgcctgtgaacctcaagcgactcatctggaatgctcagaagacattcaagattgattttagaagaccttctgacatgcacccgatggaaattgtggaagcgatagataaactgcaagaaagacttaaggttgtacctggtgatgatgctatgagcattgaggcccagaagaatgcaaccttgttctttaatatcctacttcgtagcacgtttgctagcaagagggtcttgaaggaatacaggcttacaaaggaagcttttgaatgggttattggtgagattgaatcgaggtttcttcagtctttggtggcccctggcgagatgattggatgtgtggctgcacaatctattggagaaccagcaactcagatgaccctgaataccttccattatgctggtgtcagtgccaagaatgtcacccttggagttcccaggttgagggagatcattaatgttgccaagaagataaagacaccatctttgtctgtttacctgaagcctcaggtgaaccagaagaaagaattggctaagaatgtccagtgtgctttggagtacactacactgcgtagtgttacccacgccacagagatatggtatgatcctgatcctctagggaccatcattgaagaggacacagagtttgttcagtcctattatgaaatgcctgatgaggacattgacccggataaaatttctccttggttgctgcgtattgagcttaaccgtgagatgatggttgataagaagttgagcatggctgatattgccgagaagattaaccgtgagtttgatgatgatttatcatgcattttcaatgatgataatgcggataagcttatcctccgtatccgcatcacaaatgatgaagctccaaaaggagaaatacaagatgagtctgctgaggatgatgtcttcctaaaaaagatagagggcaatatgttgacagagatggcgcttcgaggcattccagatatcaacaaagtgttcatcaaagaagggaaggtcaataccttctatcaagatgacggtttcaaagcagctaatgaatggatgcttgatacagaaggtgtgaatcttttagctgtcatgtgtcacgaggatgttgatgctacaaggacaacaagtaaccatctgattgaagtgattgaggtacttggaattgaggctgtccgtcgatctctcttggatgagcttcgggtggtgatatctttcgatgggtcatatgtgaactaccggcatctggccattctttgtgatacaatgacatacagaggtcacttgatggctattacaaggcatggtatcaaccgcaacgacactggacctcttatgagatgttcctttgaagagactgttgacatcttacttgatgctgctgtatatgctgaatctgaccacctgagaggtgttactgaaaacataatgcttggtcagcttgctcctattggtactggaggctgtgcactatatctgaatgaccagatgttgcagcaagcaattgaacttcaactcccaagctatgtcgaaggcctagactttggcatgactccagcacgatcacccatcactgggacaccttaccatgaaggaatgatgtcgccaagttatctgctgagtccaaacatcagggcttcgcctattaatacagatgcttcgttctcgccgtatgttgggcacatggcattctcaccattcccttcaccaggtggttactccccatcgtcagggggatacagcccatcttctccggttttcaccccagagaaaggatatagccctctctctccatcatatagccctgcatcaccaagctatagtcccacctcaccgtcttacactcctggctctcccacctacagtccaacaagcccgaattactccccaaccagcccgacgtactcgcctaccagcccatcgtactcacccacctcaccagtttatagcccaacctcaccagcatacagccccacatcacccgcttacagccccacatcgccatcctacagtccaacttcaccatcttatagccctacatcaccttcatacagccctacgtccccttcatacagccctacctccccctcatacagccctacctctccctcctacagcccgacatcacctgcttacagcccgacatcaccaggatacagcccaacgtcaccgagctacagccctacatctccgagctacagtcctacatctccgagctacaatccttcatcagccaagtacagcccttcacatgcatactctccaagcagccccaggatgagtccatacagccagacttctccaagctacagtccaacgtcaccgacttactctcctacatcaccatcatattcacaaccaagtccatcgtacagcccaacgagcccgttcaacacctctggaggacccagcccagactacagcccgacctctccaaattacagccctagcggaagctactcccccactgcaccgggctactccccgtcgtccacaggccagggtaatgacaaggatgataagagcgctcgttgaagaggcacaggagaacaaggcgctctagagcactcgatgaaggcactcggtgatggccacatgggaagatcgaggcacttttttttcccttgagtttttgtatggttgatgaactctgagagcaaacttgtatttttccgagctgctaatagcagaaatagttgtttatgtatgatactagaactaaggactggactgtgctgcgacttgataagtggttaaccgcgtggtcgcccctcagagagtaacacatgtagtaatgtttaatgataatatcgtgactgtacttggtactactatgctatggtgtactagtgtattgcatgcgcgcgtggagcagagtgatctgcgtgtgtatagtgtagtgtgatggtgattaaatagaaaacttagttatacagtagataaatgttgtggtatatattgtaatgcaaatttaaagtggttagacaggtcatacatgcagtttgtttgtgaggtaaacaaacaacataatattcat

SEQ ID NO: 13810 - DNA, 5626 bp, Zea Mays
cattttctcactagccattaacctctggaggatgaaaccaaatttaagcaggctttaaaaatccggaatccaaagaatagattgaagaggatatatgatgcttgcaagagcaaaaaagtctgtgcaggtggcgatgaccttgatgttcaggaacaggatactgatgagcctattaagaaaagaggtggctgtggtgctcagcagccaaatattacagtcgatggcatgaagatggttgctgagtttaaagctccaaagaagaaaactgatgatcaggatcaactccctgagccagtggaacgcaagcaaatcctctcagctgagagggtccttaatgttcttaagcgtataagtgatgaggactgtcttctgttgggcctgaatcccaaatatgcccgtcctgattggatgatacttcaagttcttcctgttcctccaccccctgttagaccatctgtcatgatggacacctcttccagaagtgaggatgatctgactcatcagttagctatgataatacgacataatgagaatttgaggaggcaagagagaaatggtgctccagctcacattataacagagtttgctcagctgttgcaatttcatattgcaacatacttcgataatgatcttcctggccaacccagggccacacaacgttctggaaggcctattaaatcaatttgcagcaggctgaaagctaaagaaggcaggattagaggaaacttgatgggcaagcgtgttgatttctcggcccgtacagttatcacaccagatccgaacataaacattgatgaattgggagtaccatggagtattgctttgaacctgacatatcctgaaactgtcactccatataatattgagaggttgaaggaacttgttgaatatgggcctcaccctcctccaggaaagaccggtgcaaaatatattatcagggaagatggtcagaggcttgatcttcggtatgtgaagaaaagcagtgatcagcatctggagcttggttacaaggtggagaggcatctcaatgatggggattttgttcttttcaatcggcaaccaagtcttcataaaatgtctatcatggggcatcgcatcaaaattatgccctactcaactttccggttgaacttgtctgtcacttcaccatacaatgctgacttcgacggtgatgagatgaatatgcatgtcccccagtcatttgagaccagagcagaagttctggagttaatgatggtgccaaaatgcattgtctctccacaatcaaataggcctgtaatgggtattgtccaagacacactgcttgggtgtcgcaaaattactaaaagggacactctaattgaaaaggatgtatttatgaacatcttgatgtggtggcaagatttcgatggaaagattcctgcacctaccattttgaaacctaggcctatttggactgggaaacaagtttttaacttaattatccccaagcaaataaatttaattcggttttcagcatggcattcggaagaagaaaaaggatttattactcccggtgatactatggtcaggatagagaagggagagcttctgtctggcacactttgcaaaaagagtcttggaacaggctccggaagtcttatccatgtcatttgggaagaggttggtccagatgctgcccggaagttcttaggacacacacagtggcttgtaaactactggcttcttcaaaatggtttcagtattggaattggggatactattgcagatgcatccaccatggaaacaattaatgatacaatatctaaagctaagaatgctgtgaaggagcttattaaaaaagctcatgagaagcagttggaagctgagccaggacgcactatgatggaatcatttgaaaacagagtgaaccaggttcttaacaaagcccgtgatgatgctggtagcagtgctcagaatagcttgtctgaaagcaacaatttgaaggctatggtcactgcaggttcaaaaggcagtttcattaacatttcacaaatgactgcttgtgtgggacagcagaatgttgagggcaagcggatcccttttggtttcattgatcggacgttgccacatttcacaaaagatgactatggtcctgaaagtcgtggatttgtggaaaattcttacctccgaggtctgacaccgcaagaatttttctttcacgctatgggtggtagggaaggtcttatagacactgctgtgaaaacctctgagactgggtatatccagaggagacttgtgaaagctatggaggacatcatggttaaatatgatggtactgtaagaaattctcttggagatgtcatccagttcttgtatggagaagatggcatggatgctgtttggattgaatctcaaaaattggactcattgaagatgaagaagcctgagttcgataatgtattccgttatgagctggatgatgagaattggagacctaactacatgctacctgaacatgttgacgatttgaagaccatacgtgaattcagaaatgtgttcgaggcagaggttcaaaagctagaagctgatcggtaccagcttgggtctgagatcaccacaactggtgacaattcgtggcctatgcctgtgaacctcaagcgactcatctggaatgctcagaagacattcaagattgattttagaagaccttctgacatgcacccgatggaaattgtggaagcgatagataaactgcaagaaagacttaaggttgtacctggtgatgatgctatgagcattgaggcccagaagaatgcaaccttgttctttaatatcctacttcgtagcacgtttgctagcaagagggtcttgaaggaatacaggcttacaaaggaagcttttgaatgggttattggtgagattgaatcgaggtttcttcagtctttggtggcccctggcgagatgattggatgtgtggctgcacaatctattggagaaccagcaactcagatgaccctgaataccttccattatgctggtgtcagtgccaagaatgtcacccttggagttcccaggttgagggagatcattaatgttgccaagaagataaagacaccatctttgtctgtttacctgaagcctcaggtgaaccagaagaaagaattggctaagaatgtccagtgtgctttggagtacactacactgcgtagtgttacccacgccacagagatatggtatgatcctgatcctctagggaccatcattgaagaggacacagagtttgttcagtcctattatgaaatgcctgatgaggacattgacccggataaaatttctccttggttgctgcgtattgagcttaaccgtgagatgatggttgataagaagttgagcatggctgatattgccgagaagattaaccgtgagtttgatgatgatttatcatgcattttcaatgatgataatgcggataagcttatcctccgtatccgcatcacaaatgatgaagctccaaaaggagaaatacaagatgagtctgctgaggatgatgtcttcctaaaaaagatagagggcaatatgttgacagagatggcgcttcgaggcattccagatatcaacaaagtgttcatcaaagaagggaaggtcaataccttctatcaagatgacggtttcaaagcagctaatgaatggatgcttgatacagaaggtgtgaatcttttagctgtcatgtgtcacgaggatgttgatgctacaaggacaacaagtaaccatctgattgaagtgattgaggtacttggaattgaggctgtccgtcgatctctcttggatgagcttcgggtggtgatatctttcgatgggtcatatgtgaactaccggcatctggccattctttgtgatacaatgacatacagaggtcacttgatggctattacaaggcatggtatcaaccgcaacgacactggacctcttatgagatgttcctttgaagagactgttgacatcttacttgatgctgctgtatatgctgaatctgaccacctgagaggtgttactgaaaacataatgcttggtcagcttgctcctattggtactggaggctgtgcactatatctgaatgaccagatgttgcagcaagcaattgaacttcaactcccaagctatgtcgaaggcctagactttggcatgactccagcacgatcacccatcactgggacaccttaccatgaaggaatgatgtcgccaagttatctgctgagtccaaacatcagggcttcgcctattaatacagatgcttcgttctcgccgtatgttgggcacatggcattctcaccattcccttcaccaggtggttactccccatcgtcagggggatacagcccatcttctccggttttcaccccagagaaaggatatagccctctctctccatcatatagccctgcatcaccaagctatagtcccacctcaccgtcttacactcctggctctcccacctacagtccaacaagcccgaattactccccaaccagcccgacgtactcgcctaccagcccatcgtactcacccacatctccgagctacagcccaacatcaccaagctacagccctacatcaccaagctacagccctacatctcctagctatagtcctacatcaccaagctacagccccacctcaccagtttatagcccaacctcaccagcatacagccccacatcacccgcttacagccccacatcgccatcctacagtccaacttcaccatcttatagccctacatcaccttcatacagccctacgtccccttcatacagccctacctccccctcatacagccctacctctccctcctacagcccgacatcacctgcttacagcccgacatcaccaggatacagcccaacgtcaccgagctacagccctacatctccgagctacagtccaacgtcaccgacttactctcctacatcaccatcatattcacaaccaagtccatcgtacagcccaacgagcccgttcaacacctctggaggacccagcccagactacagcccgacctctccaaattacagccctagcggaagctactcccccactgcaccgggctactccccgtcgtccacaggccagggtaatgacaaggatgataagagcgctcgttgaagaggcacaggagaacaaggcgctctagagcactcgatgaaggcactcggtgatggccacatgggaagatcgaggcacttttttttcccttgagtttttgtatggttgatgaactctgagagcaaacttgtatttttccgagctgctaatagcagaaatagttgtttatgtatgatactagaactaaggactggactgtgctgcgacttgataagtggttaaccgcgtggtcgcccctcagagagtaacacatgtagtaatgtttaatgataatatcgtgactgtacttggtactactatgctatggtgtactagtgtattgcatgcgcgcgtggagcagagtgatctgcgtgtgtatagtgtagtgtgatggtgattaaatagaaaacttagttatacagtagataaatgttgtggtatatattgtaatgcaaatttaaagtggttagacaggtcatacatgcagtttgtttgtgaggtaaacaaacaacataatattcat

SEQ ID NO: 13811 - DNA, 2014 bp, Zea Mays
cgcccatgcacggtggtgcggtggacagccggcgggggtctacaatttcctctttttgtttccccccattattggcagcggagttgttggattcgatccttgcatcatctgcctggcgtgacgatcctgacgatctcgacggcggcgccggggctacggccggcgtcctgctccgcgaccggcggaggcgtcgtcggggagtgcgcgcgggcgtcgggggcgcagctgggggtgctgtacctggcgctgtacctgacggcgctgggcacgggtgggctaaagtcgagcgtgtcggggttcgggtcggaccagttcgacgagtcggacggcggggagaagcggcagatgatgcgcttcttcaactggttcttcttcttcatctcgctggggtcgctgctggccgtcaccgtgctggtgtacgtccaggacaacctgggcaggcgctggggctacggcgcctgcgcctgcgccatcgccgcgggcctcctcgtcttcctggccggcacacgcaggtaccgcttcaagaagctggccggcagccccctcacgcagatcgccgccgtcgtcgtcgccgcctggcgcaagcgccgcctccctctccccgccgaccccgccatgctctacgacgtcgacgtcggcaaggccgccgccgtcgaggatgggtcctccagcaagaagagcaagcgcaaggagcgcctcccccacaccgaccagttccgcttcctggaccacgcggcgatcaacgaggatccggcggcgggggcgagcagcagcagcaagtggcggctggcgacgctgacggacgtggaggaggtgaagacggtggcgcggatgctgccgatctgggcgaccacgatcatgttctggacggtgtacgcgcagatgaccaccttctcggtgtcgcaggccaccaccatggaccgccgcgtcgggggctcgttccagatccccgcgggctccctcaccgtcttcttcgtcggctccatcctgctcaccgtgcccgtctacgaccgcctggtggtgcccgtcgcgcgccgcgtcagcggcaacccgcacggcctcaccccgctgcagcggatcgccgtcggcctcgcgctctccgtcgtcgccatggcgggcgccgcgctcacggaggtccgccgcctccgcgtcgcgcgcgattcctccgagtccgcctccggaggcgtcgtgcccatgtccgtgttctggctcatcccgcagttcttcctcgtgggggcgggcgaggcgttcacgtacatcggccagctcgacttcttcctgcgcgagtgccccaaggggatgaagaccatgagcacggggctgttcctcagcaccctgtcgctgggattcttcgtcagctccgcgctcgtcgccgccgtgcacagggtcacgggcgaccgccacccctggatcgccaacgacctcaacaagggccgcctcgacaacttctactggctgctcgccgccgtctgcctcgccaacctactagtctacctcgtcgccgcccgctggtacaagtacaaggcgggccgccccggcgccgacggcagcgtcaacggcgtcgagatggccgacgagcccacgctccactgatccatccatgttcgatcgatcgacgaggcacgcgacggacgaccctaaattgaaccctatacaccgagcttaattatatatccgtccgatcgtcgtcggtcagattcattgctagctccgcgtgttgtaccatcgtgtcagtcagtgtatacgagtgtgtatcttttgtatccaagtacagcacgcgcgcgtgcgtaagcgtgtagttataaaaattaataacatgtttcttagaggagtgaggggggaattgtaaaaccgcttgtcaattgggctaagatcgttcgggacactgagcaaactcagaatgagttaagtttttcattttcatataaccaaccgtctgtgtgctagtacttgacacctttaaatgatttagggtcgaataaagtctatctttagagaactgagtcaactcttc

SEQ ID NO: 13812 - DNA, 1373 bp, Zea Mays
cttagctttgcatgcatgcctctccgtgtcagcttgttcaagtggcccccaccccactgcactgatagcaacctcaatcttcctggaccacgcggcgatcaacgaggatccggcggcgggggcgagcagcagcagcaagtggcggctggcgacgctgacggacgtggaggaggtgaagacggtggcgcggatgctgccgatctgggcgaccacgatcatgttctggacggtgtacgcgcagatgaccaccttctcggtgtcgcaggccaccaccatggaccgccgcgtcgggggctcgttccagatccccgcgggctccctcaccgtcttcttcgtcggctccatcctgctcaccgtgcccgtctacgaccgcctggtggtgcccgtcgcgcgccgcgtcagcggcaacccgcacggcctcaccccgctgcagcggatcgccgtcggcctcgcgctctccgtcgtcgccatggcgggcgccgcgctcacggaggtccgccgcctccgcgtcgcgcgcgattcctccgagtccgcctccggaggcgtcgtgcccatgtccgtgttctggctcatcccgcagttcttcctcgtgggggcgggcgaggcgttcacgtacatcggccagctcgacttcttcctgcgcgagtgccccaaggggatgaagaccatgagcacggggctgttcctcagcaccctgtcgctgggattcttcgtcagctccgcgctcgtcgccgccgtgcacagggtcacgggcgaccgccacccctggatcgccaacgacctcaacaagggccgcctcgacaacttctactggctgctcgccgccgtctgcctcgccaacctactagtctacctcgtcgccgcccgctggtacaagtacaaggcgggccgccccggcgccgacggcagcgtcaacggcgtcgagatggccgacgagcccacgctccactgatccatccatgttcgatcgatcgacgaggcacgcgacggacgaccctaaattgaaccctatacaccgagcttaattatatatccgtccgatcgtcgtcggtcagattcattgctagctccgcgtgttgtaccatcgtgtcagtcagtgtatacgagtgtgtatcttttgtatccaagtacagcacgcgcgcgtgcgtaagcgtgtagttataaaaattaataacatgtttcttagaggagtgaggggggaattgtaaaaccgcttgtcaattgggctaagatcgttcgggacactgagcaaactcagaatgagttaagtttttcattttcatataaccaaccgtctgtgtgctagtacttgacacctttaaatgatttagggtcgaataaagtctatctttagagaactgagtcaactcttc

SEQ ID NO: 13813 - DNA, 5307 bp, Zea Mays
ttcaaaatccaaaccccaacatatcatatatctctagccataaaataaagagatgacatacattcatatttggttttgtctcttctttacacttgcttttttatctctcctctgctctccgccctctcttttttcgctttttttatagcccctcaaacccccacacaccacgagagagaggccaccaaaacccaccttggcaacaaagcagacgagcacgcaggacgtcgtacgagagggagtcggtagagcgcggcgcgcacgccacaccgcaggagaagcgagaaccaaccatcgcatggcgatggcggcggcggtggccgcggtgctcgctgccatcatggcgtccgccgccgcgcaggcggcggaggtgcgctgggaggtggcgtacctcaccgtggagcccctcggccgaccgcagaaggtgattgcgataaacaaccagttcccgggtcctctgctgaacgtgacgacgaaccagaacgtgagggtgaacgtccagaacaaccttgacgagcccctcctcatcacctgggacggaatccagatgaggatgaactcgtggcaggacggcgtcacgggcaccaactgccccatccctcccggatggaactggacctacgagttccagctcaaggaccagatcggcagcttcttctacttcccgtcgctcggcctccagcgagctgccggcgggttcggccccatcaccgtcaacaaccgcgccaccgtgcccgtccccttcgaccagcctcatggcgacatcaccctgttcatcggggactggtacaccaagggccacgttgaactgaggaacatgctagatgatggtcaggacctaggggcaccagatgctattctaatcaatggaagggcaccttacagatatgacagtgcgctggttccggatggccttccctacgaaatcgttggagttgagccaggcgaaacatatcgcttccgcgtccacaacgttggcgtctcaacaagcctcaacttcaggatccagaaccacaacatgcgtctggtggagaccgaagggacctacaccaaccagcagaactacgccgacctggacatccacgttggacagtcctactctttcttggtgaccatggatcagaacgcgagcaccgactactacattgtggcgagcccgaggttcgtaggcaatcctcgatggcacgaagtggctggtgtggccgtccttcagtactccaactccaagggcagggcttctggcagcctccctgatgctccagatgatcactacgacaagtaccgctccatgaaccaggcaaggtccatcagaatgaacacgagcgccggcgctgcccgtccaaacccgcagggatcattccactacggatcgatcaacgtcacgcagaccttcgtcctcaagaacgagcagcctctgagcatcggcggaaagcgccggaggacgatcaacagggtgtcctactcgcctccggagacgccgctgaggctggccgacctccacaacctgaccggagtctacgcagccgacttccccgcgacgcccagcgacgacgacgcgccgccgagggtagcttcgtccgcgctcaacgcgtcctacaaggggttcctggagatcgtgttccagaacaacgacaccgacgtccagacctaccatctcgatggctactccttctttgttgtcgggatggattacggcgagtggacaccggacaggaggagtgagtacaacaagtgggatgccatctctcgctgcacgactcaggtcttccccgggggctggacggcggtcctagtctcgctcgacaacgttggtgtctggaatctgcgcgccgaaaggctggatgactggtacagagggcaggaggtctatgtgaaggttgccgatccactgggctacaacatcaccgagatggtcgtcccggacaatgccctctactgtggtctactgaaggagaggcaaaagccacaggttcatgagtcgaacagcaagtcgtcggcgcaaggcgatgctggatggagcaaccgactcctcgcaaccatgatcctggtcgtcgcagctgtgatcttcagttgattctctcttcttctttttttctccaaagttttttggtagatttttgcctagaggaaatagaacattgaaacgtctagcctacaagttcagcatagggtagttcgtggagataggatctggccgagctgtttggtagtgtagggcagctttgaatgatgtctgtggagaaggcaagaaacttgatactcgaatgagatttatcagttacccagtgcgtgttttttttgaattttctcgacatatattaagcttttgatgcctatgaacacaaccctagagagggcaaagagattacagtcgtgagaggacgagggagagacatccatggcaagcaagagctcgggtggattcagtagttttcagcctacaagcccacaggcgagcatctgcgatacacgcacggagggttacagttaggggggtcctgcctgaagatatagttgttacacttcttccacaagtgtcactaacagagcaccacgaaggtggggaagtcacttgatagaaggtcgaggaaggcggtgcaggttgaagcagctcaagtcctcgctgatcttgtaacaccccggggtccacaaacaccctagaatggtactaaataacacttctgacatctatatataaaatttcggcagcatcccctttgcaatttgcataaatgagggggcaacagtgtataaacttatatcatgacaaaaacatactaagtattattaatcggctagcaaagagaagttaaacatacgacatgatctgaattaactagtgcgcacgactagttaaaaaacaaacttcctttgacaataagttctaattaaatcatggctgcgcctgggcagcgttattgtgagagtgaaagtggacgtgctgctactcccctcattcccagcatgtataaagtacctgcattgagtaatgcaagagtgagatgacacatctcagcaagtaaaataatatcaaactgtttaaccacataagaacattgttttaccaccacttgattccacaaccttcttattacgaaggtgcagcacgtatacaacgtacaacacacctagtcaccacacctcgcaggtggaaaccacaatagtaacatagtaatgtcacacttcatatatgcctcatgagtgcaaatgtctgcaaatgcaagaatgacttctgccttcatatctctaaggatatgaagccgcatcgtacccctcctcgggcaacgtacaatgctaaaaatgtaccggtacagtcggaccataagatcgcgacataacttcaaaatgcaagatggatgatgcgatgtgcatgtcatgcctacaacacttcatataacgtgattcaaaaagatacttcaacttcatccaagatgggaatcaaccacgtatatcattaccaaattatgatcatccacaatattagacaattgagaattaatactttcaaacaaataaacttcatcatagaattcaatgattaacataattataacttatgcatactcaatgacagggattaggatgcaaaccaaacggtagcaaccaccactgtatttacttgcctttaccgggagttcgggcaaatccctaagtacgatccggaagtctaccacctgtttttgacacacaacttagtgcaccaatttcacataatcaggctcataaacgacgccgcacctacgcacaaactcaaaccccgccgcgggttacatctctccccactcccaccaaactgcagcgacgctgcttaataatttcataactttaaaattatgacatcagtggtaacaaacaaaaactccagaggcatctacataaaattccccacaagttttgtatataatttataattaaattccaacatttaattagcccaaaatagtccacaagatgaaccctgtaatctgtttttttgtcttttggcagcgacatacccggattcaaacagcgatatcttttaaaatataattccaaatcaagcgcataagtactcattggaaagataagacaaagccctacatgattatcatactggttaacactaattacccacgaaaaattcccagaaactgctaatactactgctgttcacccacctgaaaaatctgttttttggacagcaacataaccggatttaaacaatgatatctcctaaattataactccgaatcgagcgcataagtactcgttggaaaggtatgacaaagctctacatgattctcccactgatccccactaattgcccacgaaaaattcccagaaatccctagaactactgctgttcgtccacccactaaatttctggacaacacctctaccaaatcgcataggtaaacatataaccaattggattgcagcacaaatacaacaaaatgatcacgaaaatcaccttgggttcctcccttcctccttcttttcttccttcttcctccctccaaactcccatggaagactcgcacccacacgacggacaccaagcgggaaggctccaccttggagaggaagaggtggggggctagggttgaggggtggagctgcaatcacttggggaagaaggagaggaattggggcggctgcaagagtggaagagaggaagagagaggggggaggggcggccaaagggatgggggagtgagagggagggggcggctagggttaagggggggaactaatgggctccccaccgccggatcgagatccagggcccaaactcgctctcacgtctgctcccgaccccagcgcacaaatccaacaagtaatctactgttttattggtgaatgcttcctaaaaaactccaactacacagatcacaaaagaaaagggaaaaataaatttaacttcttttcagaaaattgggtatcacactctacccccttaaaaagaattcgacctcgaattccgacgcttctatcggaacgacaaggaaagatcaatgaatcaacaaaactcacacataaagaaaagttcgggtacttctgccgcatcagctcctcaagctcctaggattctaagatacgcagcagacgacactctagagtctggtcttgcaacacaagaatcggctctagctcgatttgatggtctggattccgcaaatacttcctcaacataaagacatggaatacatggtgtactctgatcgtagactccgacaattgtaggtgctaagccaagctgccaactcgggctaagatagtagacggtcctatataactcggacaaagctttcctgacaccaaatcaac

SEQ ID NO: 13814 - DNA, 726 bp, Zea Mays
caaaccatcagcatacctggaagcttcgccgcaatcaagaagagatcttagagaatccgcagccaaagcatgtttcacatcaatctaatgattttttacacaccaatccacacagaaattttagagtataaaagcataaattgactctatcatataataccaattattaccattgtagggcagatccagatagcatttcggctttgaatgcgtagagttggttatgaaagagaattactgcttaagtgcttagtatcatgaagattagatttctaacgaaaaagatgcaatatgcggtgtaccagattttttttctagttttctgcactgctgtgcagaacttaatagtcaagacacacagaaaacaatataagaacaatgatacagatataaaaaaataaaagagaagagcttgaaaagtagtttgcttggaagaattttcaaatttgcacaaaaaggttattggactactttaagcatatttactttgttatgcaaaaaaatctagagctggcttaagaatcataaaaaatgatttaactttctatccaaggtacaagaggtgaatattaacatcaattaccttatgtgcaacaccagcacgttggtagtacttcttggcaacttctaggcatctgtcatccctctcacaagcaaccaagtgaccagattcaggaagggccagtgcaacagctaatgatgaatacccctatagaaagatgaaag

SEQ ID NO: 13815 - DNA, 1590 bp, Zea Mays
cccacacccacgtgagcagaggatatttccgccgccaggagagaaggtgatggccatcaccttggtgcttcacctgcgacgccacatggtgctgacccacgcccccaccattgcatagcctagtagtgtggttctggagaatcttcagtgtgcacggatcctgtgttcagtcagatgagccccatagccaagatcaccgtcgttgtggagcgtgggacgcgatgatgggttactgcggcatcgggcttattgggtggtcctggaaagtcaccataccactccgcacctcttcatggcctccccgtgcgaagctatcgaccaaagcgccaccagtttcacgccggagttggtgctccaccgtgatgcctccttgctccgcggactggctactccacaacacattcgcagctactatgcagaggggctcgtcgtcgcagttggactacgtcctggtgccgctggggctggctgtgatggtgggctaccacgtgtggctgctcctccgcatccgcagccggccggagactaccgtgatcggcatcaacgccgtgaaccgccgcatctgggtgcgccacatcatggaggacccgtccggcaagcacgcagtgctggcggtgcagacgctgcgcaacaccatcatggcgtccaccgtgctggcctccgtggccatcacgctcagctcgctcgtcgccgcgctcatggccagcggcgccgccgcccacgggggcctcctcctctccgcccccggcggcggcagcgaggccgcgctggccgccaagttcctcgcggtgctcgtgtgcttcctggtggcgttcctcctcaacgtgcagtccatccggtactacagccacacggggctgctcgtcaacgtgccgctcgccgcgcaccgccgccccgcgcgcgccgtcggctacgtcaccgcagcgctcaaccggggcttctacttctggtcgctcggcgtccgcgcatactacttctcctgccccgtcttcctctggctcttcgggcccgtccccatgtgcgcctcctgcgtcgccatggtcgccgcgctctacttcctcgacgtcaacaaggagtgggaggacaaggacgacgacggcagcgaggatgaagcggacggcgatggaagaagcacggccaccgtgtgcggcggcgtctgaattcaagccgtgtcagtgtgtcacgcgagggcatatgaatcccgccaattagaaaaaaaaaatctcgcaaagaaggaagacttaacaagcaaccggatccaatgatcgttgaatccagcttacaaatcactctaccgtactgcactagtatacgtagaaattaataaatttgtctccttggtgttaatttggatccaggactttcttgagcctcgtgccactatagtatccgatgtcgctgatgtgaagtcaacttcagtgtcgtgtcgtgttgttttacgtttttgtttgtgtctcaataacaggtatcaaccatcagggtctgatggaagtatgagttcatatcaaaactcataaggtttcttttggtgtagctctagccctgctctgaccggtgaaatccatttcttggttgaataaagcacacttg

SEQ ID NO: 13816 - DNA, 471 bp, Zea Mays
cccacacccacgtgagcagaggatatttccgccgccaggagagaaggtgatggccatcaccttggtgcttcacctgcgacgccacatggtgctgacccacgcccccaccattgcatagcctagtagtgtggttctggagaatcttcagtgtgcacggatcctgtgttcagtcagatgagccccatagccaagatcaccgtcgttgtggagcgtgggacgcgatgatgggttactgcggcatcgggcttattgggtggtcctggaaagtcaccataccactccgcacctcttcatggcctccccgtgcgaagctatcgaccaaagcgccaccagtttcacgccggagttggtgctccaccgtgatgcctccttgctccgcggactggctactccacaacacattcgcagataatgggaaaaggagttccccaccttgggcctgacggcttacgacaaggttgcaacaacaac

SEQ ID NO: 13817 - DNA, 1458 bp, Zea Mays
ataaacaggagcgtggcaccgaagaaggcggcaaggcgcggaagtgtggcccgactccccggccccattcctgaccgtcagattacgatcgggaggctcaagcgcaccaactggcggcgccgccccgccgccggagagctctccggcgtcggtgcctcaccgtctcccgttattccggcgccttccgttcctcgacagaagcggggctatggtcgccagtcgtcacgcgctcgccgcacgagcaggagcaggagcagggactgctggccggttagcctccagatgggtagctgttctgcgcaacaactggaggagcgcggagggagaagggactaaacacgaggggggaggtggaggaggcggtacgactggtgagcggccactgcttcctaccagagcgatgactttgcctgcggggatggacaatgagaatccttggagaattggcttatcctggcgggaaggatatgcaaagtgcaccctacggaatttgatctctccatgaatcttgtctagtactaatccactttttgcataacttatggatggctttctctttatcaccttgaagacctcttttcctgcagtttttgcctgattgaaggtctgaaggtctggtgcggcatagattaaattggctttccatgcactggacaaaggacttcatggcccagctctctccaacgaaggagaagacggtcttgatatgtgacaaagtctgcgaacaaatgtataggcaaggattataaacatatataatgaagtgggggatgatctgtgtatcaacatttctatctattcagcattgcgtgacaaagataagacattcaactttttcgtgtatgctgctccgatgatgaggataagtggaatgaccaggaaggaaagcattgcaacttgccagcagctgataaacgcaattatgacaccagcaaagaaagtggagaagcttgcgacgaaatgacccagctgcagaagagtgaacttaagatgcagatctgaccacagagcttcaaaagacttgcatcatagtcaagtcagtgtcgaaggccccaacctcttgattaaggattgatctcagaaacgcgagccgcatgcgtgctaactgtctctcacttgagtatatccagcaggagatctctgcatgcggccaattcatccgataaaaggtctagatggggaaacaacaaaggcgtggcttactggaaatttgatttgggttgagaaaactgaaaacccagcagtgatcctcccagatggagtaaataagagaggaggagggaagatgcttaattttcattaatctgcatgttatctctactaggaaacagcaacaagccattccatcaaatgggctaatcagtacgacaaccgtgcatgttaggaacgcacaaggtcaggtccggtctgcacgccacgcatgcaataggttgaagagcgcttacaagaccaaggcgg

SEQ ID NO: 13818 - DNA, 1369 bp, Zea Mays
cggcaaggcgcggaagtgtggcccgactccccggccccattcctgaccgtcagattacgatcgggaggctcaagcgcaccaactggcggcgccgccccgccgccggagagctctccggcgtcggtgcctcaccgtctcccgttattccggcgccttccgttcctcgacagaagcggggctatggtcgccagtcgtcacgcgctcgccgcacgagcaggagcaggagcagggactgctggccggttagcctccagatgggtagctgttctgcgcaacaactggaggagcgcggagggagaagggactaaacacgaggggggaggtggaggaggcggtacgactggtgagcggccactgcttcctaccagagcgatgactttgcctgcggggatggacaatgagaatccttggagaattggcttatcctggcgggaaggatatgcaaagtgcaccctacggaatttgatctctccatgaatcttgtctagtactaatccactttttgcataacttatggatggctttctctttatcaccttgaagacctcttttcctgcagtttttgcctgattgaaggtctgaaggtctggtgcggcatagattaaattggctttccatgcactggacaaaggacttcatggcccagctctctccaacgaaggagaagacggtcttgatatgtgacaaagtctgcgaacaaatgtataggcaaggattataaacatatataatgaagtgggggatgatctgtgtatcaacatttctatctattcaggtaacttggcttgaggaaggaaagcattgcaacttgccagcagctgataaacgcaattatgacaccagcaaagaaagtggagaagcttgcgacgaaatgacccagctgcagaagagtgaacttaagatgcagatctgaccacagagcttcaaaagacttgcatcatagtcaagtcagtgtcgaaggccccaacctcttgattaaggattgatctcagaaacgcgagccgcatgcgtgctaactgtctctcacttgagtatatccagcaggagatctctgcatgcggccaattcatccgataaaaggtctagatggggaaacaacaaaggcgtggcttactggaaatttgatttgggttgagaaaactgaaaacccagcagtgatcctcccagatggagtaaataagagaggaggagggaagatgcttaattttcattaatctgcatgttatctctactaggaaacagcaacaagccattccatcaaatgggctaatcagtacgacaaccgtgcatgttaggaacgcacaaggtcaggtccggtctgcacgccacgcatgcaataggttgaagagcgcttacaagaccaaggcgg

SEQ ID NO: 13819 - DNA, 1346 bp, Zea Mays
cggcaaggcgcggaagtgtggcccgactccccggccccattcctgaccgtcagattacgatcgggaggctcaagcgcaccaactggcggcgccgccccgccgccggagagctctccggcgtcggtgcctcaccgtctcccgttattccggcgccttccgttcctcgacagaagcggggctatggtcgccagtcgtcacgcgctcgccgcacgagcaggagcaggagcagggactgctggccggttagcctccagatgggtagctgttctgcgcaacaactggaggagcgcggagggagaagggactaaacacgaggggggaggtggaggaggcggtacgactggtgagcggccactgcttcctaccagagcgatgactttgcctgcggggatggacaatgagaatccttggagaattggcttatcctggcgggaaggatatgcaaagtgcaccctacggaatttgatctctccatgaatcttgtctagtactaatccactttttgcataacttatggatggctttctctttatcaccttgaagacctcttttcctgcagtttttgcctgattgaaggtctgaaggtctggtgcggcatagattaaattggctttccatgcactggacaaaggacttcatggcccagctctctccaacgaaggagaagacggtcttgatatgtgacaaagtctgcgaacaaatgtataggcaaggattataaacatatataatgaagtgggggatgatctgtgtatcaacatttctatctattcaggaaggaaagcattgcaacttgccagcagctgataaacgcaattatgacaccagcaaagaaagtggagaagcttgcgacgaaatgacccagctgcagaagagtgaacttaagatgcagatctgaccacagagcttcaaaagacttgcatcatagtcaagtcagtgtcgaaggccccaacctcttgattaaggattgatctcagaaacgcgagccgcatgcgtgctaactgtctctcacttgagtatatccagcaggagatctctgcatgcggccaattcatccgataaaaggtctagatggggaaacaacaaaggcgtggcttactggaaatttgatttgggttgagaaaactgaaaacccagcagtgatcctcccagatggagtaaataagagaggaggagggaagatgcttaattttcattaatctgcatgttatctctactaggaaacagcaacaagccattccatcaaatgggctaatcagggctgctgaagatctccgcatctggctcggtggtggtggttttcgacggggtttgatgttttggctgatgaggaagggaaccgcaat

SEQ ID NO: 13820 - DNA, 1421 bp, Zea Mays
cggcaaggcgcggaagtgtggcccgactccccggccccattcctgaccgtcagattacgatcgggaggctcaagcgcaccaactggcggcgccgccccgccgccggagagctctccggcgtcggtgcctcaccgtctcccgttattccggcgccttccgttcctcgacagaagcggggctatggtcgccagtcgtcacgcgctcgccgcacgagcaggagcaggagcagggactgctggccggttagcctccagatgggtagctgttctgcgcaacaactggaggagcgcggagggagaagggactaaacacgaggggggaggtggaggaggcggtacgactggtgagcggccactgcttcctaccagagcgatgactttgcctgcggggatggacaatgagaatccttggagaattggcttatcctggcgggaaggatatgcaaagtgcaccctacggaatttgatctctccatgaatcttgtctagtactaatccactttttgcataacttatggatggctttctctttatcaccttgaagacctcttttcctgcagtttttgcctgattgaaggtctgaaggtctggtgcggcatagattaaattggctttccatgcactggacaaaggacttcatggcccagctctctccaacgaaggagaagacggtcttgatatgtgacaaagtctgcgaacaaatgtataggcaaggattataaacatatataatgaagtgggggatgatctgtgtatcaacatttctatctattcagcattgcgtgacaaagataagacattcaactttttcgtgtatgctgctccgatgatgaggataagtggaatgaccaggaaggaaagcattgcaacttgccagcagctgataaacgcaattatgacaccagcaaagaaagtggagaagcttgcgacgaaatgacccagctgcagaagagtgaacttaagatgcagatctgaccacagagcttcaaaagacttgcatcatagtcaagtcagtgtcgaaggccccaacctcttgattaaggattgatctcagaaacgcgagccgcatgcgtgctaactgtctctcacttgagtatatccagcaggagatctctgcatgcggccaattcatccgataaaaggtctagatggggaaacaacaaaggcgtggcttactggaaatttgatttgggttgagaaaactgaaaacccagcagtgatcctcccagatggagtaaataagagaggaggagggaagatgcttaattttcattaatctgcatgttatctctactaggaaacagcaacaagccattccatcaaatgggctaatcaggctgctgaagatctccgcatctggctcggtggtggtggttttcgacggggtttgatgttttggctgatgaggaagggaaccgcaat

SEQ ID NO: 13821 - DNA, 1350 bp, Zea Mays
gcgcggaagtgtggcccgactccccggccccattcctgaccgtcagattacgatcgggaggctcaagcgcaccaactggcggcgccgccccgccgccggagagctctccggcgtcggtgcctcaccgtctcccgttattccggcgccttccgttcctcgacagaagcggggctatggtcgccagtcgtcacgcgctcgccgcacgagcaggagcaggagcagggactgctggccggttagcctccagatgggtagctgttctgcgcaacaactggaggagcgcggagggagaagggactaaacacgaggggggaggtggaggaggcggtacgactggtgagcggattaaattggctttccatgcactggacaaaggacttcatggcccagctctctccaacgaaggagaagacggtcttgatatgtgacaaagtctgcgaacaaatgtataggcaaggattataaacatatataatgaagtgggggatgatctgtgtatcaacatttctatctattcaggtaacttggcttgaggtatgtctgttaactgatgtcacaatacctgctctacaactgatactgcctctgaaacaatagcattgcgtgacaaagataagacattcaactttttcgtgtatgctgctccgatgatgaggataagtggaatgaccaggaaggaaagcattgcaacttgccagcagctgataaacgcaattatgacaccagcaaagaaagtggagaagcttgcgacgaaatgacccagctgcagaagagtgaacttaagatgcagatctgaccacagagcttcaaaagacttgcatcagtataatgctcatatgattgtgaaatccattaccttctctcctattgcatcttgtatgacactcatgtagttggttactccggtgatgatggttgcagtagtcaagtcagtgtcgaaggccccaacctcttgattaaggattgatctcagaaacgcgagccgcatgcgtgctaactgtctctcacttgagtatatccagcaggagatctctgcatgcggccaattcatccgataaaaggtctagatggggaaacaacaaaggcgtggcttactggaaatttgatttgggttgagaaaactgaaaacccagcagtgatcctcccagatggagtaaataagagaggaggagggaagatgcttaattttcattaatctgcatgttatctctactaggaaacagcaacaagccattccatcaaatgggctaatcagtacgacaaccgtgcatgttaggaacgcacaaggtcaggtccggtctgcacgccacgcatgcaataggttgaagagcgcttacaagaccaaggcgg

SEQ ID NO: 13822 - DNA, 1779 bp, Zea Mays
gcgcggaagtgtggcccgactccccggccccattcctgaccgtcagattacgatcgggaggctcaagcgcaccaactggcggcgccgccccgccgccggagagctctccggcgtcggtgcctcaccgtctcccgttattccggcgccttccgttcctcgacagaagcggggctatggtcgccagtcgtcacgcgctcgccgcacgagcaggagcaggagcagggactgctggccggttagcctccagatgggtagctgttctgcgcaacaactggaggagcgcggagggagaagggactaaacacgaggggggaggtggaggaggcggtacgactggtgagcggccactgcttcctaccagagcgatgactttgcctgcggggatggacaatgagaatccttggagaattggcttatcctggcgggaaggatatgcaaagtgcaccctacggaatttgatctctccatgaatcttgtctagtactaatccactttttgcataacttatggatggctttctctttatcaccttgaagacctcttttcctgcagtttttgcctgattgaaggtctgaaggtctggtgcggcataggtaattgatctgaatcaatgtagtaggaaaatccattaaatatagaatacatgcaaattaaaaaataatggcaactttggctaaaggatgtgagttgcttcagtgttttgtttgaatggtaactatatttggaaaagaatttttttctagtgactgaaccaatcagtgagtttgtgtaattattacattgcaccaaagaggatgctcatgatagcagctatcgtgccacctcctgttgccttgtttttggttactgcaactgccccaatccaaaccatcagtgcccatgaacaaaaagtcactgcttggaacattccaagtcctattccctttatcaatgcttccttcttgcttagattaaattggctttccatgcactggacaaaggacttcatggcccagctctctccaacgaaggagaagacggtcttgatatgtgacaaagtctgcgaacaaatgtataggcaaggattataaacatatataatgaagtgggggatgatctgtgtatcaacatttctatctattcagcattgcgtgacaaagataagacattcaactttttcgtgtatgctgctccgatgatgaggataagtggaatgaccaggaaggaaagcattgcaacttgccagcagctgataaacgcaattatgacaccagcaaagaaagtggagaagcttgcgacgaaatgacccagctgcagaagagtgaacttaagatgcagatctgaccacagagcttcaaaagacttgcatcatagtcaagtcagtgtcgaaggccccaacctcttgattaaggattgatctcagaaacgcgagccgcatgcgtgctaactgtctctcacttgagtatatccagcaggagatctctgcatgcggccaattcatccgataaaaggtctagatggggaaacaacaaaggcgtggcttactggaaatttgatttgggttgagaaaactgaaaacccagcagtgatcctcccagatggagtaaataagagaggaggagggaagatgcttaattttcattaatctgcatgttatctctactaggaaacagcaacaagccattccatcaaatgggctaatcagtacgacaaccgtgcatgttaggaacgcacaaggtcaggtccggtctgcacgccacgcatgcaataggttgaagagcgcttacaagaccaaggcgg

SEQ ID NO: 13823 - DNA, 633 bp, Zea Mays
gcgcggaagtgtggcccgactccccggccccattcctgaccgtcagattacgatcgggaggctcaagcgcaccaactggcggcgccgccccgccgccggagagctctccggcgtcggtgcctcaccgtctcccgttattccggcgccttccgttcctcgacagaagcggggctatggtcgccagtcgtcacgcgctcgccgcacgagcaggagcaggagcagggactgctggccggttagcctccagatgggtagctgttctgcgcaacaactggaggagcgcggagggagaagggactaaacacgaggggggaggtggaggaggcggtacgactggtgagcgggtctagatggggaaacaacaaaggcgtggcttactggaaatttgatttgggttgagaaaactgaaaacccagcagtgatcctcccagatggagtaaataagagaggaggagggaagatgcttaattttcattaatctgcatgttatctctactaggaaacagcaacaagccattccatcaaatgggctaatcagtacgacaaccgtgcatgttaggaacgcacaaggtcaggtccggtctgcacgccacgcatgcaataggttgaagagcgcttacaagaccaaggcgg

SEQ ID NO: 13824 - DNA, 624 bp, Zea Mays
gcgcggaagtgtggcccgactccccggccccattcctgaccgtcagattacgatcgggaggctcaagcgcaccaactggcggcgccgccccgccgccggagagctctccggcgtcggtgcctcaccgtctcccgttattccggcgccttccgttcctcgacagaagcggggctatggtcgccagtcgtcacgcgctcgccgcacgagcaggagcaggagcagggactgctggccggttagcctccagatgggtagctgttctgcgcaacaactggaggagcgcggagggagaagggactaaacacgaggggggaggtggaggaggcggtacgactggtgagcgggtctagatggggaaacaacaaaggcgtggcttactggaaatttgatttgggttgagaaaactgaaaacccagcagtgatcctcccagatggagtaaataagagaggaggagggaagatgcttaattttcattaatctgcatgttatctctactaggaaacagcaacaagccattccatcaaatgggctaatcaggctgctgaagatctccgcatctggctcggtggtggtggttttcgacggggtttgatgttttggctgatgaggaagggaaccgcaat

SEQ ID NO: 13825 - DNA, 1305 bp, Zea Mays
tctgcgcagcgatttcagatcaattttcttgatactgtggccatcaatgaccactgcttcctaccagagcgatgactttgcctgcggggatggacaatgagaatccttggagaattggcttatcctggcgggaaggatatgcaaagtgcaccctacggaatttgatctctccatgaatcttgtctagtactaatccactttttgcataacttatggatggctttctctttatcaccttgaagacctcttttcctgcagtttttgcctgattgaaggtctgaaggtctggtgcggcatagattaaattggctttccatgcactggacaaaggacttcatggcccagctctctccaacgaaggagaagacggtcttgatatgtgacaaagtctgcgaacaaatgtataggcaaggattataaacatatataatgaagtgggggatgatctgtgtatcaacatttctatctattcaggtaacttggcttgaggtatgtctgttaactgatgtcacaatacctgctctacaactgatactgcctctgaaacaatagcattgcgtgacaaagataagacattcaactttttcgtgtatgctgctccgatgatgaggataagtggaatgaccaggaaggaaagcattgcaacttgccagcagctgataaacgcaattatgacaccagcaaagaaagtggagaagcttgcgacgaaatgacccagctgcagaagagtgaacttaagatgcagatctgaccacagagcttcaaaagacttgcatcagtataatgctcatatgattgtgaaatccattaccttctctcctattgcatcttgtatgacactcatgtagttggttactccggtgatgatggttgcagtagtcaagtcagtgtcgaaggccccaacctcttgattaaggattgatctcagaaacgcgagccgcatgcgtgctaactgtctctcacttgagtatatccagcaggagatctctgcatgcggccaattcatccgataaaaggtctagatggggaaacaacaaaggcgtggcttactggaaatttgatttgggttgagaaaactgaaaacccagcagtgatcctcccagatggagtaaataagagaggaggagggaagatgcttaattttcattaatctgcatgttatctctactaggaaacagcaacaagccattccatcaaatgggctaatcagtacgacaaccgtgcatgttaggaacgcacaaggtcaggtccggtctgcacgccacgcatgcaataggttgaagagcgcttacaagaccaaggcgg

SEQ ID NO: 13826 - DNA, 3693 bp, Zea Mays
  misc_feature (1)..(2): n is a, c, g, or t
nnaagcttgtcaaatgctcgattgaaggcgcatgcatgaaaggcctctctagtaggacatctgcattgaacacagcatctgaatgtttacatatcctcaggttctggagcagggattatggaagaggcatttcattagctgaaagttcacattcactaacagtgctcgtctcgattgtatcattcttgcaagctgaactgaacatctctgataaaccagcaaatgccactggcatttcttcccgcaattctggatctgcgaatagtaaaaattccaatatttgggatatgaagatatcagcattttcgatgctcgaagatatattgagtaaggttgcatcaaatatgacagaaaatctgtggcagtctgtcatcgaggtcttgaggaaagttatggattttgtcacagcaaggaaccttgttatagagagtagcatcatgtcaagattttatacatcttttcttcgttgtctacatttggttcttgtggatcccaaaggaccactttcagggcatgttgcagggtttgtagcaaatctgcagatatttttcgtatatgggctgaggtcatcttcacctcctacactagctccaaaagaaactagaacagattcaaaacccagagcttcacgtggacgatatagaccacctcatttgaggaacaaggagagaagagagaatgattcactggaaggtcaaaattcagatagtgagtattcttggtatgatatgagctcatcagactcagacctgagtgatagtgatggttatgcaaaaagtggagaccgcttccggagttcgaaggctagattagctgccattctttgtatacaggatatctgccatgctgatccaaagttacttacttcacaatggccagtacttttgcctgagaatgatgttctccaacaaaggaaatatcaagcaactctgatgacatgcttgctttttgatcctataacgaaggtacgtgttgaggcagcatcaaccattgctaccatgctggaacggcaagcattagttttgacacaagttgcagagtacaaggagtcgtctaagcgtggatcattcactacattatcttcctcacttggtcaaatattgatgcaactgcatacaggagcactgtacttgatacagcgtgaaactcaagctactttgcttgcggcattattcagagttctcattcttttgatatctgctacaccgtacgctcggatgccaaaggaattgttgccaacagtcattaaagtattgtgcagtagattactgaacaaacactcgaataagactgaacattatgccgtgctggttactgttctaagttgcttggagacagctttttcaaaagtgccacctactttggatgtctttgcggttctcactgaggattgctgtgctggaccatcacatgagcaggaagaatcaaatgttatagcttttcttcttcattgtatagaggaggaaatgcattacagtgttagacatggagccttccaggtgctgagatcagcggttcacaactacccaagctgtgcaaacatgatttgggaaaaacttcgagacaatgttcttaacttgttgcaaatacaaagttttgaagaccaaaagtatgatgctaactttgggcctcctggagctaaagaagaatcatcaatcaagggaagatgtcttgtagctggaataaaggtaatggatgaatgtctgcgtgtttcatctggattcacaggagcagatgacatcaaagaatgcagattactggatattcagcaaatttctgattgtaccataaataaaactattaagtctgcacctcactttgaaatggaagctgctggatcatcacagaattgcactttggacataacacttggaattaaccgttggatcgaggtgatagagactcatctccctcagggattatcccatggttctgctatggtcaggacagcatccctcacatgctttgctggcatgacttctgatgtattcttctccctgcctgaaaataagagagactatgtgacctcttcttctgttcatgcggcgttaaatgatatggttcctagtgtaagatcagctgcatgtcgagctattggcattgttgcatgttttcctcagatattgtcaagctctagcctaccaggcaagttcatagatgccattgagttcaatacacataactcatcaactccagttcgtgtcaccgctgcatgggctttggcaaatctctgttcttgtattcgttttagagcactggaagtgcatacagatccctatgcaggtgtaggtgtattgagcaaatcaagcatatctcttttggttgaagttgctttgcgtctggccaaagatagtgaaaaagtaaaatcaaacgctgttagagctcttggttatctttcaagatttatcagattcaattaccacgccggcacaataaatgacccaagtgattcagttttttatggagatcctgtgtggcttgaaagaatggtgcaggctttgatgtcttgtgtgacaactgggaatgtaaaggtccaatggaatgtttgccatgcccttagcaacttgttcatgaatgataccttgagacttcaagacatgccttgggcatcaagtgtttatagcatacttctacttctaatccgggactcaaacaattataagataaagatgcatgcagctgttgctctatcagtgccagtgtcaaggcttgattacggcagctcgtttccagatgttgttcgaggcctcgtccatgctctcgagtcattgaactcaaacaattcatcgttaccttcaaatttcaaacagagagacaacctcgagaagcagcttacgtttactgctctccatttgcttagttttgtgtcaccaaacgacgatccaagcctgaaagattttcttaccaagaaatcgtcgttcctagaagactggctgagatcactatgcgcatcgttcaacagctcggagcgccagcccttgccaacggaggccacaaacgacgaggacggcttcagcccaaacgtgactcagaaaggcatgctgtcttccgccctgcagtccttgctcggcgtgtacgcgggcaggacccagcaggtcatcacccagagatttgagcaactggctagaagcgtcgcttgaatggtgagcagcgacgagcagtcaggtgtggtctccactccagcctccattaacaagcagcgatatattggtcgtcgtctacccctcaggacggacagcgcgtcaggcagtggatccttaaattctgccgaatcccatgagctccaggcggcacttgtctcggatcttggctgtcatcatgcacaggctctgcaagcctggcttggtcggtgttttcgtcgttgtttacttgaaacatcgttactgatggcgctgttatgtagatgggccttttccctggtcctggggcttcctgcttgcttgataaaaggttggtatcacccgaccacggtccacgtggacgatattacaagatgttcattgttcttggcaagaggggtcatgaatgccgtccaaatctgttggagtccgtcgctagtgccactgctgttattgagcccatgtgtgtgtgtgcgcgcgtgtgttttgttcatgtaccaaccttcataaattgcttgacgctctgcactgttcgacgatcacttccaatgctctagtccgtaacgttgctgaa

SEQ ID NO: 13827 - DNA, 3699 bp, Zea Mays
  misc_feature (1)..(2): n is a, c, g, or t
nnaagcttgtcaaatgctcgattgaaggcgcatgcatgaaaggcctctctagtaggacatctgcattgaacacagcatctgaatgtttacatatcctcaggttctggagcagggattatggaagaggcatttcattagctgaaagttcacattcactaacagtgctcgtctcgattgtatcattcttgcaagctgaactgaacatctctgataaaccagcaaatgccactggcatttcttcccgcaattctggatctgcgaatagtaaaaattccaatatttgggatatgaagatatcagcattttcgatgctcgaagatatattgagtaaggttgcatcaaatatgacagaaaatctgtggcagtctgtcatcgaggtcttgaggaaagttatggattttgtcacagcaaggaaccttgttatagagagtagcatcatgtcaagattttatacatcttttcttcgttgtctacatttggttcttgtggatcccaaaggaccactttcagggcatgttgcagggtttgtagcaaatctgcagatatttttcgtatatgggctgaggtcatcttcacctcctacactagctccaaaagaaactagaacagattcaaaacccagagcttcacgtggacgatatagaccacctcatttgaggaacaaggagagaagagagaatgattcactggaaggtcaaaattcagatagtgagtattcttggtatgatatgagctcatcagactcagacctgagtgatagtgatggttatgcaaaaagtggagaccgcttccggagttcgaaggctagattagctgccattctttgtatacaggatatctgccatgctgatccaaagttacttacttcacaatggccagtacttttgcctgagaatgatgttctccaacaaaggaaatatcaagcaactctgatgacatgcttgctttttgatcctataacgaaggtacgtgttgaggcagcatcaaccattgctaccatgctggaacggcaagcattagttttgacacaagttgcagagtacaaggagtcgtctaagcgtggatcattcactacattatcttcctcacttggtcaaatattgatgcaactgcatacaggagcactgtacttgatacagcgtgaaactcaagctactttgcttgcggcattattcagagttctcattcttttgatatctgctacaccgtacgctcggatgccaaaggaattgttgccaacagtcattaaagtattgtgcagtagattactgaacaaacactcgaataagactgaacattatgccgtgctggttactgttctaagttgcttggagacagctttttcaaaagtgccacctactttggatgtctttgcggttctcactgaggattgctgtgctggaccatcacatgagcaggaagaatcaaatgttatagcttttcttcttcattgtatagaggaggaaatgcattacagtgttagacatggagccttccaggtgctgagatcagcggttcacaactacccaagctgtgcaaacatgatttgggaaaaacttcgagacaatgttcttaacttgttgcaaatacaaagttttgaagaccaaaagtatgatgctaactttgggcctcctggagctaaagaagaatcatcaatcaagggaagatgtcttgtagctggaataaaggtaatggatgaatgtctgcgtgtttcatctggattcacaggagcagatgacatcaaagaatgcagattactggatattcagcaaatttctgattgtaccataaataaaactattaagtctgcacctcactttgaaatggaagctgctggatcatcacagaattgcactttggacataacacttggaattaaccgttggatcgaggtgatagagactcatctccctcagggattatcccatggttctgctatggtcaggacagcatccctcacatgctttgctggcatgacttctgatgtattcttctccctgcctgaaaataagagagactatgtgacctcttcttctgttcatgcggcgttaaatgatatggttcctagtgtaagatcagctgcatgtcgagctattggcattgttgcatgttttcctcagatattgtcaagctctagcctaccaggcaagttcatagatgccattgagttcaatacacataactcatcaactccagttcgtgtcaccgctgcatgggctttggcaaatctctgttcttgtattcgttttagagcactggaagtgcatacagatccctatgcaggtgtaggtgtattgagcaaatcaagcatatctcttttggttgaagttgctttgcgtctggccaaagatagtgaaaaagtaaaatcaaacgctgttagagctcttggttatctttcaagatttatcagattcaattaccacgccggcacaataaatgacccaagtaacagtgattcagttttttatggagatcctgtgtggcttgaaagaatggtgcaggctttgatgtcttgtgtgacaactgggaatgtaaaggtccaatggaatgtttgccatgcccttagcaacttgttcatgaatgataccttgagacttcaagacatgccttgggcatcaagtgtttatagcatacttctacttctaatccgggactcaaacaattataagataaagatgcatgcagctgttgctctatcagtgccagtgtcaaggcttgattacggcagctcgtttccagatgttgttcgaggcctcgtccatgctctcgagtcattgaactcaaacaattcatcgttaccttcaaatttcaaacagagagacaacctcgagaagcagcttacgtttactgctctccatttgcttagttttgtgtcaccaaacgacgatccaagcctgaaagattttcttaccaagaaatcgtcgttcctagaagactggctgagatcactatgcgcatcgttcaacagctcggagcgccagcccttgccaacggaggccacaaacgacgaggacggcttcagcccaaacgtgactcagaaaggcatgctgtcttccgccctgcagtccttgctcggcgtgtacgcgggcaggacccagcaggtcatcacccagagatttgagcaactggctagaagcgtcgcttgaatggtgagcagcgacgagcagtcaggtgtggtctccactccagcctccattaacaagcagcgatatattggtcgtcgtctacccctcaggacggacagcgcgtcaggcagtggatccttaaattctgccgaatcccatgagctccaggcggcacttgtctcggatcttggctgtcatcatgcacaggctctgcaagcctggcttggtcggtgttttcgtcgttgtttacttgaaacatcgttactgatggcgctgttatgtagatgggccttttccctggtcctggggcttcctgcttgcttgataaaaggttggtatcacccgaccacggtccacgtggacgatattacaagatgttcattgttcttggcaagaggggtcatgaatgccgtccaaatctgttggagtccgtcgctagtgccactgctgttattgagcccatgtgtgtgtgtgcgcgcgtgtgttttgttcatgtaccaaccttcataaattgcttgacgctctgcactgttcgacgatcacttccaatgctctagtccgtaacgttgctgaa

SEQ ID NO: 13828 - DNA, 3687 bp, Zea Mays
  misc_feature (1)..(2): n is a, c, g, or t
nnaagcttgtcaaatgctcgattgaaggcgcatgcatgaaaggcctctctagtaggacatctgcattgaacacagcatctgaatgtttacatatcctcaggttctggagcagggattatggaagaggcatttcattagctgaaagttcacattcactaacagtgctcgtctcgattgtatcattcttgcaagctgaactgaacatctctgataaaccagcaaatgccactggcatttcttcccgcaattctggatctgcgaatagtaaaaattccaatatttgggatatgaagatatcagcattttcgatgctcgaagatatattgagtaaggttgcatcaaatatgacagaaaatctgtggcagtctgtcatcgaggtcttgaggaaagttatggattttgtcacagcaaggaaccttgttatagagagtagcatcatgtcaagattttatacatcttttcttcgttgtctacatttggttcttgtggatcccaaaggaccactttcagggcatgttgcagggtttgtagcaaatctgcagatatttttcgtatatgggctgaggtcatcttcacctcctacactagctccaaaagaaactagaacagattcaaaacccagagcttcacgtggacgatatagaccacctcatttgaggaacaaggagagaagagagaatgattcactggaaggtcaaaattcagatagtgagtattcttggtatgatatgagctcatcagactcagacctgagtgatagtgatggttatgcaaaaagtggagaccgcttccggagttcgaaggctagattagctgccattctttgtatacaggatatctgccatgctgatccaaagttacttacttcacaatggccagtacttttgcctgagaatgatgttctccaacaaaggaaatatcaagcaactctgatgacatgcttgctttttgatcctataacgaaggtacgtgttgaggcagcatcaaccattgctaccatgctggaacggcaagcattagttttgacacaagttgcagagtacaaggagtcgtctaagcgtggatcattcactacattatcttcctcacttggtcaaatattgatgcaactgcatacaggagcactgtacttgatacagcgtgaaactcaagctactttgcttgcggcattattcagagttctcattcttttgatatctgctacaccgtacgctcggatgccaaaggaattgttgccaacagtcattaaagtattgtgcagtagattactgaacaaacactcgaataagactgaacattatgccgtgctggttactgttctaagttgcttggagacagctttttcaaaagtgccacctactttggatgtctttgcggttctcactgaggattgctgtgctggaccatcacatgagcaggaagaatcaaatgttatagcttttcttcttcattgtatagaggaggaaatgcattacagtgttagacatggagccttccaggtgctgagatcagcggttcacaactacccaagctgtgcaaacatgatttgggaaaaacttcgagacaatgttcttaacttgttgcaaatacaaagttttgaagaccaaaagtatgatgctaactttgggcctcctggagctaaagaagaatcatcaatcaagggaagatgtcttgtagctggaataaaggtaatggatgaatgtctgcgtgtttcatctggattcacaggagcagatgacatcaaagaatgcagattactggatattcagcaaatttctgattgtaccataaataaaactattaagtctgcacctcactttgaaatggaagctgctggatcatcacagaattgcactttggacataacacttggaattaaccgttggatcgaggtgatagagactcatctccctcagggattatcccatggttctgctatggtcaggacagcatccctcacatgctttgctggcatgacttctgatgtattcttctccctgcctgaaaataagagagactatgtgacctcttcttctgttcatgcggcgttaaatgatatggttcctagtgtaagatcagctgcatgtcgagctattggcattgttgcatgttttcctcagatattgtcaagctctagcctaccaggcaagttcatagatgccattgagttcaatacacataactcatcaactccagttcgtgtcaccgctgcatgggctttggcaaatctctgttcttgtattcgttttagagcactggaagtgcatacagatccctatgcaggtgtattgagcaaatcaagcatatctcttttggttgaagttgctttgcgtctggccaaagatagtgaaaaagtaaaatcaaacgctgttagagctcttggttatctttcaagatttatcagattcaattaccacgccggcacaataaatgacccaagtgattcagttttttatggagatcctgtgtggcttgaaagaatggtgcaggctttgatgtcttgtgtgacaactgggaatgtaaaggtccaatggaatgtttgccatgcccttagcaacttgttcatgaatgataccttgagacttcaagacatgccttgggcatcaagtgtttatagcatacttctacttctaatccgggactcaaacaattataagataaagatgcatgcagctgttgctctatcagtgccagtgtcaaggcttgattacggcagctcgtttccagatgttgttcgaggcctcgtccatgctctcgagtcattgaactcaaacaattcatcgttaccttcaaatttcaaacagagagacaacctcgagaagcagcttacgtttactgctctccatttgcttagttttgtgtcaccaaacgacgatccaagcctgaaagattttcttaccaagaaatcgtcgttcctagaagactggctgagatcactatgcgcatcgttcaacagctcggagcgccagcccttgccaacggaggccacaaacgacgaggacggcttcagcccaaacgtgactcagaaaggcatgctgtcttccgccctgcagtccttgctcggcgtgtacgcgggcaggacccagcaggtcatcacccagagatttgagcaactggctagaagcgtcgcttgaatggtgagcagcgacgagcagtcaggtgtggtctccactccagcctccattaacaagcagcgatatattggtcgtcgtctacccctcaggacggacagcgcgtcaggcagtggatccttaaattctgccgaatcccatgagctccaggcggcacttgtctcggatcttggctgtcatcatgcacaggctctgcaagcctggcttggtcggtgttttcgtcgttgtttacttgaaacatcgttactgatggcgctgttatgtagatgggccttttccctggtcctggggcttcctgcttgcttgataaaaggttggtatcacccgaccacggtccacgtggacgatattacaagatgttcattgttcttggcaagaggggtcatgaatgccgtccaaatctgttggagtccgtcgctagtgccactgctgttattgagcccatgtgtgtgtgtgcgcgcgtgtgttttgttcatgtaccaaccttcataaattgcttgacgctctgcactgttcgacgatcacttccaatgctctagtccgtaacgttgctgaa

SEQ ID NO: 13829 - DNA, 3798 bp, Zea Mays
  misc_feature (1)..(1): n is a, c, g, or t
naagcttgtcaaatgctcgattgaaggcgcatgcatgaaaggcctctctagtaggacatctgcattgaacacagcatctgaatgtttacatatcctcaggttctggagcagggattatggaagaggcatttcattagctgaaagttcacattcactaacagtgctcgtctcgattgtatcattcttgcaagctgaactgaacatctctgataaaccagcaaatgccactggcatttcttcccgcaattctggatctgcgaatagtaaaaattccaatatttgggatatgaagatatcagcattttcgatgctcgaagatatattgagtaaggttgcatcaaatatgacagaaaatctgtggcagtctgtcatcgaggtcttgaggaaagttatggattttgtcacagcaaggaaccttgttatagagagtagcatcatgtcaagattttatacatcttttcttcgttgtctacatttggttcttgtggatcccaaaggaccactttcagggcatgttgcagggtttgtagcaaatctgcagatatttttcgtatatgggctgaggtcatcttcacctcctacactagctccaaaagaaactagaacagattcaaaacccagagcttcacgtggacgatatagaccacctcatttgaggaacaaggagagaagagagaatgattcactggaaggtcaaaattcagatagtgagtattcttggtatgatatgagctcatcagactcagacctgagtgatagtgatggttatgcaaaaagtggagaccgcttccggagttcgaaggctagattagctgccattctttgtatacaggatatctgccatgctgatccaaagttacttacttcacaatggccagtacttttgcctgagaatgatgttctccaacaaaggaaatatcaagcaactctgatgacatgcttgctttttgatcctataacgaaggtacgtgttgaggcagcatcaaccattgctaccatgctggaacggcaagcattagttttgacacaagttgcagagtacaaggagtcgtctaagcgtggatcattcactacattatcttcctcacttggtcaaatattgatgcaactgcatacaggagcactgtacttgatacagcgtgaaactcaagctactttgcttgcggcattattcagagttctcattcttttgatatctgctacaccgtacgctcggatgccaaaggaattgttgccaacagtcattaaagtattgtgcagtagattactgaacaaacactcgaataagactgaacattatgccgtgctggttactgttctaagttgcttggagacagctttttcaaaagtgccacctactttggatgtctttgcggttctcactgaggattgctgtgctggaccatcacatgagcaggaagaatcaaatgttatagcttttcttcttcattgtatagaggaggaaatgcattacagtgttagacatggagccttccaggtgctgagatcagcggttcacaactacccaagctgtgcaaacatgatttgggaaaaacttcgagacaatgttcttaacttgttgcaaatacaaagttttgaagaccaaaagtatgatgctaactttgggcctcctggagctaaagaagaatcatcaatcaagggaagatgtcttgtagctggaataaaggtaatggatgaatgtctgcgtgtttcatctggattcacaggagcagatgacatcaaagaatgcagattactggatattcagcaaatttctgattgtaccataaataaaactattaagtctgcacctcactttgaaatggaagctgctggatcatcacagaattgcactttggacataacacttggaattaaccgttggatcgaggtgatagagactcatctccctcagggattatcccatggttctgctatggtcaggacagcatccctcacatgctttgctggcatgacttctgatgtattcttctccctgcctgaaaataagagagactatgtgacctcttcttctgttcatgcggcgttaaatgatatggttcctagtgtaagatcagctgcatgtcgagctattggcattgttgcatgttttcctcagatattgtcaagctctagcctaccaggcaagttcatagatgccattgagttcaatacacataactcatcaactccagttcgtgtcaccgctgcatgggctttggcaaatctctgttcttgtattcgttttagagcactggaagtgcatacagatccctatgcaggtgtaggtgtattgagcaaatcaagcatatctcttttggttgaagttgctttgcgtctggccaaagatagtgaaaaagtaaaatcaaacgctgttagagctcttggttatctttcaagatttatcagattcaattaccacgccggcacaataaatgacccaagtgattcagttttttatggagatcctgtgtggcttgaaagaatggtgcaggctttgatgtcttgtgtgacaactgggaatgtaaagggcatcaagtgtttatagcatacttctacttctaatccgggactcaaacaattataagataaagatgcatgcagctgttgctctatcagtgccagtgtcaaggcttgattacggcagctcgtttccagatgttgttcgaggcctcgtccatgctctcgagtcattgaactcaaacaattcatcgttaccttcaaatttcaaacagagagacaacctcgagaagcagcttacgtttactgctctccatttgcttagttttgtgtcaccaaacgacgatccaagcctgaaagattttcttaccaagaaatcgtcgttcctagaagactggctgagatcactatgcgcatcgttcaacagctcggagcgccagcccttgccaacggaggccacaaacgacgaggacggcttcagcccaaacgtgactcagaaaggcatgctgtcttccgccctgcagtccttgctcggcgtgtacgcgggcaggacccagcaggtcatcacccagagatttgagcaactggctagaagcgtcgcttgaatggtgagcagcgacgagcagtcaggtgtggtctccactccagcctccattaacaagcagcgatatattggtcgtcgtctacccctcaggacggacagcgcgtcaggcagtggatccttaaattctgccgaatcccatgagctccaggcggcacttgtctcggatcttggctgtcatcatgcacaggctctgcaagcctggcttggtcggtgttttcgtcgttgtttacttgaaacatcgttactgtgagtacacacacatatatatatatatatatatatatatatatatatatatatatatatatatatatatatatatatatatatatatatataagttggcagtcttcaaagctcagcgtgaccggacctcagcagcactgggtatctcttaactacttttctggcgttcctgacaaacaggatggcgctgttatgtagatgggccttttccctggtcctggggcttcctgcttgcttgataaaaggttggtatcacccgaccacggtccacgtggacgatattacaagatgttcattgttcttggcaagaggggtcatgaatgccgtccaaatctgttggagtccgtcgctagtgccactgctgttattgagcccatgtgtgtgtgtgcgcgcgtgtgttttgttcatgtaccaaccttcataaattgcttgacgctctgcactgttcgacgatcacttccaatgctctagtccgtaacgttgctgaa

SEQ ID NO: 13830 - DNA, 3857 bp, Zea Mays
  misc_feature (1)..(1): n is a, c, g, or t
naagcttgtcaaatgctcgattgaaggcgcatgcatgaaaggcctctctagtaggacatctgcattgaacacagcatctgaatgtttacatatcctcaggttctggagcagggattatggaagaggcatttcattagctgaaagttcacattcactaacagtgctcgtctcgattgtatcattcttgcaagctgaactgaacatctctgataaaccagcaaatgccactggcatttcttcccgcaattctggatctgcgaatagtaaaaattccaatatttgggatatgaagatatcagcattttcgatgctcgaagatatattgagtaaggttgcatcaaatatgacagaaaatctgtggcagtctgtcatcgaggtcttgaggaaagttatggattttgtcacagcaaggaaccttgttatagagagtagcatcatgtcaagattttatacatcttttcttcgttgtctacatttggttcttgtggatcccaaaggaccactttcagggcatggtttgtagcaaatctgcagatatttttcgtatatgggctgaggtcatcttcacctcctacactagctccaaaagaaactagaacagattcaaaacccagagcttcacgtggacgatatagaccacctcatttgaggaacaaggagagaagagagaatgattcactggaaggtcaaaattcagatagtgagtattcttggtatgatatgagctcatcagactcagacctgagtgatagtgatggttatgcaaaaagtggagaccgcttccggagttcgaaggctagattagctgccattctttgtatacaggatatctgccatgctgatccaaagttacttacttcacaatggccagtacttttgcctgagaatgatgttctccaacaaaggaaatatcaagcaactctgatgacatgcttgctttttgatcctataacgaaggtacgtgttgaggcagcatcaaccattgctaccatgctggaacggcaagcattagttttgacacaagttgcagagtacaaggagtcgtctaagcgtggatcattcactacattatcttcctcacttggtcaaatattgatgcaactgcatacaggagcactgtacttgatacagcgtgaaactcaagctactttgcttgcggcattattcagagttctcattcttttgatatctgctacaccgtacgctcggatgccaaaggaattgttgccaacagtcattaaagtattgtgcagtagattactgaacaaacactcgaataagactgaacattatgccgtgctggttactgttctaagttgcttggagacagctttttcaaaagtgccacctactttggatgtctttgcggttctcactgaggattgctgtgctggaccatcacatgagcaggaagaatcaaatgttatagcttttcttcttcattgtatagaggaggaaatgcattacagtgttagacatggagccttccaggtgctgagatcagcggttcacaactacccaagctgtgcaaacatgatttgggaaaaacttcgagacaatgttcttaacttgttgcaaatacaaagttttgaagaccaaaagtatgatgctaactttgggcctcctggagctaaagaagaatcatcaatcaagggaagatgtcttgtagctggaataaaggtaatggatgaatgtctgcgtgtttcatctggattcacaggagcagatgacatcaaagaatgcagattactggatattcagcaaatttctgattgtaccataaataaaactattaagtctgcacctcactttgaaatggaagctgctggatcatcacagaattgcactttggacataacacttggaattaaccgttggatcgaggtgatagagactcatctccctcagggattatcccatggttctgctatggtcaggacagcatccctcacatgctttgctggcatgacttctgatgtattcttctccctgcctgaaaataagagagactatgtgacctcttcttctgttcatgcggcgttaaatgatatggttcctagtgtaagatcagctgcatgtcgagctattggcattgttgcatgttttcctcagatattgtcaagctctagcctaccaggcaagttcatagatgccattgagttcaatacacataactcatcaactccagttcgtgtcaccgctgcatgggctttggcaaatctctgttcttgtattcgttttagagcactggaagtgcatacagatccctatgcaggtgtaggtgtattgagcaaatcaagcatatctcttttggttgaagttgctttgcgtctggccaaagatagtgaaaaagtaaaatcaaacgctgttagagctcttggttatctttcaagatttatcagattcaattaccacgccggcacaataaatgacccaagttttttatggagatcctgtgtggcttgaaagaatggtgcaggctttgatgtcttgtgtgacaactgggaatgtaaaggtccaatggaatgtttgccatgcccttagcaacttgttcatgaatgataccttgagacttcaagacatgccttgggcatcaagtgtttatagcatacttctacttctaatccgggactcaaacaattataagataaagatgcatgcagctgttgctctatcagtgccagtgtcaaggcttgattacggcagctcgtttccagatgttgttcgaggcctcgtccatgctctcgagtcattgaactcaaacaattcatcgttaccttcaaatttcaaacagagagacaacctcgagaagcagcttacgtttactgctctccatttgcttagttttgtgtcaccaaacgacgatccaagcctgaaagattttcttaccaagaaatcgtcgttcctagaagactggctgagatcactatgcgcatcgttcaacagctcggagcgccagcccttgccaacggaggccacaaacgacgaggacggcttcagcccaaacgtgactcagaaaggcatgctgtcttccgccctgcagtccttgctcggcgtgtacgcgggcaggacccagcaggtcatcacccagagatttgagcaactggctagaagcgtcgcttgaatggtgagcagcgacgagcagtcaggtgtggtctccactccagcctccattaacaagcagcgatatattggtcgtcgtctacccctcaggacggacagcgcgtcaggcagtggatccttaaattctgccgaatcccatgagctccaggcggcacttgtctcggatcttggctgtcatcatgcacaggctctgcaagcctggcttggtcggtgttttcgtcgttgtttacttgaaacatcgttactgtgagtacacacacatatatatatatatatatatatatatatatatatatatatatatatatatatatatatatatatatatatatatatataagttggcagtcttcaaagctcagcgtgaccggacctcagcagcactgggtatctcttaactacttttctggcgttcctgacaaacaggatggcgctgttatgtagatgggccttttccctggtcctggggcttcctgcttgcttgataaaaggttggtatcacccgaccacggtccacgtggacgatattacaagatgttcattgttcttggcaagaggggtcatgaatgccgtccaaatctgttggagtccgtcgctagtgccactgctgttattgagcccatgtgtgtgtgtgcgcgcgtgtgttttgttcatgtaccaaccttcataaattgcttgacgctctgcactgttcgacgatcacttccaatgctctagtccgtaacgttgctgaa

SEQ ID NO: 13831 - DNA, 4011 bp, Zea Mays
aagcttgtcaaatgctcgattgaaggcgcatgcatgaaaggcctctctagtaggacatctgcattgaacacagcatctgaatgtttacatatcctcaggttctggagcagggattatggaagaggcatttcattagctgaaagttcacattcactaacagtgctcgtctcgattgtatcattcttgcaagctgaactgaacatctctgataaaccagcaaatgccactggcatttcttcccgcaattctggatctgcgaatagtaaaaattccaatatttgggatatgaagatatcagcattttcgatgctcgaagatatattgagtaaggttgcatcaaatatgacagaaaatctgtggcagtctgtcatcgaggtcttgaggaaagttatggattttgtcacagcaaggaaccttgttatagagagtagcatcatgtcaagattttatacatcttttcttcgttgtctacatttggttcttgtggatcccaaaggaccactttcagggcatgttgcagggtttgtagcaaatctgcagatatttttcgtatatgggctgaggtcatcttcacctcctacactagctccaaaagaaactagaacagattcaaaacccagagcttcacgtggacgatatagaccacctcatttgaggaacaaggagagaagagagaatgattcactggaaggtcaaaattcagatagtgagtattcttggtatgatatgagctcatcagactcagacctgagtgatagtgatggttatgcaaaaagtggagaccgcttccggagttcgaaggctagattagctgccattctttgtatacaggatatctgccatgctgatccaaagttacttacttcacaatggccagtacttttgcctgagaatgatgttctccaacaaaggaaatatcaagcaactctgatgacatgcttgctttttgatcctataacgaaggtacgtgttgaggcagcatcaaccattgctaccatgctggaacggcaagcattagttttgacacaagttgcagagtacaaggagtcgtctaagcgtggatcattcactacattatcttcctcacttggtcaaatattgatgcaactgcatacagcaagaacgtaaacaacagaagcagcttctaccgctgggtgcatagcacaagctgtcatgacatgctgactgggctggttgtattgtatgtgcccaaggaacaccatggtagcagaaaagattttgtgcaacctctattaggagcactgtacttgatacagcgtgaaactcaagctactttgcttgcggcattattcagagttctcattcttttgatatctgctacaccgtacgctcggatgccaaaggaattgttgccaacagtcattaaagtattgtgcagtagattactgaacaaacactcgaataagactgaacattatgccgtgctggttactgttctaagttgcttggagacagctttttcaaaagtgccacctactttggatgtctttgcggttctcactgaggattgctgtgctggaccatcacatgagcaggaagaatcaaatgttatagcttttcttcttcattgtatagaggaggaaatgcattacagtgttagacatggagccttccaggtgctgagatcagcggttcacaactacccaagctgtgcaaacatgatttgggaaaaacttcgagacaatgttcttaacttgttgcaaatacaaagttttgaagaccaaaagtatgatgctaactttgggcctcctggagctaaagaagaatcatcaatcaagggaagatgtcttgtagctggaataaaggtaatggatgaatgtctgcgtgtttcatctggattcacaggagcagatgacatcaaagaatgcagattactggatattcagcaaatttctgattgtaccataaataaaactattaagtctgcacctcactttgaaatggaagctgctggatcatcacagaattgcactttggacataacacttggaattaaccgttggatcgaggtgatagagactcatctccctcagggattatcccatggttctgctatggtcaggacagcatccctcacatgctttgctggcatgacttctgatgtattcttctccctgcctgaaaataagagagactatgtgacctcttcttctgttcatgcggcgttaaatgatatggttcctagtgtaagatcagctgcatgtcgagctattggcattgttgcatgttttcctcagatattgtcaagctctagcctaccaggcaagttcatagatgccattgagttcaatacacataactcatcaactccagttcgtgtcaccgctgcatgggctttggcaaatctctgttcttgtattcgttttagagcactggaagtgcatacagatccctatgcaggtgtaggtgtattgagcaaatcaagcatatctcttttggttgaagttgctttgcgtctggccaaagatagtgaaaaagtaaaatcaaacgctgttagagctcttggttatctttcaagatttatcagattcaattaccacgccggcacaataaatgacccaagtgattcagttttttatggagatcctgtgtggcttgaaagaatggtgcaggctttgatgtcttgtgtgacaactgggaatgtaaaggtccaatggaatgtttgccatgcccttagcaacttgttcatgaatgataccttgagacttcaagacatgccttgggcatcaagtgtttatagcatacttctacttctaatccgggactcaaacaattataagataaagatgcatgcagctgttgctctatcagtgccagtgtcaaggcttgattacggcagctcgtttccagatgttgttcgaggcctcgtccatgctctcgagtcattgaactcaaacaattcatcgttaccttcaaatttcaaacagagagacaacctcgagaagcagcttacgtttactgctctccatttgcttagttttgtgtcaccaaacgacgatccaagcctgaaagattttcttaccaagaaatcgtcgttcctagaagactggctgagatcactatgcgcatcgttcaacagctcggagcgccagcccttgccaacggaggccacaaacgacgaggacggcttcagcccaaacgtgactcagaaaggcatgctgtcttccgccctgcagtccttgctcggcgtgtacgcgggcaggacccagcaggtcatcacccagagatttgagcaactggctagaagcgtcgcttgaatggtgagcagcgacgagcagtcaggtgtggtctccactccagcctccattaacaagcagcgatatattggtcgtcgtctacccctcaggacggacagcgcgtcaggcagtggatccttaaattctgccgaatcccatgagctccaggcggcacttgtctcggatcttggctgtcatcatgcacaggctctgcaagcctggcttggtcggtgttttcgtcgttgtttacttgaaacatcgttactgtgagtacacacacatatatatatatatatatatatatatatatatatatatatatatatatatatatatatatatatatatatatatatataagttggcagtcttcaaagctcagcgtgaccggacctcagcagcactgggtatctcttaactacttttctggcgttcctgacaaacaggatggcgctgttatgtagatgggccttttccctggtcctggggcttcctgcttgcttgataaaaggttggtatcacccgaccacggtccacgtggacgatattacaagatgttcattgttcttggcaagaggggtcatgaatgccgtccaaatctgttggagtccgtcgctagtgccactgctgttattgagcccatgtgtgtgtgtgcgcgcgtgtgttttgttcatgtaccaaccttcataaattgcttgacgctctgcactgttcgacgatcacttccaatgctctagtccgtaacgttgctgaa

SEQ ID NO: 13832 - DNA, 3867 bp, Zea Mays
cttgtcaaatgctcgattgaaggcgcatgcatgaaaggcctctctagtaggacatctgcattgaacacagcatctgaatgtttacatatcctcaggttctggagcagggattatggaagaggcatttcattagctgaaagttcacattcactaacagtgctcgtctcgattgtatcattcttgcaagctgaactgaacatctctgataaaccagcaaatgccactggcatttcttcccgcaattctggatctgcgaatagtaaaaattccaatatttgggatatgaagatatcagcattttcgatgctcgaagatatattgagtaaggttgcatcaaatatgacagaaaatctgtggcagtctgtcatcgaggtcttgaggaaagttatggattttgtcacagcaaggaaccttgttatagagagtagcatcatgtcaagattttatacatcttttcttcgttgtctacatttggttcttgtggatcccaaaggaccactttcagggcatggtttgtagcaaatctgcagatatttttcgtatatgggctgaggtcatcttcacctcctacactagctccaaaagaaactagaacagattcaaaacccagagcttcacgtggacgatatagaccacctcatttgaggaacaaggagagaagagagaatgattcactggaaggtcaaaattcagatagtgagtattcttggtatgatatgagctcatcagactcagacctgagtgatagtgatggttatgcaaaaagtggagaccgcttccggagttcgaaggctagattagctgccattctttgtatacaggatatctgccatgctgatccaaagttacttacttcacaatggccagtacttttgcctgagaatgatgttctccaacaaaggaaatatcaagcaactctgatgacatgcttgctttttgatcctataacgaaggtacgtgttgaggcagcatcaaccattgctaccatgctggaacggcaagcattagttttgacacaagttgcagagtacaaggagtcgtctaagcgtggatcattcactacattatcttcctcacttggtcaaatattgatgcaactgcatacaggagcactgtacttgatacagcgtgaaactcaagctactttgcttgcggcattattcagagttctcattcttttgatatctgctacaccgtacgctcggatgccaaaggaattgttgccaacagtcattaaagtattgtgcagtagattactgaacaaacactcgaataagactgaacattatgccgtgctggttactgttctaagttgcttggagacagctttttcaaaagtgccacctactttggatgtctttgcggttctcactgaggattgctgtgctggaccatcacatgagcaggaagaatcaaatgttatagcttttcttcttcattgtatagaggaggaaatgcattacagtgttagacatggagccttccaggtgctgagatcagcggttcacaactacccaagctgtgcaaacatgatttgggaaaaacttcgagacaatgttcttaacttgttgcaaatacaaagttttgaagaccaaaagtatgatgctaactttgggcctcctggagctaaagaagaatcatcaatcaagggaagatgtcttgtagctggaataaaggtaatggatgaatgtctgcgtgtttcatctggattcacaggagcagatgacatcaaagaatgcagattactggatattcagcaaatttctgattgtaccataaataaaactattaagtctgcacctcactttgaaatggaagctgctggatcatcacagaattgcactttggacataacacttggaattaaccgttggatcgaggtgatagagactcatctccctcagggattatcccatggttctgctatggtcaggacagcatccctcacatgctttgctggcatgacttctgatgtattcttctccctgcctgaaaataagagagactatgtgacctcttcttctgttcatgcggcgttaaatgatatggttcctagtgtaagatcagctgcatgtcgagctattggcattgttgcatgttttcctcagatattgtcaagctctagcctaccaggcaagttcatagatgccattgagttcaatacacataactcatcaactccagttcgtgtcaccgctgcatgggctttggcaaatctctgttcttgtattcgttttagagcactggaagtgcatacagatccctatgcaggtgtaggtgtattgagcaaatcaagcatatctcttttggttgaagttgctttgcgtctggccaaagatagtgaaaaagtaaaatcaaacgctgttagagctcttggttatctttcaagatttatcagattcaattaccacgccggcacaataaatgacccaagtaacagtgattcagttttttatggagatcctgtgtggcttgaaagaatggtgcaggctttgatgtcttgtgtgacaactgggaatgtaaaggtccaatggaatgtttgccatgcccttagcaacttgttcatgaatgataccttgagacttcaagacatgccttgggcatcaagtgtttatagcatacttctacttctaatccgggactcaaacaattataagataaagatgcatgcagctgttgctctatcagtgccagtgtcaaggcttgattacggcagctcgtttccagatgttgttcgaggcctcgtccatgctctcgagtcattgaactcaaacaattcatcgttaccttcaaatttcaaacagagagacaacctcgagaagcagcttacgtttactgctctccatttgcttagttttgtgtcaccaaacgacgatccaagcctgaaagattttcttaccaagaaatcgtcgttcctagaagactggctgagatcactatgcgcatcgttcaacagctcggagcgccagcccttgccaacggaggccacaaacgacgaggacggcttcagcccaaacgtgactcagaaaggcatgctgtcttccgccctgcagtccttgctcggcgtgtacgcgggcaggacccagcaggtcatcacccagagatttgagcaactggctagaagcgtcgcttgaatggtgagcagcgacgagcagtcaggtgtggtctccactccagcctccattaacaagcagcgatatattggtcgtcgtctacccctcaggacggacagcgcgtcaggcagtggatccttaaattctgccgaatcccatgagctccaggcggcacttgtctcggatcttggctgtcatcatgcacaggctctgcaagcctggcttggtcggtgttttcgtcgttgtttacttgaaacatcgttactgtgagtacacacacatatatatatatatatatatatatatatatatatatatatatatatatatatatatatatatatatatatatatatataagttggcagtcttcaaagctcagcgtgaccggacctcagcagcactgggtatctcttaactacttttctggcgttcctgacaaacaggatggcgctgttatgtagatgggccttttccctggtcctggggcttcctgcttgcttgataaaaggttggtatcacccgaccacggtccacgtggacgatattacaagatgttcattgttcttggcaagaggggtcatgaatgccgtccaaatctgttggagtccgtcgctagtgccactgctgttattgagcccatgtgtgtgtgtgcgcgcgtgtgttttgttcatgtaccaaccttcataaattgcttgacgctctgcactgttcgacgatcacttccaatgctctagtccgtaacgttgctgaa

SEQ ID NO: 13833 - DNA, 3927 bp, Zea Mays
gtcaaatgctcgattgaaggcgcatgcatgaaaggcctctctagtaggacatctgcattgaacacagcatctgaatgtttacatatcctcaggttctggagcagggattatggaagaggcatttcattagctgaaagttcacattcactaacagtgctcgtctcgattgtatcattcttgcaagctgaactgaacatctctgataaaccagcaaatgccactggcatttcttcccgcaattctggatctgcgaatagtaaaaattccaatatttgggatatgaagatatcagcattttcgatgctcgaagatatattgagtaaggttgcatcaaatatgacagaaaatctgtggcagtctgtcatcgaggtcttgaggaaagttatggattttgtcacagcaaggaaccttgttatagagagtagcatcatgtcaagattttatacatcttttcttcgttgtctacatttggttcttgtggatcccaaaggaccactttcagggcatgttgcagggtttgtagcaaatctgcagatatttttcgtatatgggctgaggtcatcttcacctcctacactagctccaaaagaaactagaacagattcaaaacccagagcttcacgtggacgatatagaccacctcatttgaggaacaaggagagaagagagaatgattcactggaaggtcaaaattcagatagtgagtattcttggtatgatatgagctcatcagactcagacctgagtgatagtgatggttatgcaaaaagtggagaccgcttccggagttcgaaggctagattagctgccattctttgtatacaggatatctgccatgctgatccaaagttacttacttcacaatggccagtacttttgcctgagaatgatgttctccaacaaaggaaatatcaagcaactctgatgacatgcttgctttttgatcctataacgaaggtacgtgttgaggcagcatcaaccattgctaccatgctggaacggcaagcattagttttgacacaagttgcagagtacaaggagtcgtctaagcgtggatcattcactacattatcttcctcacttggtcaaatattgatgcaactgcatacaggagcactgtacttgatacagcgtgaaactcaagctactttgcttgcggcattattcagagttctcattcttttgatatctgctacaccgtacgctcggatgccaaaggaattgttgccaacagtcattaaagtattgtgcagtagattactgaacaaacactcgaataagactgaacattatgccgtgctggttactgttctaagttgcttggagacagctttttcaaaagtgccacctactttggatgtctttgcggttctcactgaggattgctgtgctggaccatcacatgagcaggaagaatcaaatgttatagcttttcttcttcattgtatagaggaggaaatgcattacagtgttagacatggagccttccaggtgctgagatcagcggttcacaactacccaagctgtgcaaacatgatttgggaaaaacttcgagacaatgttcttaacttgttgcaaatacaaagttttgaagaccaaaagtatgatgctaactttgggcctcctggagctaaagaagaatcatcaatcaagggaagatgtcttgtagctggaataaaggtaatggatgaatgtctgcgtgtttcatctggattcacaggagcagatgacatcaaagaatgcagattactggatattcagcaaatttctgattgtaccataaataaaactattaagtctgcacctcactttgaaatggaagctgctggatcatcacagaattgcactttggacataacacttggaattaaccgttggatcgaggtgatagagactcatctccctcagggattatcccatggttctgctatggtcaggacagcatccctcacatgctttgctggcatgacttctgatgtattcttctccctgcctgaaaataagagagactatgtgacctcttcttctgttcatgcggcgttaaatgatatggttcctagtgtaagatcagctgcatgtcgagctattggcattgttgcatgttttcctcagatattgtcaagctctagcctaccaggcaagttcatagatgccattgagttcaatacacataactcatcaactccagttcgtgtcaccgctgcatgggctttggcaaatctctgttcttgtattcgttttagagcactggaagtgcatacagatccctatgcaggtgtaggtgtattgagcaaatcaagcatatctcttttggttgaagttgctttgcgtctggccaaagatagtgaaaaaaaaaggatactgtcctcaggtgggattgcactcaacggtggatccgatagataagatttgatgtaaaatcaaacgctgttagagctcttggttatctttcaagatttatcagattcaattaccacgccggcacaataaatgacccaagtgattcagttttttatggagatcctgtgtggcttgaaagaatggtgcaggctttgatgtcttgtgtgacaactgggaatgtaaaggtccaatggaatgtttgccatgcccttagcaacttgttcatgaatgataccttgagacttcaagacatgccttgggcatcaagtgtttatagcatacttctacttctaatccgggactcaaacaattataagataaagatgcatgcagctgttgctctatcagtgccagtgtcaaggcttgattacggcagctcgtttccagatgttgttcgaggcctcgtccatgctctcgagtcattgaactcaaacaattcatcgttaccttcaaatttcaaacagagagacaacctcgagaagcagcttacgtttactgctctccatttgcttagttttgtgtcaccaaacgacgatccaagcctgaaagattttcttaccaagaaatcgtcgttcctagaagactggctgagatcactatgcgcatcgttcaacagctcggagcgccagcccttgccaacggaggccacaaacgacgaggacggcttcagcccaaacgtgactcagaaaggcatgctgtcttccgccctgcagtccttgctcggcgtgtacgcgggcaggacccagcaggtcatcacccagagatttgagcaactggctagaagcgtcgcttgaatggtgagcagcgacgagcagtcaggtgtggtctccactccagcctccattaacaagcagcgatatattggtcgtcgtctacccctcaggacggacagcgcgtcaggcagtggatccttaaattctgccgaatcccatgagctccaggcggcacttgtctcggatcttggctgtcatcatgcacaggctctgcaagcctggcttggtcggtgttttcgtcgttgtttacttgaaacatcgttactgtgagtacacacacatatatatatatatatatatatatatatatatatatatatatatatatatatatatatatatatatatatatatatataagttggcagtcttcaaagctcagcgtgaccggacctcagcagcactgggtatctcttaactacttttctggcgttcctgacaaacaggatggcgctgttatgtagatgggccttttccctggtcctggggcttcctgcttgcttgataaaaggttggtatcacccgaccacggtccacgtggacgatattacaagatgttcattgttcttggcaagaggggtcatgaatgccgtccaaatctgttggagtccgtcgctagtgccactgctgttattgagcccatgtgtgtgtgtgcgcgcgtgtgttttgttcatgtaccaaccttcataaattgcttgacgctctgcactgttcgacgatcacttccaatgctctagtccgtaacgttgctgaa

SEQ ID NO: 13834 - DNA, 3933 bp, Zea Mays
gtcaaatgctcgattgaaggcgcatgcatgaaaggcctctctagtaggacatctgcattgaacacagcatctgaatgtttacatatcctcaggttctggagcagggattatggaagaggcatttcattagctgaaagttcacattcactaacagtgctcgtctcgattgtatcattcttgcaagctgaactgaacatctctgataaaccagcaaatgccactggcatttcttcccgcaattctggatctgcgaatagtaaaaattccaatatttgggatatgaagatatcagcattttcgatgctcgaagatatattgagtaaggttgcatcaaatatgacagaaaatctgtggcagtctgtcatcgaggtcttgaggaaagttatggattttgtcacagcaaggaaccttgttatagagagtagcatcatgtcaagattttatacatcttttcttcgttgtctacatttggttcttgtggatcccaaaggaccactttcagggcatgttgcagggtttgtagcaaatctgcagatatttttcgtatatgggctgaggtcatcttcacctcctacactagctccaaaagaaactagaacagattcaaaacccagagcttcacgtggacgatatagaccacctcatttgaggaacaaggagagaagagagaatgattcactggaaggtcaaaattcagatagtgagtattcttggtatgatatgagctcatcagactcagacctgagtgatagtgatggttatgcaaaaagtggagaccgcttccggagttcgaaggctagattagctgccattctttgtatacaggatatctgccatgctgatccaaagttacttacttcacaatggccagtacttttgcctgagaatgatgttctccaacaaaggaaatatcaagcaactctgatgacatgcttgctttttgatcctataacgaaggtacgtgttgaggcagcatcaaccattgctaccatgctggaacggcaagcattagttttgacacaagttgcagagtacaaggagtcgtctaagcgtggatcattcactacattatcttcctcacttggtcaaatattgatgcaactgcatacaggagcactgtacttgatacagcgtgaaactcaagctactttgcttgcggcattattcagagttctcattcttttgatatctgctacaccgtacgctcggatgccaaaggaattgttgccaacagtcattaaagtattgtgcagtagattactgaacaaacactcgaataagactgaacattatgccgtgctggttactgttctaagttgcttggagacagctttttcaaaagtgccacctactttggatgtctttgcggttctcactgaggattgctgtgctggaccatcacatgagcaggaagaatcaaatgttatagcttttcttcttcattgtatagaggaggaaatgcattacagtgttagacatggagccttccaggtgctgagatcagcggttcacaactacccaagctgtgcaaacatgatttgggaaaaacttcgagacaatgttcttaacttgttgcaaatacaaagttttgaagaccaaaagtatgatgctaactttgggcctcctggagctaaagaagaatcatcaatcaagggaagatgtcttgtagctggaataaaggtaatggatgaatgtctgcgtgtttcatctggattcacaggagcagatgacatcaaagaatgcagattactggatattcagcaaatttctgattgtaccataaataaaactattaagtctgcacctcactttgaaatggaagctgctggatcatcacagaattgcactttggacataacacttggaattaaccgttggatcgaggtgatagagactcatctccctcagggattatcccatggttctgctatggtcaggacagcatccctcacatgctttgctggcatgacttctgatgtattcttctccctgcctgaaaataagagagactatgtgacctcttcttctgttcatgcggcgttaaatgatatggttcctagtgtaagatcagctgcatgtcgagctattggcattgttgcatgttttcctcagatattgtcaagctctagcctaccaggcaagttcatagatgccattgagttcaatacacataactcatcaactccagttcgtgtcaccgctgcatgggctttggcaaatctctgttcttgtattcgttttagagcactggaagtgcatacagatccctatgcaggtgtaggtgtattgagcaaatcaagcatatctcttttggttgaagttgctttgcgtctggccaaagatagtgaaaaaaaaaggatactgtcctcaggtgggattgcactcaacggtggatccgatagataagatttgatgtaaaatcaaacgctgttagagctcttggttatctttcaagatttatcagattcaattaccacgccggcacaataaatgacccaagtaacagtgattcagttttttatggagatcctgtgtggcttgaaagaatggtgcaggctttgatgtcttgtgtgacaactgggaatgtaaaggtccaatggaatgtttgccatgcccttagcaacttgttcatgaatgataccttgagacttcaagacatgccttgggcatcaagtgtttatagcatacttctacttctaatccgggactcaaacaattataagataaagatgcatgcagctgttgctctatcagtgccagtgtcaaggcttgattacggcagctcgtttccagatgttgttcgaggcctcgtccatgctctcgagtcattgaactcaaacaattcatcgttaccttcaaatttcaaacagagagacaacctcgagaagcagcttacgtttactgctctccatttgcttagttttgtgtcaccaaacgacgatccaagcctgaaagattttcttaccaagaaatcgtcgttcctagaagactggctgagatcactatgcgcatcgttcaacagctcggagcgccagcccttgccaacggaggccacaaacgacgaggacggcttcagcccaaacgtgactcagaaaggcatgctgtcttccgccctgcagtccttgctcggcgtgtacgcgggcaggacccagcaggtcatcacccagagatttgagcaactggctagaagcgtcgcttgaatggtgagcagcgacgagcagtcaggtgtggtctccactccagcctccattaacaagcagcgatatattggtcgtcgtctacccctcaggacggacagcgcgtcaggcagtggatccttaaattctgccgaatcccatgagctccaggcggcacttgtctcggatcttggctgtcatcatgcacaggctctgcaagcctggcttggtcggtgttttcgtcgttgtttacttgaaacatcgttactgtgagtacacacacatatatatatatatatatatatatatatatatatatatatatatatatatatatatatatatatatatatatatatataagttggcagtcttcaaagctcagcgtgaccggacctcagcagcactgggtatctcttaactacttttctggcgttcctgacaaacaggatggcgctgttatgtagatgggccttttccctggtcctggggcttcctgcttgcttgataaaaggttggtatcacccgaccacggtccacgtggacgatattacaagatgttcattgttcttggcaagaggggtcatgaatgccgtccaaatctgttggagtccgtcgctagtgccactgctgttattgagcccatgtgtgtgtgtgcgcgcgtgtgttttgttcatgtaccaaccttcataaattgcttgacgctctgcactgttcgacgatcacttccaatgctctagtccgtaacgttgctgaa

SEQ ID NO: 13835 - DNA, 3797 bp, Zea Mays
gtcaaatgctcgattgaaggcgcatgcatgaaaggcctctctagtaggacatctgcattgaacacagcatctgaatgtttacatatcctcaggttctggagcagggattatggaagaggcatttcattagctgaaagttcacattcactaacagtgctcgtctcgattgtatcattcttgcaagctgaactgaacatctctgataaaccagcaaatgccactggcatttcttcccgcaattctggatctgcgaatagtaaaaattccaatatttgggatatgaagatatcagcattttcgatgctcgaagatatattgagtaaggttgcatcaaatatgacagaaaatctgtggcagtctgtcatcgaggtcttgaggaaagttatggattttgtcacagcaaggaaccttgttatagagagtagcatcatgtcaagattttatacatcttttcttcgttgtctacatttggttcttgtggatcccaaaggaccactttcagggcatgttgcagggtttgtagcaaatctgcagatatttttcgtatatgggctgaggtcatcttcacctcctacactagctccaaaagaaactagaacagattcaaaacccagagcttcacgtggacgatatagaccacctcatttgaggaacaaggagagaagagagaatgattcactggaaggtcaaaattcagatagtgagtattcttggtatgatatgagctcatcagactcagacctgagtgatagtgatggttatgcaaaaagtggagaccgcttccggagttcgaaggctagattagctgccattctttgtatacaggatatctgccatgctgatccaaagttacttacttcacaatggccagtacttttgcctgagaatgatgttctccaacaaaggaaatatcaagcaactctgatgacatgcttgctttttgatcctataacgaaggtacgtgttgaggcagcatcaaccattgctaccatgctggaacggcaagcattagttttgacacaagttgcagagtacaaggagtcgtctaagcgtggatcattcactacattatcttcctcacttggtcaaatattgatgcaactgcatacaggagcactgtacttgatacagcgtgaaactcaagctactttgcttgcggcattattcagagttctcattcttttgatatctgctacaccgtacgctcggatgccaaaggaattgttgccaacagtcattaaagtattgtgcagtagattactgaacaaacactcgaataagactgaacattatgccgtgctggttactgttctaagttgcttggagacagctttttcaaaagtgccacctactttggatgtctttgcggttctcactgaggattgctgtgctggaccatcacatgagcaggaagaatcaaatgttatagcttttcttcttcattgtatagaggaggaaatgcattacagtgttagacatggagccttccaggtgctgagatcagcggttcacaactacccaagctgtgcaaacatgatttgggaaaaacttcgagacaatgttcttaacttgttgcaaatacaaagttttgaagaccaaaagtatgatgctaactttgggcctcctggagctaaagaagaatcatcaatcaagggaagatgtcttgtagctggaataaaggtaatggatgaatgtctgcgtgtttcatctggattcacaggagcagatgacatcaaagaatgcagattactggatattcagcaaatttctgattgtaccataaataaaactattaagtctgcacctcactttgaaatggaagctgctggatcatcacagaattgcactttggacataacacttggaattaaccgttggatcgaggtgatagagactcatctccctcagggattatcccatggttctgctatggtcaggacagcatccctcacatgctttgctggcatgacttctgatgtattcttctccctgcctgaaaataagagagactatgtgacctcttcttctgttcatgcggcgttaaatgatatggttcctagtgtaagatcagctgcatgtcgagctattggcattgttgcatgttttcctcagatattgtcaagctctagcctaccaggcaagttcatagatgccattgagttcaatacacataactcatcaactccagttcgtgtcaccgctgcatgggctttggcaaatctctgttcttgtattcgttttagagcactggaagtgcatacagatccctatgcaggtgtaggtgtattgagcaaatcaagcatatctcttttggttgaagttgctttgcgtctggccaaagatagtgaaaaagtaaaatcaaacgctgttagagctcttggttatctttcaagatttatcagattcaattaccacgccggcacaataaatgacccaagtaacagtgattcagttttttatggagatcctgtgtggcttgaaagaatggtgcaggctttgatgtcttgtgtgacaactgggaatgtaaagggcatcaagtgtttatagcatacttctacttctaatccgggactcaaacaattataagataaagatgcatgcagctgttgctctatcagtgccagtgtcaaggcttgattacggcagctcgtttccagatgttgttcgaggcctcgtccatgctctcgagtcattgaactcaaacaattcatcgttaccttcaaatttcaaacagagagacaacctcgagaagcagcttacgtttactgctctccatttgcttagttttgtgtcaccaaacgacgatccaagcctgaaagattttcttaccaagaaatcgtcgttcctagaagactggctgagatcactatgcgcatcgttcaacagctcggagcgccagcccttgccaacggaggccacaaacgacgaggacggcttcagcccaaacgtgactcagaaaggcatgctgtcttccgccctgcagtccttgctcggcgtgtacgcgggcaggacccagcaggtcatcacccagagatttgagcaactggctagaagcgtcgcttgaatggtgagcagcgacgagcagtcaggtgtggtctccactccagcctccattaacaagcagcgatatattggtcgtcgtctacccctcaggacggacagcgcgtcaggcagtggatccttaaattctgccgaatcccatgagctccaggcggcacttgtctcggatcttggctgtcatcatgcacaggctctgcaagcctggcttggtcggtgttttcgtcgttgtttacttgaaacatcgttactgtgagtacacacacatatatatatatatatatatatatatatatatatatatatatatatatatatatatatatatatatatatatatatataagttggcagtcttcaaagctcagcgtgaccggacctcagcagcactgggtatctcttaactacttttctggcgttcctgacaaacaggatggcgctgttatgtagatgggccttttccctggtcctggggcttcctgcttgcttgataaaaggttggtatcacccgaccacggtccacgtggacgatattacaagatgttcattgttcttggcaagaggggtcatgaatgccgtccaaatctgttggagtccgtcgctagtgccactgctgttattgagcccatgtgtgtgtgtgcgcgcgtgtgttttgttcatgtaccaaccttcataaattgcttgacgctctgcactgttcgacgatcacttccaatgctctagtccgtaacgttgctgaa

SEQ ID NO: 13836 - DNA, 3876 bp, Zea Mays
ctcgattgaaggcgcatgcatgaaaggcctctctagtaggacatctgcattgaacacagcatctgaatgtttacatatcctcaggttctggagcagggattatggaagaggcatttcattagctgaaagttcacattcactaacagtgctcgtctcgattgtatcattcttgcaagctgaactgaacatctctgataaaccagcaaatgccactggcatttcttcccgcaattctggatctgcgaatagtaaaaattccaatatttgggatatgaagatatcagcattttcgatgctcgaagatatattgagtaaggttgcatcaaatatgacagaaaatctgtggcagtctgtcatcgagtcctactttctaggtcttgaggaaagttatggattttgtcacagcaaggaaccttgttatagagagtagcatcatgtcaagattttatacatcttttcttcgttgtctacatttggttcttgtggatcccaaaggaccactttcagggcatgttgcagggtttgtagcaaatctgcagatatttttcgtatatgggctgaggtcatcttcacctcctacactagctccaaaagaaactagaacagattcaaaacccagagcttcacgtggacgatatagaccacctcatttgaggaacaaggagagaagagagaatgattcactggaaggtcaaaattcagatagtgagtattcttggtatgatatgagctcatcagactcagacctgagtgatagtgatggttatgcaaaaagtggagaccgcttccggagttcgaaggctagattagctgccattctttgtatacaggatatctgccatgctgatccaaagttacttacttcacaatggccagtacttttgcctgagaatgatgttctccaacaaaggaaatatcaagcaactctgatgacatgcttgctttttgatcctataacgaaggtacgtgttgaggcagcatcaaccattgctaccatgctggaacggcaagcattagttttgacacaagttgcagagtacaaggagtcgtctaagcgtggatcattcactacattatcttcctcacttggtcaaatattgatgcaactgcatacaggagcactgtacttgatacagcgtgaaactcaagctactttgcttgcggcattattcagagttctcattcttttgatatctgctacaccgtacgctcggatgccaaaggaattgttgccaacagtcattaaagtattgtgcagtagattactgaacaaacactcgaataagactgaacattatgccgtgctggttactgttctaagttgcttggagacagctttttcaaaagtgccacctactttggatgtctttgcggttctcactgaggattgctgtgctggaccatcacatgagcaggaagaatcaaatgttatagcttttcttcttcattgtatagaggaggaaatgcattacagtgttagacatggagccttccaggtgctgagatcagcggttcacaactacccaagctgtgcaaacatgatttgggaaaaacttcgagacaatgttcttaacttgttgcaaatacaaagttttgaagaccaaaagtatgatgctaactttgggcctcctggagctaaagaagaatcatcaatcaagggaagatgtcttgtagctggaataaaggtaatggatgaatgtctgcgtgtttcatctggattcacaggagcagatgacatcaaagaatgcagattactggatattcagcaaatttctgattgtaccataaataaaactattaagtctgcacctcactttgaaatggaagctgctggatcatcacagaattgcactttggacataacacttggaattaaccgttggatcgaggtgatagagactcatctccctcagggattatcccatggttctgctatggtcaggacagcatccctcacatgctttgctggcatgacttctgatgtattcttctccctgcctgaaaataagagagactatgtgacctcttcttctgttcatgcggcgttaaatgatatggttcctagtgtaagatcagctgcatgtcgagctattggcattgttgcatgttttcctcagatattgtcaagctctagcctaccaggcaagttcatagatgccattgagttcaatacacataactcatcaactccagttcgtgtcaccgctgcatgggctttggcaaatctctgttcttgtattcgttttagagcactggaagtgcatacagatccctatgcaggtgtaggtgtattgagcaaatcaagcatatctcttttggttgaagttgctttgcgtctggccaaagatagtgaaaaagtaaaatcaaacgctgttagagctcttggttatctttcaagatttatcagattcaattaccacgccggcacaataaatgacccaagtaacagtgattcagttttttatggagatcctgtgtggcttgaaagaatggtgcaggctttgatgtcttgtgtgacaactgggaatgtaaaggtccaatggaatgtttgccatgcccttagcaacttgttcatgaatgataccttgagacttcaagacatgccttgggcatcaagtgtttatagcatacttctacttctaatccgggactcaaacaattataagataaagatgcatgcagctgttgctctatcagtgccagtgtcaaggcttgattacggcagctcgtttccagatgttgttcgaggcctcgtccatgctctcgagtcattgaactcaaacaattcatcgttaccttcaaatttcaaacagagagacaacctcgagaagcagcttacgtttactgctctccatttgcttagttttgtgtcaccaaacgacgatccaagcctgaaagattttcttaccaagaaatcgtcgttcctagaagactggctgagatcactatgcgcatcgttcaacagctcggagcgccagcccttgccaacggaggccacaaacgacgaggacggcttcagcccaaacgtgactcagaaaggcatgctgtcttccgccctgcagtccttgctcggcgtgtacgcgggcaggacccagcaggtcatcacccagagatttgagcaactggctagaagcgtcgcttgaatggtgagcagcgacgagcagtcaggtgtggtctccactccagcctccattaacaagcagcgatatattggtcgtcgtctacccctcaggacggacagcgcgtcaggcagtggatccttaaattctgccgaatcccatgagctccaggcggcacttgtctcggatcttggctgtcatcatgcacaggctctgcaagcctggcttggtcggtgttttcgtcgttgtttacttgaaacatcgttactgtgagtacacacacatatatatatatatatatatatatatatatatatatatatatatatatatatatatatatatatatatatatatatataagttggcagtcttcaaagctcagcgtgaccggacctcagcagcactgggtatctcttaactacttttctggcgttcctgacaaacaggatggcgctgttatgtagatgggccttttccctggtcctggggcttcctgcttgcttgataaaaggttggtatcacccgaccacggtccacgtggacgatattacaagatgttcattgttcttggcaagaggggtcatgaatgccgtccaaatctgttggagtccgtcgctagtgccactgctgttattgagcccatgtgtgtgtgtgcgcgcgtgtgttttgttcatgtaccaaccttcataaattgcttgacgctctgcactgttcgacgatcacttccaatgctctagtccgtaacgttgctgaa

SEQ ID NO: 13837 - DNA, 3650 bp, Zea Mays
atgaaaggcctctctagtaggacatctgcattgaacacagcatctgaatgtttacatatcctcaggttctggagcagggattatggaagaggcatttcattagctgaaagttcacattcactaacagtgctcgtctcgattgtatcattcttgcaagctgaactgaacatctctgataaaccagcaaatgccactggcatttcttcccgcaattctggatctgcgaatagtaaaaattccaatatttgggatatgaagatatcagcattttcgatgctcgaagatatattgagtaaggttgcatcaaatatgacagaaaatctgtggcagtctgtcatcgaggtcttgaggaaagttatggattttgtcacagcaaggaaccttgttatagagagtagcatcatgtcaagattttatacatcttttcttcgttgtctacatttggttcttgtggatcccaaaggaccactttcagggcatgttgcagggtttgtagcaaatctgcagatatttttcgtatatgggctgaggtcatcttcacctcctacactagctccaaaagaaactagaacagattcaaaacccagagcttcacgtggacgatatagaccacctcatttgaggaacaaggagagaagagagaatgattcactggaaggtcaaaattcagatagtgagtattcttggtatgatatgagctcatcagactcagacctgagtgatagtgatggttatgcaaaaagtggagaccgcttccggagttcgaaggctagattagctgccattctttgtatacaggatatctgccatgctgatccaaagttacttacttcacaatggccagtacttttgcctgagaatgatgttctccaacaaaggaaatatcaagcaactctgatgacatgcttgctttttgatcctataacgaaggtacgtgttgaggcagcatcaaccattgctaccatgctggaacggcaagcattagttttgacacaagttgcagagtacaaggagtcgtctaagcgtggatcattcactacattatcttcctcacttggtcaaatattgatgcaactgcatacaggagcactgtacttgatacagcgtgaaactcaagctactttgcttgcggcattattcagagttctcattcttttgatatctgctacaccgtacgctcggatgccaaaggaattgttgccaacagtcattaaagtattgtgcagtagattactgaacaaacactcgaataagactgaacattatgccgtgctggttactgttctaagttgcttggagacagctttttcaaaagtgccacctactttggatgtctttgcggttctcactgaggattgctgtgctggaccatcacatgagcaggaagaatcaaatgttatagcttttcttcttcattgtatagaggaggaaatgcattacagtgttagacatggagccttccaggtgctgagatcagcggttcacaactacccaagctgtgcaaacatgatttgggaaaaacttcgagacaatgttcttaacttgttgcaaatacaaagttttgaagaccaaaagtatgatgctaactttgggcctcctggagctaaagaagaatcatcaatcaagggaagatgtcttgtagctggaataaaggtaatggatgaatgtctgcgtgtttcatctggattcacaggagcagatgacatcaaagaatgcagattactggatattcagcaaatttctgattgtaccataaataaaactattaagtctgcacctcactttgaaatggaagctgctggatcatcacagaattgcactttggacataacacttggaattaaccgttggatcgaggtgatagagactcatctccctcagggattatcccatggttctgctatggtcaggacagcatccctcacatgctttgctggcatgacttctgatgtattcttctccctgcctgaaaataagagagactatgtgacctcttcttctgttcatgcggcgttaaatgatatggttcctagtgtaagatcagctgcatgtcgagctattggcattgttgcatgttttcctcagatattgtcaagctctagcctaccaggcaagttcatagatgccattgagttcaatacacataactcatcaactccagttcgtgtcaccgctgcatgggctttggcaaatctctgttcttgtattcgttttagagcactggaagtgcatacagatccctatgcaggtgtaggtgtattgagcaaatcaagcatatctcttttggttgaagttgctttgcgtctggccaaagatagtgaaaaagtaaaatcaaacgctgttagagctcttggttatctttcaagatttatcagattcaattaccacgccggcacaataaatgacccaagttttttatggagatcctgtgtggcttgaaagaatggtgcaggctttgatgtcttgtgtgacaactgggaatgtaaaggtccaatggaatgtttgccatgcccttagcaacttgttcatgaatgataccttgagacttcaagacatgccttgggcatcaagtgtttatagcatacttctacttctaatccgggactcaaacaattataagataaagatgcatgcagctgttgctctatcagtgccagtgtcaaggcttgattacggcagctcgtttccagatgttgttcgaggcctcgtccatgctctcgagtcattgaactcaaacaattcatcgttaccttcaaatttcaaacagagagacaacctcgagaagcagcttacgtttactgctctccatttgcttagttttgtgtcaccaaacgacgatccaagcctgaaagattttcttaccaagaaatcgtcgttcctagaagactggctgagatcactatgcgcatcgttcaacagctcggagcgccagcccttgccaacggaggccacaaacgacgaggacggcttcagcccaaacgtgactcagaaaggcatgctgtcttccgccctgcagtccttgctcggcgtgtacgcgggcaggacccagcaggtcatcacccagagatttgagcaactggctagaagcgtcgcttgaatggtgagcagcgacgagcagtcaggtgtggtctccactccagcctccattaacaagcagcgatatattggtcgtcgtctacccctcaggacggacagcgcgtcaggcagtggatccttaaattctgccgaatcccatgagctccaggcggcacttgtctcggatcttggctgtcatcatgcacaggctctgcaagcctggcttggtcggtgttttcgtcgttgtttacttgaaacatcgttactgatggcgctgttatgtagatgggccttttccctggtcctggggcttcctgcttgcttgataaaaggttggtatcacccgaccacggtccacgtggacgatattacaagatgttcattgttcttggcaagaggggtcatgaatgccgtccaaatctgttggagtccgtcgctagtgccactgctgttattgagcccatgtgtgtgtgtgcgcgcgtgtgttttgttcatgtaccaaccttcataaattgcttgacgctctgcactgttcgacgatcacttccaatgctctagtccgtaacgttgctgaa

SEQ ID NO: 13838 - DNA, 3751 bp, Zea Mays
cattgagtgaccgagcaagtacatcagctaagaaactgcaagaatgttgaatttaatacacaaccgtcaacaatgatttggaggagcttcctctgtgaccgatcatctagatttttgttgattttggcgctgttgcatgctaaaatatcaagcactgactgatccacattgcacatctgttctgtggcttgaattgaggtttttattattaatgtgtgcactggccttctgttttaacccaaactccagtcctactttctaggtcttgaggaaagttatggattttgtcacagcaaggaaccttgttatagagagtagcatcatgtcaagattttatacatcttttcttcgttgtctacatttggttcttgtggatcccaaaggaccactttcagggcatggtttgtagcaaatctgcagatatttttcgtatatgggctgaggtcatcttcacctcctacactagctccaaaagaaactagaacagattcaaaacccagagcttcacgtggacgatatagaccacctcatttgaggaacaaggagagaagagagaatgattcactggaaggtcaaaattcagatagtgagtattcttggtatgatatgagctcatcagactcagacctgagtgatagtgatggttatgcaaaaagtggagaccgcttccggagttcgaaggctagattagctgccattctttgtatacaggatatctgccatgctgatccaaagttacttacttcacaatggccagtacttttgcctgagaatgatgttctccaacaaaggaaatatcaagcaactctgatgacatgcttgctttttgatcctataacgaaggtacgtgttgaggcagcatcaaccattgctaccatgctggaacggcaagcattagttttgacacaagttgcagagtacaaggagtcgtctaagcgtggatcattcactacattatcttcctcacttggtcaaatattgatgcaactgcatacaggagcactgtacttgatacagcgtgaaactcaagctactttgcttgcggcattattcagagttctcattcttttgatatctgctacaccgtacgctcggatgccaaaggaattgttgccaacagtcattaaagtattgtgcagtagattactgaacaaacactcgaataagactgaacattatgccgtgctggttactgttctaagttgcttggagacagctttttcaaaagtgccacctactttggatgtctttgcggttctcactgaggattgctgtgctggaccatcacatgagcaggaagaatcaaatgttatagcttttcttcttcattgtatagaggaggaaatgcattacagtgttagacatggagccttccaggtgctgagatcagcggttcacaactacccaagctgtgcaaacatgatttgggaaaaacttcgagacaatgttcttaacttgttgcaaatacaaagttttgaagaccaaaagtatgatgctaactttgggcctcctggagctaaagaagaatcatcaatcaagggaagatgtcttgtagctggaataaaggtaatggatgaatgtctgcgtgtttcatctggattcacaggagcagatgacatcaaagaatgcagattactggatattcagcaaatttctgattgtaccataaataaaactattaagtctgcacctcactttgaaatggaagctgctggatcatcacagaattgcactttggacataacacttggaattaaccgttggatcgaggtgatagagactcatctccctcagggattatcccatggttctgctatggtcaggacagcatccctcacatgctttgctggcatgacttctgatgtattcttctccctgcctgaaaataagagagactatgtgacctcttcttctgttcatgcggcgttaaatgatatggttcctagtgtaagatcagctgcatgtcgagctattggcattgttgcatgttttcctcagatattgtcaagctctagcctaccaggcaagttcatagatgccattgagttcaatacacataactcatcaactccagttcgtgtcaccgctgcatgggctttggcaaatctctgttcttgtattcgttttagagcactggaagtgcatacagatccctatgcaggtgtaggtgtattgagcaaatcaagcatatctcttttggttgaagttgctttgcgtctggccaaagatagtgaaaaagtaaaatcaaacgctgttagagctcttggttatctttcaagatttatcagattcaattaccacgccggcacaataaatgacccaagtgattcagttttttatggagatcctgtgtggcttgaaagaatggtgcaggctttgatgtcttgtgtgacaactgggaatgtaaaggtccaatggaatgtttgccatgcccttagcaacttgttcatgaatgataccttgagacttcaagacatgccttgggcatcaagtgtttatagcatacttctacttctaatccgggactcaaacaattataagataaagatgcatgcagctgttgctctatcagtgccagtgtcaaggcttgattacggcagctcgtttccagatgttgttcgaggcctcgtccatgctctcgagtcattgaactcaaacaattcatcgttaccttcaaatttcaaacagagagacaacctcgagaagcagcttacgtttactgctctccatttgcttagttttgtgtcaccaaacgacgatccaagcctgaaagattttcttaccaagaaatcgtcgttcctagaagactggctgagatcactatgcgcatcgttcaacagctcggagcgccagcccttgccaacggaggccacaaacgacgaggacggcttcagcccaaacgtgactcagaaaggcatgctgtcttccgccctgcagtccttgctcggcgtgtacgcgggcaggacccagcaggtcatcacccagagatttgagcaactggctagaagcgtcgcttgaatggtgagcagcgacgagcagtcaggtgtggtctccactccagcctccattaacaagcagcgatatattggtcgtcgtctacccctcaggacggacagcgcgtcaggcagtggatccttaaattctgccgaatcccatgagctccaggcggcacttgtctcggatcttggctgtcatcatgcacaggctctgcaagcctggcttggtcggtgttttcgtcgttgtttacttgaaacatcgttactgtgagtacacacacatatatatatatatatatatatatatatatatatatatatatatatatatatatatatatatatatatatatatatataagttggcagtcttcaaagctcagcgtgaccggacctcagcagcactgggtatctcttaactacttttctggcgttcctgacaaacaggatggcgctgttatgtagatgggccttttccctggtcctggggcttcctgcttgcttgataaaaggttggtatcacccgaccacggtccacgtggacgatattacaagatgttcattgttcttggcaagaggggtcatgaatgccgtccaaatctgttggagtccgtcgctagtgccactgctgttattgagcccatgtgtgtgtgtgcgcgcgtgtgttttgttcatgtaccaaccttcataaattgcttgacgctctgcactgttcgacgatcacttccaatgctctagtccgtaacgttgctgaa

SEQ ID NO: 13839 - DNA, 3085 bp, Zea Mays
tgggtgcatagcacaagctgtcatgacatgctgactgggctggttgtattgtatgtgcccaaggaacaccatggtagcagaaaagattttgtgcaacctctattaggagcactgtacttgatacagcgtgaaactcaagctactttgcttgcggcattattcagagttctcattcttttgatatctgctacaccgtacgctcggatgccaaaggaattgttgccaacagtcattaaagtattgtgcagtagattactgaacaaacactcgaataagactgaacattatgccgtgctggttactgttctaagttgcttggagacagctttttcaaaagtgccacctactttggatgtctttgcggttctcactgaggattgctgtgctggaccatcacatgagcaggaagaatcaaatgttatagcttttcttcttcattgtatagaggaggaaatgcattacagtgttagacatggagccttccaggtgctgagatcagcggttcacaactacccaagctgtgcaaacatgatttgggaaaaacttcgagacaatgttcttaacttgttgcaaatacaaagttttgaagaccaaaagtatgatgctaactttgggcctcctggagctaaagaagaatcatcaatcaagggaagatgtcttgtagctggaataaaggtaactgcaggcgcctatggcatgtgcctagcgcacatggctagagaggatctgatcccactaattgggatagggatagataggatcctgccaatctgggatattgataggattccatcaatcagggagatctcacaggtaatggatgaatgtctgcgtgtttcatctggattcacaggagcagatgacatcaaagaatgcagattactggatattcagcaaatttctgattgtaccataaataaaactattaagtctgcacctcactttgaaatggaagctgctggatcatcacagaattgcactttggacataacacttggaattaaccgttggatcgaggtgatagagactcatctccctcagggattatcccatggttctgctatggtcaggacagcatccctcacatgctttgctggcatgacttctgatgtattcttctccctgcctgaaaataagagagactatgtgacctcttcttctgttcatgcggcgttaaatgatatggttcctagtgtaagatcagctgcatgtcgagctattggcattgttgcatgttttcctcagatattgtcaagctctagcctaccaggcaagttcatagatgccattgagttcaatacacataactcatcaactccagttcgtgtcaccgctgcatgggctttggcaaatctctgttcttgtattcgttttagagcactggaagtgcatacagatccctatgcaggtacatatttcatgttgatggttacagtgccagtgtatattccaatagagcatgcttatgtatttattatctttttgtcaggtgtaggtgtattgagcaaatcaagcatatctcttttggttgaagttgctttgcgtctggccaaagatagtgaaaaagtaaaatcaaacgctgttagagctcttggttatctttcaagatttatcagattcaattaccacgccggcacaataaatgacccaagtaacagtgattcagttttttatggagatcctgtgtggcttgaaagaatggtgcaggctttgatgtcttgtgtgacaactgggaatgtaaaggtccaatggaatgtttgccatgcccttagcaacttgttcatgaatgataccttgagacttcaagacatgccttgggcatcaagtgtttatagcatacttctacttctaatccgggactcaaacaattataagataaagatgcatgcagctgttgctctatcagtgccagtgtcaaggcttgattacggcagctcgtttccagatgttgttcgaggcctcgtccatgctctcgagtcattgaactcaaacaattcatcgttaccttcaaatttcaaacagagagacaacctcgagaagcagcttacgtttactgctctccatttgcttagttttgtgtcaccaaacgacgatccaagcctgaaagattttcttaccaagaaatcgtcgttcctagaagactggctgagatcactatgcgcatcgttcaacagctcggagcgccagcccttgccaacggaggccacaaacgacgaggacggcttcagcccaaacgtgactcagaaaggcatgctgtcttccgccctgcagtccttgctcggcgtgtacgcgggcaggacccagcaggtcatcacccagagatttgagcaactggctagaagcgtcgcttgaatggtgagcagcgacgagcagtcaggtgtggtctccactccagcctccattaacaagcagcgatatattggtcgtcgtctacccctcaggacggacagcgcgtcaggcagtggatccttaaattctgccgaatcccatgagctccaggcggcacttgtctcggatcttggctgtcatcatgcacaggctctgcaagcctggcttggtcggtgttttcgtcgttgtttacttgaaacatcgttactgtgagtacacacacatatatatatatatatatatatatatatatatatatatatatatatatatatatatatatatatatatatatatatataagttggcagtcttcaaagctcagcgtgaccggacctcagcagcactgggtatctcttaactacttttctggcgttcctgacaaacaggatggcgctgttatgtagatgggccttttccctggtcctggggcttcctgcttgcttgataaaaggttggtatcacccgaccacggtccacgtggacgatattacaagatgttcattgttcttggcaagaggggtcatgaatgccgtccaaatctgttggagtccgtcgctagtgccactgctgttattgagcccatgtgtgtgtgtgcgcgcgtgtgttttgttcatgtaccaaccttcataaattgcttgacgctctgcactgttcgacgatcacttccaatgctctagtccgtaacgttgctgaa

SEQ ID NO: 13840 - DNA, 2935 bp, Zea Mays
gaacaccatggtagcagaaaagattttgtgcaacctctattaggagcactgtacttgatacagcgtgaaactcaagctactttgcttgcggcattattcagagttctcattcttttgatatctgctacaccgtacgctcggatgccaaaggaattgttgccaacagtcattaaagtattgtgcagtagattactgaacaaacactcgaataagactgaacattatgccgtgctggttactgttctaagttgcttggagacagctttttcaaaagtgccacctactttggatgtctttgcggttctcactgaggattgctgtgctggaccatcacatgagcaggaagaatcaaatgttatagcttttcttcttcattgtatagaggaggaaatgcattacagtgttagacatggagccttccaggtgctgagatcagcggttcacaactacccaagctgtgcaaacatgatttgggaaaaacttcgagacaatgttcttaacttgttgcaaatacaaagttttgaagaccaaaagtatgatgctaactttgggcctcctggagctaaagaagaatcatcaatcaagggaagatgtcttgtagctggaataaaggtaactgcaggcgcctatggcatgtgcctagcgcacatggctagagaggatctgatcccactaattgggatagggatagataggatcctgccaatctgggatattgataggattccatcaatcagggagatctcacaggtaatggatgaatgtctgcgtgtttcatctggattcacaggagcagatgacatcaaagaatgcagattactggatattcagcaaatttctgattgtaccataaataaaactattaagtctgcacctcactttgaaatggaagctgctggatcatcacagaattgcactttggacataacacttggaattaaccgttggatcgaggtgatagagactcatctccctcagggattatcccatggttctgctatggtcaggacagcatccctcacatgctttgctggcatgacttctgatgtattcttctccctgcctgaaaataagagagactatgtgacctcttcttctgttcatgcggcgttaaatgatatggttcctagtgtaagatcagctgcatgtcgagctattggcattgttgcatgttttcctcagatattgtcaagctctagcctaccaggcaagttcatagatgccattgagttcaatacacataactcatcaactccagttcgtgtcaccgctgcatgggctttggcaaatctctgttcttgtattcgttttagagcactggaagtgcatacagatccctatgcaggtgtaggtgtattgagcaaatcaagcatatctcttttggttgaagttgctttgcgtctggccaaagatagtgaaaaagtaaaatcaaacgctgttagagctcttggttatctttcaagatttatcagattcaattaccacgccggcacaataaatgacccaagtgattcagttttttatggagatcctgtgtggcttgaaagaatggtgcaggctttgatgtcttgtgtgacaactgggaatgtaaaggtccaatggaatgtttgccatgcccttagcaacttgttcatgaatgataccttgagacttcaagacatgccttgggcatcaagtgtttatagcatacttctacttctaatccgggactcaaacaattataagataaagatgcatgcagctgttgctctatcagtgccagtgtcaaggcttgattacggcagctcgtttccagatgttgttcgaggcctcgtccatgctctcgagtcattgaactcaaacaattcatcgttaccttcaaatttcaaacagagagacaacctcgagaagcagcttacgtttactgctctccatttgcttagttttgtgtcaccaaacgacgatccaagcctgaaagattttcttaccaagaaatcgtcgttcctagaagactggctgagatcactatgcgcatcgttcaacagctcggagcgccagcccttgccaacggaggccacaaacgacgaggacggcttcagcccaaacgtgactcagaaaggcatgctgtcttccgccctgcagtccttgctcggcgtgtacgcgggcaggacccagcaggtcatcacccagagatttgagcaactggctagaagcgtcgcttgaatggtgagcagcgacgagcagtcaggtgtggtctccactccagcctccattaacaagcagcgatatattggtcgtcgtctacccctcaggacggacagcgcgtcaggcagtggatccttaaattctgccgaatcccatgagctccaggcggcacttgtctcggatcttggctgtcatcatgcacaggctctgcaagcctggcttggtcggtgttttcgtcgttgtttacttgaaacatcgttactgtgagtacacacacatatatatatatatatatatatatatatatatatatatatatatatatatatatatatatatatatatatatatatataagttggcagtcttcaaagctcagcgtgaccggacctcagcagcactgggtatctcttaactacttttctggcgttcctgacaaacaggatggcgctgttatgtagatgggccttttccctggtcctggggcttcctgcttgcttgataaaaggttggtatcacccgaccacggtccacgtggacgatattacaagatgttcattgttcttggcaagaggggtcatgaatgccgtccaaatctgttggagtccgtcgctagtgccactgctgttattgagcccatgtgtgtgtgtgcgcgcgtgtgttttgttcatgtaccaaccttcataaattgcttgacgctctgcactgttcgacgatcacttccaatgctctagtccgtaacgttgctgaa

SEQ ID NO: 13841 - DNA, 1535 bp, Zea Mays
aaaggatactgtcctcaggtgggattgcactcaacggtggatccgatagataagatttgatgtaaaatcaaacgctgttagagctcttggttatctttcaagatttatcagattcaattaccacgccggcacaataaatgacccaagaatggtgcaggctttgatgtcttgtgtgacaactgggaatgtaaaggtccaatggaatgtttgccatgcccttagcaacttgttcatgaatgataccttgagacttcaagacatgccttgggcatcaagtgtttatagcatacttctacttctaatccgggactcaaacaattataagataaagatgcatgcagctgttgctctatcagtgccagtgtcaaggcttgattacggcagctcgtttccagatgttgttcgaggcctcgtccatgctctcgagtcattgaactcaaacaattcatcgttaccttcaaatttcaaacagagagacaacctcgagaagcagcttacgtttactgctctccatttgcttagttttgtgtcaccaaacgacgatccaagcctgaaagattttcttaccaagaaatcgtcgttcctagaagactggctgagatcactatgcgcatcgttcaacagctcggagcgccagcccttgccaacggaggccacaaacgacgaggacggcttcagcccaaacgtgactcagaaaggcatgctgtcttccgccctgcagtccttgctcggcgtgtacgcgggcaggacccagcaggtcatcacccagagatttgagcaactggctagaagcgtcgcttgaatggtgagcagcgacgagcagtcaggtgtggtctccactccagcctccattaacaagcagcgatatattggtcgtcgtctacccctcaggacggacagcgcgtcaggcagtggatccttaaattctgccgaatcccatgagctccaggcggcacttgtctcggatcttggctgtcatcatgcacaggctctgcaagcctggcttggtcggtgttttcgtcgttgtttacttgaaacatcgttactgtgagtacacacacatatatatatatatatatatatatatatatatatatatatatatatatatatatatatatatatatatatatatatataagttggcagtcttcaaagctcagcgtgaccggacctcagcagcactgggtatctcttaactacttttctggcgttcctgacaaacaggatggcgctgttatgtagatgggccttttccctggtcctggggcttcctgcttgcttgataaaaggttggtatcacccgaccacggtccacgtggacgatattacaagatgttcattgttcttggcaagaggggtcatgaatgccgtccaaatctgttggagtccgtcgctagtgccactgctgttattgagcccatgtgtgtgtgtgcgcgcgtgtgttttgttcatgtaccaaccttcataaattgcttgacgctctgcactgttcgacgatcacttccaatgctctagtccgtaacgttgctgaa

SEQ ID NO: 13842 - DNA, 1304 bp, Zea Mays
caattgggttgggcctagtgtgaacaacacctgcagggcatcaagtgtttatagcatacttctacttctaatccgggactcaaacaattataagataaagatgcatgcagctgttgctctatcagtgccagtgtcaaggcttgattacggcagctcgtttccagatgttgttcgaggcctcgtccatgctctcgagtcattgaactcaaacaattcatcgttaccttcaaatttcaaacagagagacaacctcgagaagcagcttacgtttactgctctccatttgcttagttttgtgtcaccaaacgacgatccaagcctgaaagattttcttaccaagaaatcgtcgttcctagaagactggctgagatcactatgcgcatcgttcaacagctcggagcgccagcccttgccaacggaggccacaaacgacgaggacggcttcagcccaaacgtgactcagaaaggcatgctgtcttccgccctgcagtccttgctcggcgtgtacgcgggcaggacccagcaggtcatcacccagagatttgagcaactggctagaagcgtcgcttgaatggtgagcagcgacgagcagtcaggtgtggtctccactccagcctccattaacaagcagcgatatattggtcgtcgtctacccctcaggacggacagcgcgtcaggcagtggatccttaaattctgccgaatcccatgagctccaggcggcacttgtctcggatcttggctgtcatcatgcacaggctctgcaagcctggcttggtcggtgttttcgtcgttgtttacttgaaacatcgttactgtgagtacacacacatatatatatatatatatatatatatatatatatatatatatatatatatatatatatatatatatatatatatatataagttggcagtcttcaaagctcagcgtgaccggacctcagcagcactgggtatctcttaactacttttctggcgttcctgacaaacaggatggcgctgttatgtagatgggccttttccctggtcctggggcttcctgcttgcttgataaaaggttggtatcacccgaccacggtccacgtggacgatattacaagatgttcattgttcttggcaagaggggtcatgaatgccgtccaaatctgttggagtccgtcgctagtgccactgctgttattgagcccatgtgtgtgtgtgcgcgcgtgtgttttgttcatgtaccaaccttcataaattgcttgacgctctgcactgttcgacgatcacttccaatgctctagtccgtaacgttgctgaa

SEQ ID NO: 13843 - DNA, 1412 bp, Zea Mays
gggtaccctagtttcagggtaccaacaacgtcgtgcgtcgggaaggggcggcgtcgggaacggggtgttagggcggactgactcggttgatgtcggaaaaattggagacggacatattgatggaggactaggccgagactgaggacgagaatcaggaggactgagccgatctgacaaggaaacccagacatatgggactgtttttggcccatccaattttctattttttctatacttaacattaggtataagggttttaaaaattgaggggggccatagcccactatgcccccctcccctttcgtccgcctctgacagtagaacacacctcggtgtaactcataccatgccgcagaaacttctgattggctgtacgtttactgctctccatttgcttagttttgtgtcaccaaacgacgatccaagcctgaaagattttcttaccaagaaatcgtcgttcctagaagactggctgagatcactatgcgcatcgttcaacagctcggagcgccagcccttgccaacggaggccacaaacgacgaggacggcttcagcccaaacgtgactcagaaaggcatgctgtcttccgccctgcagtccttgctcggcgtgtacgcgggcaggacccagcaggtcatcacccagagatttgagcaactggctagaagcgtcgcttgaatggtgagcagcgacgagcagtcaggtgtggtctccactccagcctccattaacaagcagcgatatattggtcgtcgtctacccctcaggacggacagcgcgtcaggcagtggatccttaaattctgccgaatcccatgagctccaggcggcacttgtctcggatcttggctgtcatcatgcacaggctctgcaagcctggcttggtcggtgttttcgtcgttgtttacttgaaacatcgttactgtgagtacacacacatatatatatatatatatatatatatatatatatatatatatatatatatatatatatatatatatatatatatatataagttggcagtcttcaaagctcagcgtgaccggacctcagcagcactgggtatctcttaactacttttctggcgttcctgacaaacaggatggcgctgttatgtagatgggccttttccctggtcctggggcttcctgcttgcttgataaaaggttggtatcacccgaccacggtccacgtggacgatattacaagatgttcattgttcttggcaagaggggtcatgaatgccgtccaaatctgttggagtccgtcgctagtgccactgctgttattgagcccatgtgtgtgtgtgcgcgcgtgtgttttgttcatgtaccaaccttcataaattgcttgacgctctgcactgttcgacgatcacttccaatgctctagtccgtaacgttgctgaa

SEQ ID NO: 13844 - DNA, 2217 bp, Zea Mays
atgctgcaccgggacggcgggtcgacgtcgtcacgtcaccagcgcctgcctccctttgtttatccctcgcaggtcgcagctacggctacgcaaaagcttcccttccttccctggaacggcaacgagacgtgggagctgggacgggcaagtagtagaaaccttctctccttccccagccaggacgccatacagaatccgacgcgatccagaagaagccaagggcctcttcatatcctcccgcctccctctgcgaggttcccagaccgagccatcgccggcgctaggctcggggatcttgtcgggtcccgtcccgtcctaccacttcgccggcgctgcgtcgccgtcactcgtcagtcaggactcaggatccccaagatggcttcttcaaacggtgaggctgagcaacaatggatagagaatatcaagtcaggaggaacagttccctgtctagcacctgaaaactgtcctaatggctgggctactcctcccggtgattcatttatggtcagaggcccagaatatcttacaaacaaggtaaaaataccaggtggagagtatcttctgaagcctctcggctttgattggatcaaaggaccagcaaaaatctgtgagatcctcaaagacagtaaccatcgagttagaaaagctatcgatgatgaggtttcacgtagtaaccagccttttgtctgggcattcaacctgcaactgcccaaggataacttcagcgcaatattctactttgtgtcgctggaggctatacctgaaggctcccttatggaccagtttttgaaaggagatgatgccttccgaaactccaggcttaagttaatagcgaacattgtcaaggggccctggattgtccggacggctgttggtgaacaggccatctgtatactggggagagccctctcgtgcaagtatgttcaaggatcaaacttcatcgaagtcgatgtggatatcgggtcttctatagttgcaaatgcgatcgttcatttggcatttggctatatcacaacgctaactgtagatttggcctttctcattgagagtcaaaccgagccggagctccctgagagacttattggagcagtaaggttttctgagttaaatccaggatcagctggtttgtttgaaaggcggtctgaagagcatcaggaaagcactcagtctcggcctgtaggattttggcagggtttctctcaactgttgaacaaccaaggcaatacaagggagccatcccctaatttacagaatactaatggaactttgcgcaaagaagaagcaaatgaggatgccaaatgggtaagctcgtagagaagacgcgtgaggtgacattgcacactgaagacatggaggattctatttgcgctgtgagatccatggctgattttggacttccacttgctgatgacatgatcaaggacataaatagatcactgcaaataatgtcaaagacccagccaaagagagggttgatccaaaaccccagttgggggttccagtcaaggaaaagctcaggaacttgggacgaactgggctctaccaatggaagtagcagcaggaactacctctcttcaatgttcaacacggcgaagcaaaaggcatcgggtctcaggtggccgcagcctaattttgcaacaaaagatgatactagcgagaactcggcgtcgtcttctgccctggaatcgccacaagctggtgggcaaggtgcatctacaccagatacagagaaggatgagctccccatttcaagtcggttgtcagagggtacggccgcaaaccgtagcctgcctgctaccggcgtctcggaaacagtggaggcttacaacaagttcaaagaagagcaggagctgaagcttcgtgagtggctaagagactctgaagaagccgtcaatgataaagactgagtgtgctaaagctgcttcggccctgtgcctctgttattagatatatggtacattctgaactaaaaagaaacatagcactctgttaatgaaacagaggttgattggtatagatgcacaagatgccgaaagactgtagtttgtgatgaaggggttggtccggacgattgtaacgtgacttatttatagatgccattgcatagtgtttgtctcaagcctcatgtgtaattgaatcacgatagataatagataaaagatgttgtctgtttctgttcttgtgatccaagtatacagctcccagcatataagcatt

SEQ ID NO: 13845 - DNA, 1234 bp, Zea Mays
gtcaaatattaacatcgcattaaggcgatggcttcttcaaacggtgaggctgagcaacaatggatagagaatatcaagtcaggaggaacagttccctgtctagcacctgaaaactgtcctaatggctgggctactcctcccggtgattcatttatggtcagaggcccagaatatcttacaaacaaggtaaaaataccaggtggagagtatcttctgaagcctctcggctttgattggatcaaaggaccagcaaaaatctgtgagatcctcaaagacagtaaccatcgagttagaaaagctatcgatgatgaggtttcacgtagtaaccagccttttgtctgggcattcaacctgcaactgcccaaggataacttcagcgcaatattctactttgtgtcgctggaggctatacctgaaggctcccttatggaccagtttttgaaaggagatgatgccttccgaaactccaggcttaagttaatagcgaacattgtcaaggggccctggattgtccggacggctgttggtgaacaggccatctgtatactggggagagccctctcgtgcaagtatgttcaaggatcaaacttcatcgaagtcgatgtggatatcgggtcttctatagttgcaaatgcgatcgttcatttggcatttggctatatcacaacgctaactgtagatttggcctttctcattgagagtcaaaccgagccggagctccctgagagacttattggagcagtaaggttttctgagttaaatccaggatcagctggtttgtttgaaaggcggtctgaagagcatcaggaaagcactcagtctcggcctgtaggattttggcagggtttctctcaactgttgaacaaccaaggcaatacaagggagccatcccctaatttacagaatactaatggaactttgcgcaaagaagaagcaaatgaggatgccaaatgattcagacccctaccattgtttcggggacaatttatcagtagatcacggcgttacaatttaccagatagtcccagggctttgtttctttgccctcacatctgctgtaaaaattataactttggccacagacaaactgcataactttgtacataaactgaatgcttcctaaatatttgttcccttatatagttatatgtgaattgtatgaagctcaaggaaagatgtttcattccacagaatgtgatagttgaaagcatctgcatttcaaaaagataaaaaa

SEQ ID NO: 13846 - DNA, 1272 bp, Zea Mays
aattttccggtaacaccatggaccatggtgcgcggggtagttgcagctgttaggagcaccgagcacaataatttgtctgttcttcggcctccatccccgcaggatagagaaagagggagctctagacggggaggctcccaaatcgatattttttcgcatctgttcgttctccgacgcggcggcgaatctgagaacccctcgctgagtggtcggcggcgagtccgtgatggtcggcggccggcgggcgcggacatgcacaaccgctcctcctcctccgccgccgctgcgtcgtcgttgccgctctcccccgccgacggcttcctgcgcgtgaaggacggcgtggacggaatgatcaaggtaagctcgtagagaagacgcgtgaggtgacattgcacactgaagacatggaggattctatttgcgctgtgagatccatggctgattttggacttccacttgctgatgacatgatcaaggacataaatagatcactgcaaataatgtcaaagacccagccaaagagagggttgatccaaaaccccagttgggggttccagtcaaggaaaagctcaggaacttgggacgaactgggctctaccaatggaagtagcagcaggaactacctctcttcaatgttcaacacggcgaagcaaaaggcatcgggtctcaggtggccgcagcctaattttgcaacaaaagatgatactagcgagaactcggcgtcgtcttctgccctggaatcgccacaagctggtgggcaaggtgcatctacaccagatacagagaaggatgagctccccatttcaagtcggttgtcagagggtacggccgcaaaccgtagcctgcctgctaccggcgtctcggaaacagtggaggcttacaacaagttcaaagaagagcaggagctgaagcttcgtgagtggctaagagactctgaagaagccgtcaatgataaagactgagtgtgctaaagctgcttcggccctgtgcctctgttattagatatatggtacattctgaactaaaaagaaacatagcactctgttaatgaaacagaggttgattggtatagatgcacaagatgccgaaagactgtagtttgtgatgaaggggttggtccggacgattgtaacgtgacttatttatagatgccattgcatagtgtttgtctcaagcctcatgtgtaattgaatcacgatagataatagataaaagatgttgtctgtttctgttcttgtgatccaagtatacagctcccagcatataagcatt

SEQ ID NO: 13847 - DNA, 2717 bp, Zea Mays
tatggagtgcatatatatatattggtcatattttgcagctttcaataataacacattgttactattagactctagttcatcaccaatggcgaagttcttcaactacaccatcgtccaaggactcttaatgctttccatggtacttctggcatcatgtgtcattcatgcacacataataagtgatctaggtggcgaacatctagaggacaagccaattatcaacatcattatttccatttggcgacaaacaacctctgagtactgtcctgtgcggttcttttgtatgcgaatggtgttgtgtcaccttccattacatggtcaatcgtgaggatgtaagttcgctatcattgtctatgttgtaatttttatgttttattgttggtcatcacattacacttacttagcactgcttgctttttgctttcattgcatgttcctaaatccatgatccatgctgaatggctagaaagagatatggttaccatcggcgtggctaaggttgtaacatacttgctttgctttgcgtgccgtgaagttcttcatcaaaaagggctattctacaataaaaacggaaatttgaaacacctcccataactcagtttgtacacgctagcacacaatgtttaggccattagtttggttaacatgttatgtgaaagtggtacttcagatgatgttgagatgtttatggaacttgagatgatgtatcttattgtggtttggtgctaataatactactgttatcgttctatgaatgtgatttgtgatgtgtatgacactactagagatatgcttatttaagacacatattttaagacgtatatcagcgtattttatagaagagtcttttaccatatggcgatgagtaaagtaagacggtttgttggagatccgtctttaataaagaagtattttgagacagttacatcataggaaatgtcttatattgattgaagacagattcttattgaaaattgtctcgaataaatataccttttgagtcattaagattgcaaaaatcgtcttatattttggttagtatattagacacctcggtataataaaccatcttaaataaaggtattattagagtcgtttagactataagaaatgtcttagatattagtgagtatactagacacttataaatatgaaaccatcgtattatagttctgataagacgtattataaaaatatagtaaataataaattcgacttagtttgatgatatatatgatataagatgtaaaacttatctctgcaatttgattatagggtaaaatggacccatcttgtgtcctagttgttgatgtgtcacacaacattactaagtaaaatggacccgaattcacttttgagttttgagcgttcccgttcctgttcccttcccacctctcccggcttcagacctcgggctccccgctcctgcgccgccgccaccgtcgcggccctcatccctcaaattaaacctctaggcctccactcgttgaagccacgtcactcgtattagcacacctgtccctcgctgtaacggaggcccgtccctcgctgcaacgaatacccctctccctttagctgcactagcactgcactggttcgtatcgtctcccactctccctctccctcccattcacacggtctcagtgaagaactcctccgcgacttggtggccatcgatggcgacgcactgccctaccacgacatgggttgtttggagatggtcatgtacgagcggtggttcatgttctagaagcggcggcaacatcctacacctgagagcggccgagtcatcccgaacccgcacggcacacgcggacgcgctcacgcgcctgggctggggatttatgcttctgacggaaatatttggtggttcagtttgaatcaagagtttttgtgtatttctttcttactatgatttggtagggagggactgaatattatcatggaattggaatacaaataaacaaattcaatctattgcagcggaggataagcatgtaattagcagaccaacaacatttgcacttgtccatgctgatggcactacaaaattcctggggacatggaatggagaagatctaccccctcctgatactaaagctattagggatatctgtgtactgcatggcgggcatgttgtattgcatcactgagcaggaagttcccttttcaggtctacaaagaaagtggtgcacccataaggtgagggcatctatcacaaaagtttgtcatgaagcgaaagagatctttcaagagacaaaaaagccaagttggtcatggaatgcttgaaattttattgcatgacaatgatgaagaggaggcagcattgcagagagttgcccaagctgaacgtgcggcaaaataggctgtacaaagagctattcgactgcgcaacaaggtccaattctcatgacaaacacagaactcgcaacatacaaatctatcatagttctcaggattgtcgaggctgctagtatatcagactcgtcccaagatattatttgtattatcctcgactaaagaataatatgggttgttcattatttttgtgaagagcatgggaaacactctttgtagccatgatattggcttttgatgagttgttcattgtttttaagaatatactgccatgtaagtcattttgtttacatcttaatatgacggtttccataatgtccaatatatgtcttttaaataagatgattttcttgttgcaa

SEQ ID NO: 13848 - DNA, 2896 bp, Zea Mays
tatggagtgcatatatatatattggtcatattttgcagctttcaataataacacattgttactattagactctagttcatcaccaatggcgaagttcttcaactacaccatcgtccaaggactcttaatgctttccatggtacttctggcatcatgtgtcattcatgcacacataataagtggggaaattgaagatgttagcaacactaggagcccgacaatgatgggggcaaatcgaaagataattggagataataaaaatttgttgtgctatctaaaggctctagagtattgctgtgaaaggaccaaacagtgctatgatgacataaagaagtgcttggagcactgccatagttgaaagatctaggtggcgaacatctagaggacaagccaattatcaacatcattatttccatttggcgacaaacaacctctgagtactgtcctgtgcggttcttttgtatgcgaatggtgttgtgtcaccttccattacatggtcaatcgtgaggatgtaagttcgctatcattgtctatgttgtaatttttatgttttattgttggtcatcacattacacttacttagcactgcttgctttttgctttcattgcatgttcctaaatccatgatccatgctgaatggctagaaagagatatggttaccatcggcgtggctaaggttgtaacatacttgctttgctttgcgtgccgtgaagttcttcatcaaaaagggctattctacaataaaaacggaaatttgaaacacctcccataactcagtttgtacacgctagcacacaatgtttaggccattagtttggttaacatgttatgtgaaagtggtacttcagatgatgttgagatgtttatggaacttgagatgatgtatcttattgtggtttggtgctaataatactactgttatcgttctatgaatgtgatttgtgatgtgtatgacactactagagatatgcttatttaagacacatattttaagacgtatatcagcgtattttatagaagagtcttttaccatatggcgatgagtaaagtaagacggtttgttggagatccgtctttaataaagaagtattttgagacagttacatcataggaaatgtcttatattgattgaagacagattcttattgaaaattgtctcgaataaatataccttttgagtcattaagattgcaaaaatcgtcttatattttggttagtatattagacacctcggtataataaaccatcttaaataaaggtattattagagtcgtttagactataagaaatgtcttagatattagtgagtatactagacacttataaatatgaaaccatcgtattatagttctgataagacgtattataaaaatatagtaaataataaattcgacttagtttgatgatatatatgatataagatgtaaaacttatctctgcaatttgattatagggtaaaatggacccatcttgtgtcctagttgttgatgtgtcacacaacattactaagtaaaatggacccgaattcacttttgagttttgagcgttcccgttcctgttcccttcccacctctcccggcttcagacctcgggctccccgctcctgcgccgccgccaccgtcgcggccctcatccctcaaattaaacctctaggcctccactcgttgaagccacgtcactcgtattagcacacctgtccctcgctgtaacggaggcccgtccctcgctgcaacgaatacccctctccctttagctgcactagcactgcactggttcgtatcgtctcccactctccctctccctcccattcacacggtctcagtgaagaactcctccgcgacttggtggccatcgatggcgacgcactgccctaccacgacatgggttgtttggagatggtcatgtacgagcggtggttcatgttctagaagcggcggcaacatcctacacctgagagcggccgagtcatcccgaacccgcacggcacacgcggacgcgctcacgcgcctgggctggggatttatgcttctgacggaaatatttggtggttcagtttgaatcaagagtttttgtgtatttctttcttactatgatttggtagggagggactgaatattatcatggaattggaatacaaataaacaaattcaatctattgcagcggaggataagcatgtaattagcagaccaacaacatttgcacttgtccatgctgatggcactacaaaattcctggggacatggaatggagaagatctaccccctcctgatactaaagctattagggatatctgtgtactgcatggcgggcatgttgtattgcatcactgagcaggaagttcccttttcaggtctacaaagaaagtggtgcacccataaggtgagggcatctatcacaaaagtttgtcatgaagcgaaagagatctttcaagagacaaaaaagccaagttggtcatggaatgcttgaaattttattgcatgacaatgatgaagaggaggcagcattgcagagagttgcccaagctgaacgtgcggcaaaataggctgtacaaagagctattcgactgcgcaacaaggtccaattctcatgacaaacacagaactcgcaacatacaaatctatcatagttctcaggattgtcgaggctgctagtatatcagactcgtcccaagatattatttgtattatcctcgactaaagaataatatgggttgttcattatttttgtgaagagcatgggaaacactctttgtagccatgatattggcttttgatgagttgttcattgtttttaagaatatactgccatgtaagtcattttgtttacatcttaatatgacggtttccataatgtccaatatatgtcttttaaataagatgattttcttgttgcaa

SEQ ID NO: 13849 - DNA, 1724 bp, Zea Mays
cttttgtataagtactttttaagataaatcggtgccaatgattattaggtttcaaaattaggtaatgaaatatgttatttatagtcaaagttttatatatttgactcaaaccttgttcaaaacgacttataatttagacctggagggagtatttaagggtggtaatgtgctctaaattttacaatataaaatttaaggattgaatcggattaggattagattctattttattcattttttaattaaaattatctacatccttaaacaaattgtgaagaatcatttggatcgtgattcattaccatccataagtatttgattattgttattacaaacggttcgtggataaaaaaaccaacatgcctttgattcgcggtaggcctacctccctttcgacgtgaggcaaccaccttattaacccccctacacacaccattttaggcgatcacgatagagatctacacaaccatctccagcaagtcatataaacgatcgtacaaaatactattttgcactatagattacactgtttacagagtgtagtatgaaataaagataagatagaaagtgagatactgctagagatagtctaaccaagtgactacccagatctacttatgtgtcgagatgcactacaatgtgtctatgttgaattgcgagctctgcaccttatgcataccatcaagggagtagaatcggtgtctttttataccccgtattcgtattgaaatgatccatgcggccaaagctttggcaattccaccattatgaaagcatatgagatgtagtatagaaagttgttcttctacatgattagggtccgaggtttcggatttttccttgctacgaaaagggatttaacgacttccttcctactaccaagattaataccagcaaccataccttcctacctggataaaggctactctaacaaaatcaaagggaatattctaggtttcgaatcaatggcttcggcacctcggaatgcgaaaaatttaatagatgaaacagaggtatccctacctccccttagctatcaaaataaaaatccctacttgtctttgggttcttctctagcacgctaaaaggatagcacttgcattaaatgtacgtcacccctgcaatctatatgtatagattttgaagaaaagttgccttaagaaaaccatctctaaaaatcaatttataggaataattttaaaattgtctctaaaaatatatttttatataattgatggcataccctaccggaatctggctctttgccgagtgctcgacgctttgtcgagtgccttttatcgggcactcggcaaagcattctttgccgagtgccacactcggtaaaggaagactccccgtaacgaccacctttaccgagggtagcacactcgacatagccagacactcggcgactggcgatgctcggcaaaggaccgtcagcagtcatccatagctaacatccgttatctttgccgagcgctagatgttgacactcggcaaaaaaggtacgttgccgagtatcgggccgggcgacactcagcaaagcatactttgccgagtgccttacatggacactcggcaaagttttttttcttttttaaaccaaactttttgtggtttgttcctacactatgtagacttacatgttcgatttttgaaaaattataaaagtgtttgctataactattagattttgttcgtttaattgaattgactcggataat

SEQ ID NO: 13850 - DNA, 1512 bp, Zea Mays
cttagtttgatgatatatatgatataagatgtaaaacttatctctgcaatttgattatagggtaaaatggacccatcttgtgtcctagttgttgatgtgtcacacaacattactaagtaaaatggacccgaattcacttttgagttttgagcgttcccgttcctgttcccttcccacctctcccggcttcagacctcgggctccccgctcctgcgccgccgccaccgtcgcggccctcatccctcaaattaaacctctaggcctccactcgttgaagccacgtcactcgtattagcacacctgtccctcgctgtaacggaggcccgtccctcgctgcaacgaatacccctctccctttagctgcactagcactgcactggttcgtatcgtctcccactctccctctccctcccattcacacggtctcagtgaagaactcctccgcgacttggtggccatcgatggcgacgcactgccctaccacgacatgggttgtttggagatggtcatgtacgagcggtggttcatgttctagaagcggcggcaacatcctacacctgagagcggccgagtcatcccgaacccgcacggcacacgcggacgcgctcacgcgcctgggctggggatttatgcttctgacggaaatatttggtggttcagtttgaatcaagagtttttgtgtatttctttcttactatgatttggtagggagggactgaatattatcatggaattggaatacaaataaacaaattcaatctattgcagcggaggataagcatgtaattagcagaccaacaacatttgcacttgtccatgctgatggcactacaaaattcctggcgtgtttcagggacatggaatggagaagatctaccccctcctgatactaaagctattagggatatctgtgtactgcatggcgggcatgttgtattgcatcactgagcaggaagttcccttttcaggtctacaaagaaagtggtgcacccataaggtgagggcatctatcacaaaagtttgtcatgaagcgaaagagatctttcaagagacaaaaaagccaagttggtcatggaatgcttgaaattttattgcatgacaatgatgaagaggaggcagcattgcagagagttgcccaagctgaacgtgcggcaaaataggctgtacaaagagctattcgactgcgcaacaaggtccaattctcatgacaaacacagaactcgcaacatacaaatctatcatagttctcaggattgtcgaggctgctagtatatcagactcgtcccaagatattatttgtattatcctcgactaaagaataatatgggttgttcattatttttgtgaagagcatgggaaacactctttgtagccatgatattggcttttgatgagttgttcattgtttttaagaatatactgccatgtaagtcattttgtttacatcttaatatgacggtttccataatgtccaatatatgtcttttaaataagatgattttcttgttgcaa

SEQ ID NO: 13851 - DNA, 1378 bp, Zea Mays
tcccgttcctgttcccttcccacctctcccggcttcagacctcgggctccccgctcctgcgccgccgccaccgtcgcggccctcatccctcaaattaaacctctaggcctccactcgttgaagccacgtcactcgtattagcacacctgtccctcgctgtaacggaggcccgtccctcgctgcaacgaatacccctctccctttagctgcactagcactgcactggttcgtatcgtctcccactctccctctccctcccattcacacggtctcagtgaagaactcctccgcgacttggtggccatcgatggcgacgcactgccctaccacgacatgggttgtttggagatggtcatgtacgagcggtggttcatgttctagaagcggcggcaacatcctacacctgagagcggccgagtcatcccgaacccgcacggcacacgcggacgcgctcacgcgcctgggctggggatttatgcttctgacggaaatatttggtggttcagtttgaatcaagagtttttgtgtatttctttcttactatgatttggtagggagggactgaatattatcatggaattggaatacaaataaacaaattcaatctattgcagcggaggataagcatgtaattagcagaccaacaacatttgcacttgtccatgctgatggcactacaaaattcctgggtaaggccttaaagttcatcaaagattatgggacatggaatggagaagatctaccccctcctgatactaaagctattagggatatctgtgtactgcatggcgggcatgttgtattgcatcactgagcaggaagttcccttttcaggtctacaaagaaagtggtgcacccataaggtgagggcatctatcacaaaagtttgtcatgaagcgaaagagatctttcaagagacaaaaaagccaagttggtcatggaatgcttgaaattttattgcatgacaatgatgaagaggaggcagcattgcagagagttgcccaagctgaacgtgcggcaaaataggctgtacaaagagctattcgactgcgcaacaaggtccaattctcatgacaaacacagaactcgcaacatacaaatctatcatagttctcaggattgtcgaggctgctagtatatcagactcgtcccaagatattatttgtattatcctcgactaaagaataatatgggttgttcattatttttgtgaagagcatgggaaacactctttgtagccatgatattggcttttgatgagttgttcattgtttttaagaatatactgccatgtaagtcattttgtttacatcttaatatgacggtttccataatgtccaatatatgtcttttaaataagatgattttcttgttgcaa

SEQ ID NO: 13852 - DNA, 1333 bp, Zea Mays
tcccgttcctgttcccttcccacctctcccggcttcagacctcgggctccccgctcctgcgccgccgccaccgtcgcggccctcatccctcaaattaaacctctaggcctccactcgttgaagccacgtcactcgtattagcacacctgtccctcgctgtaacggaggcccgtccctcgctgcaacgaatacccctctccctttagctgcactagcactgcactggttcgtatcgtctcccactctccctctccctcccattcacacggtctcagtgaagaactcctccgcgacttggtggccatcgatggcgacgcactgccctaccacgacatgggttgtttggagatggtcatgtacgagcggtggttcatgttctagaagcggcggcaacatcctacacctgagagcggccgagtcatcccgaacccgcacggcacacgcggacgcgctcacgcgcctgggctggggatttatgcttctgacggaaatatttggtggttcagtttgaatcaagagtttttgtgtatttctttcttactatgatttggtagggagggactgaatattatcatggaattggaatacaaataaacaaattcaatctattgcagcggaggataagcatgtaattagcagaccaacaacatttgcacttgtccatgctgatggcactacaaaattcctggggacatggaatggagaagatctaccccctcctgatactaaagctattagggatatctgtgtactgcatggcgggcatgttgtattgcatcactgagcaggaagttcccttttcagggtgcacccataaggtgagggcatctatcacaaaagtttgtcatgaagcgaaagagatctttcaagagacaaaaaagccaagttggtcatggaatgcttgaaattttattgcatgacaatgatgaagaggaggcagcattgcagagagttgcccaagctgaacgtgcggcaaaataggctgtacaaagagctattcgactgcgcaacaaggtccaattctcatgacaaacacagaactcgcaacatacaaatctatcatagttctcaggattgtcgaggctgctagtatatcagactcgtcccaagatattatttgtattatcctcgactaaagaataatatgggttgttcattatttttgtgaagagcatgggaaacactctttgtagccatgatattggcttttgatgagttgttcattgtttttaagaatatactgccatgtaagtcattttgtttacatcttaatatgacggtttccataatgtccaatatatgtcttttaaataagatgattttcttgttgcaa

SEQ ID NO: 13853 - DNA, 1993 bp, Zea Mays
tcccgttcctgttcccttcccacctctcccggcttcagacctcgggctccccgctcctgcgccgccgccaccgtcgcggccctcatccctcaaattaaacctctaggcctccactcgttgaagccacgtcactcgtattagcacacctgtccctcgctgtaacggaggcccgtccctcgctgcaacgaatacccctctccctttagctgcactagcactgcactggttcgtatcgtctcccactctccctctccctcccattcacacggtctcagtgaagaactcctccgcgacttggtggccatcgatggcgacgcactgccctaccacgacatgggttgtttggagatggtcatgtacgagcggtggttcatgttctagaagcggcggcaacatcctacacctgagagcggccgagtcatcccgaacccgcacggcacacgcggacgcgctcacgcgcctgggctggggatttatgcttctgacggaaatatttggtggttcagtttgaatcaagagtttttgtgtatttctttcttactatgatttggtagggagggactgaatattatcatggaattggaatacaaataaacaaattcaatctattgcagcggaggataagcatgtaattagcagaccaacaacatttgcacttgtccatgctgatggcactacaaaattcctgggtaaggccttaaagttcatcaaagattatggtaaatcctttttccatattttaataattcaatacacgtttgttgagataatggatgtagttttctccagagatgtgtggagatgtgtctagcatatgattaaggtataacagtataacacagtttcagtgtctgcactctgtccatccacttggctttgtttggttgatatctttttgttcttgcataatggattagttcatggatgggatctcgattttgctctatggaaatgtgtggtggtacacacttcaaaacatagttacaacattgaagagaatcgtgactacaatgagtggaactgcactatcactatagatctatagcagtagagttatgaaggaactttatcattcactgactcacaattgctgcatgttttgtataatgagtttttggttgatggagctcgggttgtgggtaatagatgcatccagtcagatcgtgttcacttggggaaggatacatggattttgtgatgaacacaaacttacaaaggcacatgtcttaactcttaatacaagtttttgcttaatgacttcatgtgagtaccaatgtttatattaaactttggtgaatattcacctttcgcatatcaattcttagtttcaacatattagcgtgtttcagggacatggaatggagaagatctaccccctcctgatactaaagctattagggatatctgtgtactgcatggcgggcatgttgtattgcatcactgagcaggaagttcccttttcagggtgcacccataaggtgagggcatctatcacaaaagtttgtcatgaagcgaaagagatctttcaagagacaaaaaagccaagttggtcatggaatgcttgaaattttattgcatgacaatgatgaagaggaggcagcattgcagagagttgcccaagctgaacgtgcggcaaaataggctgtacaaagagctattcgactgcgcaacaaggtccaattctcatgacaaacacagaactcgcaacatacaaatctatcatagttctcaggattgtcgaggctgctagtatatcagactcgtcccaagatattatttgtattatcctcgactaaagaataatatgggttgttcattatttttgtgaagagcatgggaaacactctttgtagccatgatattggcttttgatgagttgttcattgtttttaagaatatactgccatgtaagtcattttgtttacatcttaatatgacggtttccataatgtccaatatatgtcttttaaataagatgattttcttgttgcaa

SEQ ID NO: 13854 - DNA, 959 bp, Zea Mays
tcccgttcctgttcccttcccacctctcccggcttcagacctcgggctccccgctcctgcgccgccgccaccgtcgcggccctcatccctcaaattaaacctctaggcctccactcgttgaagccacgtcactcgtattagcacacctgtccctcgctgtaacggaggcccgtccctcgctgcaacgaatacccctctccctttagctgcactagcactgcactgcggaggataagcatgtaattagcagaccaacaacatttgcacttgtccatgctgatggcactacaaaattcctggggacatggaatggagaagatctaccccctcctgatactaaagctattagggatatctgtgtactgcatggcgggcatgttgtattgcatcactgagcaggaagttcccttttcaggtctacaaagaaagtggtgcacccataaggtgagggcatctatcacaaaagtttgtcatgaagcgaaagagatctttcaagagacaaaaaagccaagttggtcatggaatgcttgaaattttattgcatgacaatgatgaagaggaggcagcattgcagagagttgcccaagctgaacgtgcggcaaaataggctgtacaaagagctattcgactgcgcaacaaggtccaattctcatgacaaacacagaactcgcaacatacaaatctatcatagttctcaggattgtcgaggctgctagtatatcagactcgtcccaagatattatttgtattatcctcgactaaagaataatatgggttgttcattatttttgtgaagagcatgggaaacactctttgtagccatgatattggcttttgatgagttgttcattgtttttaagaatatactgccatgtaagtcattttgtttacatcttaatatgacggtttccataatgtccaatatatgtcttttaaataagatgattttcttgttgcaa

SEQ ID NO: 13855 - DNA, 1932 bp, Zea Mays
tcccgttcctgttcccttcccacctctcccggcttcagacctcgggctccccgctcctgcgccgccgccaccgtcgcggccctcatccctcaaattaaacctctaggcctccactcgttgaagccacgtcactcgtattagcacacctgtccctcgctgtaacggaggcccgtccctcgctgcaacgaatacccctctccctttagctgcactagcactgcactggttcgtatcgtctcccactctccctctccctcccattcacacggtctcagtgaagaactcctccgcgacttggtggccatcgatggcgacgcactgccctaccacgacatgggttgtttggagatggtcatgtacgagcggtggttcatgttctagaagcggcggcaacatcctacacctgagagcggccgagtcatcccgaacccgcacggcacacgcggacgcgctcacgcgcctgggctggggatttatgcttctgacggaaatatttggtggttcagtttgaatcaagagtttttgtgtatttctttcttactatgatttggtagggagggactgaatattatcatggaattggaatacaaataaacaaattcaatctattgcagcggaggataagcatgtaattagcagaccaacaacatttgcacttgtccatgctgatggcactacaaaattcctgggtaaggccttaaagttcatcaaagattatggtaaatcctttttccatattttaataattcaatacacgtttgttgagataatggatgtagttttctccagagatgtgtggagatgtgtctagcatatgattaaggtataacagtataacacagtttcagtgtctgcactctgtccatccacttggctttgtttggttgatatctttttgttcttgcataatggattagttcatggatgggatctcgattttgctctatggaaatgtgtggtggtacacacttcaaaacatagttacaacattgaagagaatcgtgactacaatgagtggaactgcactatcactatagatctatagcagtagagttatgaaggaactttatcattcactgactcacaattgctgcatgttttgtataatgagtttttggttgatggagctcgggttgtgggtaatagatgcatccagtcagatcgtgttcacttggggaaggatacatggattttgtgatgaacacaaacttacaaaggcacatgtcttaactcttaatacaagtttttgcttaatgacttcatcgtgtttcagggacatggaatggagaagatctaccccctcctgatactaaagctattagggatatctgtgtactgcatggcgggcatgttgtattgcatcactgagcaggaagttcccttttcaggtctacaaagaaagtggtgcacccataaggtgagggcatctatcacaaaagtttgtcatgaagcgaaagagatctttcaagagacaaaaaagccaagttggtcatggaatgcttgaaattttattgcatgacaatgatgaagaggaggcagcattgcagagagttgcccaagctgaacgtgcggcaaaataggctgtacaaagagctattcgactgcgcaacaaggtccaattctcatgacaaacacagaactcgcaacatacaaatctatcatagttctcaggattgtcgaggctgctagtatatcagactcgtcccaagatattatttgtattatcctcgactaaagaataatatgggttgttcattatttttgtgaagagcatgggaaacactctttgtagccatgatattggcttttgatgagttgttcattgtttttaagaatatactgccatgtaagtcattttgtttacatcttaatatgacggtttccataatgtccaatatatgtcttttaaataagatgattttcttgttgcaa

SEQ ID NO: 13856 - DNA, 1522 bp, Zea Mays
tcccgttcctgttcccttcccacctctcccggcttcagacctcgggctccccgctcctgcgccgccgccaccgtcgcggccctcatccctcaaattaaacctctaggcctccactcgttgaagccacgtcactcgtattagcacacctgtccctcgctgtaacggaggcccgtccctcgctgcaacgaatacccctctccctttagctgcactagcactgcactggttcgtatcgtctcccactctccctctccctcccattcacacggtctcagtgaagaactcctccgcgacttggtggccatcgatggcgacgcactgccctaccacgacatgggttgtttggagatggtcatgtacgagcggtggttcatgttctagaagcggcggcaacatcctacacctgagagcggccgagtcatcccgaacccgcacggcacacgcggacgcgctcacgcgcctgggctggggatttatgcttctgacggaaatatttggtggttcagtttgaatcaagagtttttgtgtatttctttcttactatgatttggtagggagggactgaatattatcatggaattggaatacaaataaacaaattcaatctattgcagcggaggataagcatgtaattagcagaccaacaacatttgcacttgtccatgctgatggcactacaaaattcctggatgcatccagtcagatcgtgttcacttggggaaggatacatggattttgtgatgaacacaaacttacaaaggcacatgtcttaactcttaatacaagtttttgcttaatgacttcatgtgagtaccaatgtttatattaaactttggtgaatattcacctttcgcatatcaattcttagtttcaacatattagcgtgtttcagggacatggaatggagaagatctaccccctcctgatactaaagctattagggatatctgtgtactgcatggcgggcatgttgtattgcatcactgagcaggaagttcccttttcaggtgagggcatctatcacaaaagtttgtcatgaagcgaaagagatctttcaagagacaaaaaagccaagttggtcatggaatgcttgaaattttattgcatgacaatgatgaagaggaggcagcattgcagagagttgcccaagctgaacgtgcggcaaaataggctgtacaaagagctattcgactgcgcaacaaggtccaattctcatgacaaacacagaactcgcaacatacaaatctatcatagttctcaggattgtcgaggctgctagtatatcagactcgtcccaagatattatttgtattatcctcgactaaagaataatatgggttgttcattatttttgtgaagagcatgggaaacactctttgtagccatgatattggcttttgatgagttgttcattgtttttaagaatatactgccatgtaagtcattttgtttacatcttaatatgacggtttccataatgtccaatatatgtcttttaaataagatgattttcttgttgcaa

SEQ ID NO: 13857 - DNA, 1619 bp, Zea Mays
tcccgttcctgttcccttcccacctctcccggcttcagacctcgggctccccgctcctgcgccgccgccaccgtcgcggccctcatccctcaaattaaacctctaggcctccactcgttgaagccacgtcactcgtattagcacacctgtccctcgctgtaacggaggcccgtccctcgctgcaacgaatacccctctccctttagctgcactagcactgcactgcggaggataagcatgtaattagcagaccaacaacatttgcacttgtccatgctgatggcactacaaaattcctgggtaaggccttaaagttcatcaaagattatggtaaatcctttttccatattttaataattcaatacacgtttgttgagataatggatgtagttttctccagagatgtgtggagatgtgtctagcatatgattaaggtataacagtataacacagtttcagtgtctgcactctgtccatccacttggctttgtttggttgatatctttttgttcttgcataatggattagttcatggatgggatctcgattttgctctatggaaatgtgtggtggtacacacttcaaaacatagttacaacattgaagagaatcgtgactacaatgagtggaactgcactatcactatagatctatagcagtagagttatgaaggaactttatcattcactgactcacaattgctgcatgttttgtataatgagtttttggttgatggagctcgggttgtgggtaatagatgcatccagtcagatcgtgttcacttggggaaggatacatggattttgtgatgaacacaaacttacaaaggcacatgtcttaactcttaatacaagtttttgcttaatgacttcatgtgagtaccaatgtttatattaaactttggtgaatattcacctttcgcatatcaattcttagtttcaacatattagcgtgtttcagggacatggaatggagaagatctaccccctcctgatactaaagctattagggatatctgtgtactgcatggcgggcatgttgtattgcatcactgagcaggaagttcccttttcaggtctacaaagaaagtggtgcacccataaggtgagggcatctatcacaaaagtttgtcatgaagcgaaagagatctttcaagagacaaaaaagccaagttggtcatggaatgcttgaaattttattgcatgacaatgatgaagaggaggcagcattgcagagagttgcccaagctgaacgtgcggcaaaataggctgtacaaagagctattcgactgcgcaacaaggtccaattctcatgacaaacacagaactcgcaacatacaaatctatcatagttctcaggattgtcgaggctgctagtatatcagactcgtcccaagatattatttgtattatcctcgactaaagaataatatgggttgttcattatttttgtgaagagcatgggaaacactctttgtagccatgatattggcttttgatgagttgttcattgtttttaagaatatactgccatgtaagtcattttgtttacatcttaatatgacggtttccataatgtccaatatatgtcttttaaataagatgattttcttgttgcaa

SEQ ID NO: 13858 - DNA, 1465 bp, Zea Mays
tcccgttcctgttcccttcccacctctcccggcttcagacctcgggctccccgctcctgcgccgccgccaccgtcgcggccctcatccctcaaattaaacctctaggcctccactcgttgaagccacgtcactcgtattagcacacctgtccctcgctgtaacggaggcccgtccctcgctgcaacgaatacccctctccctttagctgcactagcactgcactggttcgtatcgtctcccactctccctctccctcccattcacacggtctcagtgaagaactcctccgcgacttggtggccatcgatggcgacgcactgccctaccacgacatgggttgtttggagatggtcatgtacgagcggtggttcatgttctagaagcggcggcaacatcctacacctgagagcggccgagtcatcccgaacccgcacggcacacgcggacgcgctcacgcgcctgggctggggatttatgcttctgacggaaatatttggtggttcagtttgaatcaagagtttttgtgtatttctttcttactatgatttggtagggagggactgaatattatcatggaattggaatacaaataaacaaattcaatctattgcagcggaggataagcatgtaattagcagaccaacaacatttgcacttgtccatgctgatggcactacaaaattcctggatgcatccagtcagatcgtgttcacttggggaaggatacatggattttgtgatgaacacaaacttacaaaggcacatgtcttaactcttaatacaagtttttgcttaatgacttcatggacatggaatggagaagatctaccccctcctgatactaaagctattagggatatctgtgtactgcatggcgggcatgttgtattgcatcactgagcaggaagttcccttttcaggtctacaaagaaagtggtgcacccataaggtgagggcatctatcacaaaagtttgtcatgaagcgaaagagatctttcaagagacaaaaaagccaagttggtcatggaatgcttgaaattttattgcatgacaatgatgaagaggaggcagcattgcagagagttgcccaagctgaacgtgcggcaaaataggctgtacaaagagctattcgactgcgcaacaaggtccaattctcatgacaaacacagaactcgcaacatacaaatctatcatagttctcaggattgtcgaggctgctagtatatcagactcgtcccaagatattatttgtattatcctcgactaaagaataatatgggttgttcattatttttgtgaagagcatgggaaacactctttgtagccatgatattggcttttgatgagttgttcattgtttttaagaatatactgccatgtaagtcattttgtttacatcttaatatgacggtttccataatgtccaatatatgtcttttaaataagatgattttcttgttgcaa

SEQ ID NO: 13859 - DNA, 555 bp, Zea Mays
atgacctttgttcatatgatctactgggtgcacccataaggtgagggcatctatcacaaaagtttgtcatgaagcgaaagagatctttcaagagacaaaaaagccaagttggtcatggaatgcttgaaattttattgcatgacaatgatgaagaggaggcagcattgcagagagttgcccaagctgaacgtgcggcaaaataggctgtacaaagagctattcgactgcgcaacaaggtccaattctcatgacaaacacagaactcgcaacatacaaatctatcatagttctcaggattgtcgaggctgctagtatatcagactcgtcccaagatattatttgtattatcctcgactaaagaataatatgggttgttcattatttttgtgaagagcatgggaaacactctttgtagccatgatattggcttttgatgagttgttcattgtttttaagaatatactgccatgtaagtcattttgtttacatcttaatatgacggtttccataatgtccaatatatgtcttttaaataagatgattttcttgttgcaa

SEQ ID NO: 13860 - DNA, 391 bp, Zea Mays
ggactacatatatatattggccatatcttgtagctttcaataataacacattgttagtattagaccctagctagttcatcacccatggcgaagttcttcaactacaccatcgtccaaggactcttgatgctttctatggtacttctggcatcatgcgtcattcatgcacacataataagtggggaaactgaagaggttagcaacattgggagcccgacagtgatggtcacgatgggggcaaaccgaaagataattggagataataaaaatttattgtgctatctaaaggctctagaatattgctgtgaaaggaccaaacagtgctatgatgacataaagaagtgcttggagcactgccatggttgaaagacgagcaagtcactaaggatcc

SEQ ID NO: 13861 - DNA, 3494 bp, Zea Mays
cagatctccccgtgaccaccggcggcagccccagcacctcccccacctcccgcacccacaacgtcggtggtccgcgcccctcccttccttccctgccgcgcccgacgccagtggtccgcgcccctccctagccacgccgagatctccgtcgattcgagatgcccgcgtgcagccccctacctgagatcgacgtcgatttggcatgtcgggaggtccgctccccacccaacccccgagatcgctgtcattgtcccccctccctactccaaccccacgctcccaccatcacttgctcgcgtcgcgctccgccgaggccatatacaaaaagctgccgacgacgcagacaaggaaagcgtgggggtccagggcgccgagcagcgccgggaggaacgagcggggggagctcctgccgctgacgcgcagcgagtccaccagcgcggaggggtccatgttcgcgcatgccgtggcgatggctttcaccagagccgacgacgtctcccccctgcctgcggcgtgcggatgttgctgccttttcctccgcctcgtcctcacggccttctctgtctacgctcccgttgacggcctcctcctccactaccatctcgatgtcatcattgcgttggtggggagacgccacggctgtcccgtgtcatctccttctcgtcgtttaatcagatgtgctatttgcgcgtgctaacagcacatttcagtttcttactctcacaacatcgagtaagacacttaggtatattagaatagtacacttttcgttttaattttttagaacaattactgatgaaacaaacaacactttctatctttactactcctttaagaacatactgtaggcgtccacatctggtgcggttctgcctcccgaggccgcgacgcccccatccctcacaccgcgcatcgtcgtctacttcccgcccatcccactgccgcgtccgccccctcccccaccgaaggaatccccgcggactccgccctggctcccgagaacgcgatccactctcctctctccctcaatccccgcttcctttcatggattgggatctcaagacgccggtctcctgggacctgcccgacctagagcaggcggcacacctccaccgtacctcctcctctccccatcaccgcgcccctccctcgccgcacacctccaccgcgcccctcccccagaccgaactcaaatatcaagaacattccaagctttggcattccagacaagtgctctttcgaggaattgaggtcagtgtacatttctgaattctgagatcgatacttgaggagtttggatctaagcactaaaataagatcagattcactcgagctgtcccagatgcatgccagaacatacgagcatacaactactctctgacttgtctcacatgcatgaccaacaattctcatacacacatgcattcagaatacagtttatcatgaacggctgttgagagtatcttttttttctttctccgtgagaatagcggatgagtaatgcggaggaaataacacctatgagcaaatgcgtttgacacattcttgagcaggctaaggcatgcatactgctaagtcaatatagtttttcaacatgtagaagatctagaaaatacgattagttctatcacagattgtaaaaaggaaccagcatttgccactgctaggtcgtaaaacatattatttggttcctcgcattactaaccagacatagcaattcagctcggtttagagtattccataagacataatctgacaactgcagtgccgggttgcactggttgtgaaaacagggcaattatctaacctgacataagatgaaaaagttgtgattgcagaactgccaaaaaattacatcgagtaattatgtactcctacataagtaggaaagtgagtatttctggttcaagaaaggaaatttaggcactatgtacatttccttttgattctaaaacagtaaaaacattcagatctataaaatctaatgaaaactagacagtatatagctttgcaaaaattgcaccaatatcttgcacatcccctagaagatggcaatgagcctaaaatggaagaaggggggtaattaaaagcctttcaaattacaataagctatcatctatggtaatgagtcccaggactgctgcagttgggggtcttgatcttgagtacaccaatatcctgtatgctttttttatatattatagctcaatcactccacaaggagtgatcttgacaatgaaaataagagaagtgcaactgacaggtgattagtttatatggtaccagtgcaataattgaaataatggctttgtacgttgaagcccatttagcatccaaacccggagtaagcgagtaagcaattgtaacccccacagaagcgaacactgtaaatatgtaacagcaaggcagtagtagaactaacagtctactaatctagatcaggtgaggcacgacaaccaaaaaagcagcacaactctcatatcacgcacaacctctcgaaagaacatattgaagaaattcatacgcatagcatatctgtgtacacaaatcactggattcttgtatgggctgagtccacaggacaatcctcaagtcaaaaagattaggtgtatatccatccctcgacagcatggaacacaccagatggtgactttgccagaacatcttcctgagcatgagtttttaatgatcttcaacccttgggatggatgcatacatagccaaatgaagatccacagctatcgccgatctaacatcacatgccaagattctggagaacaacaaacaatgggatggtgagaagtgcatcattctggaatgtagtttcaccccaggatcttgttcattgactgcttacaagctggcaccaagcggttttgagtggccaagtggggacgcaacaacaaggacaatggaagcaacccacatggataccttccaattcattacaagaatgtccagatgcttctgagcgataacttccttagtttctacatgattctagataacaccccttggaatttcaacttcatgtgagtgaagcacgacccacagatgaagtacaacatgaagctgggcatgccgcaggacatttatcacgaggaccataggccgacacacttccttgagttcagcaacattgagggagaggtcgctgaagctgatagggaggacacattcacgtaggtgcctgttcaaaattgtatctcaaacgcacttagctctattttgaatggcaatgtgtgaaagttgtaacctgccccgatgggtgtcatttgttgtttggcttaatcctgtattatacttgctgtaagacagccttagagagggggaaattgtacaagtgcacgggatgacaagagtaaagattttgcatagtagcaatgtctactatataaatctctttgccttgtgcataggatgcaaagattctttggagaaactttgtgatcgatctgttaaattatgaagacaattcgtaccgatatgttatc

SEQ ID NO: 13862 - DNA, 4600 bp, Zea Mays
cccgtgaccaccggcggcagccccagcacctcccccacctcccgcacccacaacgtcggtggtccgcgcccctcccttccttccctgccgcgcccgacgccagtggtccgcgcccctccctagccacgccgagatctccgtcgattcgagatgcccgcgtgcagccccctacctgagatcgacgtcgatttggcatgtcgggaggtccgctccccacccaacccccgagatcgctgtcattgtcccccctccctactccaaccccacgctcccaccatcacttgctcgcgtcgcgctccgccgaggccatatacaaaaagctgccgacgacgcagacaaggaaagcgtgggggtccagggcgccgagcagcgccgggaggaacgagcggggggagctcctgccgctgacgcgcagcgagtccaccagcgcggaggggtccatgttcgcgcatgccgtggcgatggctttcaccagagccgacgacgtctcccccctgcctgcggcgtgcggatgttgctgccttttcctccgcctcgtcctcacggccttctctgtctacgctcccgttgacggcctcctcctccactaccatctcgatgtcatcattgcgttggtggggagacgccacggctgtcccgtgtcatctccttctcgtcgtttaatcagatgtgctatttgcgcgtgctaacagcacatttcagtttcttactctcacaacatcgagtaagacacttaggtatattagaatagtacacttttcgttttaattttttagaacaattactgatgaaacaaacaacactttctatctttactactcctttaagaacatactgtaggcgtccacatctggtgcggttctgcctcccgaggccgcgacgcccccatccctcacaccgcgcatcgtcgtctacttcccgcccatcccactgccgcgtccgccccctcccccaccgaaggaatccccgcggactccgccctggctcccgagaacgcgatccactctcctctctccctcaatccccgcttcctttcatggattgggatctcaagacgccggtctcctgggacctgcccgacctagagcaggcggcacacctccaccgtacctcctcctctccccatcaccgcgcccctccctcgccgcacacctccaccgcgcccctcccccagaccgaactcaaatatcaagaacattccaagctttggcattccagacaagtgctctttcgaggaattgaggacaatcctcaagtcaaaaagattaggtgtatatccatccctcgacagcatggaacacaccagatggtgactttgccagaacatcttcctgagcatgagtttttaatgatcttcaacccttgggatggatgcatacatagccaaatgaagatccacagctatcgccgatctaacatcacatgccaagattctggagaacaacaaacaatgggatggtgagaagtgcatcattctggaatgtagtttcaccccaggatcttgttcattgactgcttacaagctggcaccaagcggttttgagtggccaagtggggacgcaacaacaaggacaatggaagcaacccacatggataccttccaattcattacaagaatgtccagatgcttctgagcgataacttccttagtttctacatgattctagataacaccccttggaatttcaacttcatgtgagtgaagcacgacccacagatgaagtacaacatgaagctgggcatgccgcaggacatttatcacgaggaccataggccgacacacttccttgagttcagcaacattgagggagaggtcgctgaagctgatagggaggacacattcacgaatcatcgcgtcgtgctcaagccaccccgccgtcatcgcctcacgcaccttccttcggcaaccttctataggcgcaatcacaggaatccccgcggcctcgccccagatccctaaaccccgcctcgtctctcatggaaagtgcgtcctctgcgctcggctctctccgcgtctgcgacagcccgctatccatggaacgtgggtcctctgccctggatcgtcacgtcggccctcgattcgcgtccgcgacagcctaatcccgcacgtggattgggtacccctctgccccgaatcgtcgctcccgcccggcatcagcgtccgcgtccgcgttgtggtgtccgcagtctccatggaaggcgatcccgcgtgtggattagcattagcagatgaagaggcggaatgttcttcttgggatagcgacgatgagtaccagaaattcatccaaaatatgaaccctccaagggtcaccatcgacaacacctcatgtccaagtgctatagttattcattgcaggtcctcactaacctcaagctcatagtcacgaaggcatacatatcctcagacggaggatggttcatggatggaaagtgtccaccgacgaaggagaagccaaagcacaggagcatggtgctatgttcatggagaccagtgcaaaagctgggttcaacgtcaagcccctattccgcaagatcgctggatcccttctaggactagacgcactttcgtcaggaaagcaggaagacatggtcgacataaacctcagacctgccagcggttcgtcggcttcaggtgcagccgcgcagctggagcagaaatcaggcggttgctcctgttgagacttcgacagttttgtgttcagagaagctacaacagtactgcaacatcgaatttgtttagcaagttatcatatgctaggatataactgtttgatacacaagggacaaaatctgtggaggtaagggcatctcacattttttttgatgaaacattagcaggagctctgccatatcatataagaagagcaagctagagtgtcacagtctttattacatgaatgatcaaatacttagagtccatagggaaaaagtgaaaactgttgactatatggctaagagacaatcatgatccatgaaaaattctaatggactcatatacacagagggggctagcgtgcttgagagaataatattagccgccaccgcatctctctatagaggtgtacgtgctcaagtcgccaccgttgtttctgtcgtggacatggaaattatatggcggattgctggacatgtagtattggcttatctggtggacgatagactgcctagaccacatgaattaccaaatacttttgagtctttgacatgcaaaaaagggtgaaaactccattagaaaactttagaagctgaaacaaatattcccttcagtattgagttatattagggtatttcatatccccttcaatattcagttttattagagtacttcattctaataaatcacatccaatttcattctgccaatcatattttctttttatgcaattttattctattgatcctattttctttgttttgtttttggcaatgaggtgtttcagcatcgacattcaatttcacagcaggaacttctccattccattccaatccaacatcgacaggcattccatttcacacagctaatcggtggagggaaaaatattcatcaggaaaccagctaatcgtggaaggaaaaaatattcatcaaagtggatgtcactggatgttttagtggatgtcaactttgtcatctactcgtgtttgataccaggatgcagtgcaaccatttccacatatgtattggctagcattgaactgaggctttgtacagtagtaataagaaatgagaaatgtcgaattcttttagggccctgatttggcatcaattgaaaagacattgactgtatctatctacagggttccacatgcacattcagcgagtcaatcctgggatcgtgtggcttccatactgggctgttcacctcaccacatttgatggatgttagagagcgatttcagctagatggagaaaattttgaagtactcctggtggtgctagaacaagttgaagcctatttcaggttcctcgcgctgctcgcattcaagatattttctgctgagcaggtagatgttgctattctcgaggttggcctaggagggaagttcgatgcaactaatgtggttgttagttctcgtgaatgtcctgttgtctcgaaatacaaagcttctgttcgcacctaatcgcctaaaatggaaatgtttgactcattgtttaattcggggggaagctgaaggtggtctgatccgttctaggaagagaaaggctgaccaagtcatcatctccagggacgatgttagcgaaagtcaatttaatcaggtgttgatcattgggttgcaacaaatcatcggtggagactgagtcaccgcggccagaaaaccacggtctcaatttgaggagtttttccatctatgtttgttagaaggcataatgcctatttatctcttgtattcgaacatttggcaattaagaaatagaagattacttccccaatatcccttattcctaatctcacctttcacggcttgtggtgaacaatcacttgctattaccgactgacatgtccactcctcatatgtgcgatattggggttgatatatatgttgttcgtttccatgtaattattgtatactaacatttatcgaataatttttacaccgtcgc

SEQ ID NO: 13863 - DNA, 2098 bp, Zea Mays
ccgcgcccctcccttccttccctgccgcgcccgacgccagtggtccgcgcccctccctagccacgccgagatctccgtcgattcgagatgcccgcgtgcagccccctacctgagatcgacgtcgatttggcatgtcgggaggtccgctccccacccaacccccgagatcgctgtcattgtcccccctccctactccaaccccacgctcccaccatcacttgctcgcgtcgcgctccgccgaggccatatacaaaaagctgccgacgacgcagacaaggaaagcgtgggggtccagggcgccgagcagcgccgggaggaacgagcggggggagctcctgccgctgacgcgcagcgagtccaccagcgcggaggggtccatgttcgcgcatgccgtggcgatggctttcaccagagccgacgacgtctcccccctgcctgcggcgtgcggatgttgctgccttttcctccgcctcgtcctcacggccttctctgtctacgctcccgttgacggcctcctcctccactaccatctcgatgtcatcattgcgttggtggggagacgccacggctgtcccgtgtcatctccttctcgtcgtttaatcagatgtgctatttgcgcgtgctaacagcacatttcagtttcttactctcacaacatcgagtaagacacttaggtatattagaatagtacacttttcgttttaattttttagaacaattactgatgaaacaaacaacactttctatctttactactcctttaagaacatactgtaggcgtccacatctggtgcggttctgcctcccgaggccgcgacgcccccatccctcacaccgcgcatcgtcgtctacttcccgcccatcccactgccgcgtccgccccctcccccaccgaaggaatccccgcggactccgccctggctcccgagaacgcgatccactctcctctctccctcaatccccgcttcctttcatggattgggatctcaagacgccggtctcctgggacctgcccgacctagagcaggcggcacacctccaccgtacctcctcctctccccatcaccgcgcccctccctcgccgcacacctccaccgcgcccctcccccagaccgaactcaaatatcaagaacattccaagctttggcattccagacaagtgctctttcgaggaattgaggacaatcctcaagtcaaaaagattaggtgtatatccatccctcgacagcatggaacacaccagatggtgactttgccagaacatcttcctgagcatgagtttttaatgatcttcaacccttgggatggatgcatacatagccaaatgaagatccacagctatcgccgtaggatctaacatcacatgccaagattctggagaacaacaaacaatgggatggtgagaagtgcatcattctggaatgtagtttcaccccaggatcttgttcattgactgcttacaagctggcaccaagcggttttgagtggccaagtggggacgcaacaacaaggacaatggaagcaacccacatggataccttccaattcattacaagaatgtccagatgcttctgagcgataacttccttagtttctacatgattctagataacaccccttggaatttcaacttcatgtgagtgaagcacgacccacagatgaagtacaacatgaagctgggcatgccgcaggacatttatcacgaggaccataggccgacacacttccttgagttcagcaacattgagggagaggtcgctgaagctgatagggaggacacattcacgtaggtgcctgttcaaaattgtatctcaaacgcacttagctctattttgaatggcaatgtgtgaaagttgtaacctgccccgatgggtgtcatttgttgtttggcttaatcctgtattatacttgctgtaagacagccttagagagggggaaattgtacaagtgcacgggatgacaagagtaaagattttgcatagtagcaatgtctactatataaatctctttgccttgtgcataggatgcaaagattctttggagaaactttgtgatcgatctgttaaattatgaagacaattcgtaccgatatgttatc

SEQ ID NO: 13864 - DNA, 4200 bp, Zea Mays
ccgcgcccctcccttccttccctgccgcgcccgacgccagtggtccgcgcccctccctagccacgccgagatctccgtcgattcgagatgcccgcgtgcagccccctacctgagatcgacgtcgatttggcatgtcgggaggtccgctccccacccaacccccgagatcgctgtcattgtcccccctccctactccaaccccacgctcccaccatcacttgctcgcgtcgcgctccgccgaggccatatacaaaaagctgccgacgacgcagacaaggaaagcgtgggggtccagggcgccgagcagcgccgggaggaacgagcggggggagctcctgccgctgacgcgcagcgagtccaccagcgcggaggggtccatgttcgcgcatgccgtggcgatggctttcaccagagccgacgacgtctcccccctgcctgcggcgtgcggatgttgctgccttttcctccgcctcgtcctcacggccttctctgtctacgctcccgttgacggcctcctcctccactaccatctcgatgtcatcattgcgttggtggggagacgccacggctgtcccgtgtcatctccttctcgtcgtttaatcagatgtgctatttgcgcgtgctaacagcacatttcagtttcttactctcacaacatcgagtaagacacttaggtatattagaatagtacacttttcgttttaattttttagaacaattactgatgaaacaaacaacactttctatctttactactcctttaagaacatactgtaggcgtccacatctggtgcggttctgcctcccgaggccgcgacgcccccatccctcacaccgcgcatcgtcgtctacttcccgcccatcccactgccgcgtccgccccctcccccaccgaaggaatccccgcggactccgccctggctcccgagaacgcgatccactctcctctctccctcaatccccgcttcctttcatggattgggatctcaagacgccggtctcctgggacctgcccgacctagagcaggcggcacacctccaccgtacctcctcctctccccatcaccgcgcccctccctcgccgcacacctccaccgcgcccctcccccagaccgaactcaaatatcaagaacattccaagctttggcattccagacaagtgctctttcgaggaattgaggacaatcctcaagtcaaaaagattaggtgtatatccatccctcgacagcatggaacacaccagatggtgactttgccagaacatcttcctgagcatgagtttttaatgatcttcaacccttgggatggatgcatacatagccaaatgaagatccacagctatcgccgatctaacatcacatgccaagattctggagaacaacaaacaatgggatggtgagaagtgcatcattctggaatgtagtttcaccccaggatcttgttcattgactgcttacaagctggcaccaagcggttttgagtggccaagtggggacgcaacaacaaggacaatggaagcaacccacatggataccttccaattcattacaagaatgtccagatgcttctgagcgataacttccttagtttctacatgattctagataacaccccttggaatttcaacttcatgtgagtgaagcacgacccacagatgaagtacaacatgaagctgggcatgccgcaggacatttatcacgaggaccataggccgacacacttccttgagttcagcaacattgagggagaggtcgctgaagctgatagggaggacacattcaccattagcagatgaagaggcggaatgttcttcttgggatagcgacgatgagtaccagaaattcatccaaaatatgaaccctccaagggtcaccatcgacaacacctcatgtccaagtgctatagttattcattttttgtttgaacatcaccaacaagtatggcatactgttggaggtagtgcaggtcctcactaacctcaagctcatagtcacgaaggcatacatatcctcagacggaggatggttcatggatggtaggagagccattggtttctttccttttcgtcaaaatggaaagtgtccaccgacgaaggagaagccaaagcacaggagcatggtgctatgttcatggagaccagtgcaaaagctgggttcaacgtcaagcccctattccgcaagatcgctggatcccttctaggactagacgcactttcgtcaggaaagcaggaagacatggtcgacataaacctcagacctgccagcggttcgtcggcttcaggtgcagccgcgcagctggagcagaaatcaggcggttgctcctgttgagacttcgacagttttgtgttcagagaagctacaacagtactgcaacatcgaatttgtttagcaagttatcatatgctaggatataactgtttgatacacaagggacaaaatctgtggaggtaagggcatctcacattttttttgatgaaacattagcaggagctctgccatatcatataagaagagcaagctagagtgtcacagtctttattacatgaatgatcaaatacttagagtccatagggaaaaagtgaaaactgttgactatatggctaagagacaatcatgatccatgaaaaattctaatggactcatatacacagagggggctagcgtgcttgagagaataatattagccgccaccgcatctctctatagaggtgtacgtgctcaagtcgccaccgttgtttctgtcgtggacatggaaattatatggcggattgctggacatgtagtattggcttatctggtggacgatagactgcctagaccacatgaattaccaaatacttttgagtctttgacatgcaaaaaagggtgaaaactccattagaaaactttagaagctgaaacaaatattcccttcagtattgagttatattagggtatttcatatccccttcaatattcagttttattagagtacttcattctaataaatcacatccaatttcattctgccaatcatattttctttttatgcaattttattctattgatcctattttctttgttttgtttttggcaatgaggtgtttcagcatcgacattcaatttcacagcaggaacttctccattccattccaatccaacatcgacaggcattccatttcacacagctaatcggtggagggaaaaatattcatcaggaaaccagctaatcgtggaaggaaaaaatattcatcaaagtggatgtcactggatgttttagtggatgtcaactttgtcatctactcgtgtttgataccaggatgcagtgcaaccatttccacatatggttccacatgcacattcagcgagtcaatcctgggatcgtgtggcttccatactgggctgttcacctcaccacatttgatggatgttagagagcgatttcagctagatgggtgctatgaaatttatgatcgcactgacctagctcctcctttctgagggcatcggggttaatatttctgaagagaaaattttgaagtactcctggtggtgctagaacaagttgaagcctatttcaggttcctcgcgctgctcgcattcaagatattttctgctgagcaggtagatgttgctattctcgaggttggcctaggagggaagttcgatgcaactaatgtggttgttagttctcgtgaatgtcctgttgtctcgaaatacaaagcttctgttcgcacctaatcgcctaaaatggaaatgtttgactcattgtttaattcggggggaagctgaaggtggtctgatccgttctaggaagagaaaggctgaccaagtcatcatctccagggacgatgttagcgaaagtcaatttaatcaggtgttgatcattgggttgcaacaaatcatcggtggagactgagtcaccgcggccagaaaaccacggtctcaatttgaggagtttttccatctatgtttgttagaaggcataatgcctatttatctcttgtattcgaacatttggcaattaagaaatagaagattacttccccaatatcccttattcctaatctcacctttcacggcttgtggtgaacaatcacttgctattaccgactgacatgtccactcctcatatgtgcgatattggggttgatatatatgttgttcgtttccatgtaattattgtatactaacatttatcgaataatttttacaccgtcgc

SEQ ID NO: 13865 - DNA, 2250 bp, Zea Mays
caggaatcatcgcgtcgtgctcaagccaccccgccgtcatcgcctcacgcaccttccttcggcaaccttctataggcgcaatcacaggaatccccgcggcctcgccccagatccctaaaccccgcctcgtctctcatggaaagtgcgtcctctgcgctcggctctctccgcgtctgcgacagcccgctatccatggaacgtgggtcctctgccctggatcgtcacgtcggccctcgattcgcgtccgcgacagcctaatcccgcacgtggattgggtacccctctgccccgaatcgtcgctcccgcccggcatcagcgtccgcgtccgcgttgtggtgtccgcagtctccatggaaggcgatcccgcgtgtggattagcattagcagatgaagaggcggaatgttcttcttgggatagcgacgatgagtaccagaaattcatccaaaatatgaaccctccaagggtcaccatcgacaacacctcatgtccaagtgctatagttattcatgtcctcactaacctcaagctcatagtcacgaaggcatacatatcctcagacggaggatggttcatggatgtgtccaccgacgaaggagaagccaaagcacaggagcatggtgctatgttcatggagaccagtgcaaaagctgggttcaacgtcaagcccctattccgcaagatcgctggatcccttctaggactagacgcactttcgtcaggaaagcaggaagacatggtcgacataaacctcagacctgccagcggttcgtcggcttcaggtgcagccgcgcagctggagcagaaatcaggcggttgctcctgttgagacttcgacagttttgtgttcagagaagctacaacagtactgcaacatcgacatcgacattcaatttcacagcaggaacttctccattccattccaatccaacatcgacaggcattccatttcacacagctaatcggtggagggaaaaatattcatcaggaaaccagctaatcgtggaaggaaaaaatattcatcaaagtggatgtcactggatgttttagtggatgtcaactttgtcatctactcgtgtttgataccaggatgcagtgcaaccatttccacatatgtattggctagcattgaactgaggctttgtacagtagtaataagaaatgagaaatgtcgaattcttttagggccctgatttggcatcaattgaaaagacattgactgtatctatctacagggttccacatgcacattcagcgagtcaatcctgggatcgtgtggcttccatactgggctgttcacctcaccacatttgatggatgttagagagcgatttcagctagatgggtgctatgaaatttatgatcgcactgacctagctcctcctttctgagggcatcggggttaatatttctgaagagaaaattttgaagtactcctggtggtgctagaacaagttgaagcctatttcaggttcctcgcgctgctcgcattcaagatattttctgctgagcaggtagatgttgctattctcgaggttggcctaggagggaagttcgatgcaactaatgtggttaaagcacctgtagtttgtggcatatcttcccttggatatgatcatatggaaattcttggtgaccaaatcctgttcttggtgataaacttggtgtcgataaacgggttaattctgttggcaaaattaggatgacacaggttgttagttctcgtgaatgtcctgttgtctcgaaatacaaagcttctgttcgcacctaatcgcctaaaatggaaatgtttgactcattgtttaattcggggggaagctgaaggtggtctgatccgttctaggaagagaaaggctgaccaagtcatcatctccagggacgatgttagcgaaagtcaatttaatcaggtgttgatcattgggttgcaacaaatcatcggtggagactgagtcaccgcggccagaaaaccacggtctcaatttgaggagtttttccatctatgtttgttagaaggcataatgcctatttatctcttgtattcgaacatttggcaattaagaaatagaagattacttccccaatatcccttattcctaatctcacctttcacggcttgtggtgaacaatcacttgctattaccgactgacatgtccactcctcatatgtgcgatattggggttgatatatatgttgttcgtttccatgtaattattgtatactaacatttatcgaataatttttacaccgtcgc

SEQ ID NO: 13866 - DNA, 1993 bp, Zea Mays
caggaatcatcgcgtcgtgctcaagccaccccgccgtcatcgcctcacgcaccttccttcggcaaccttctataggcgcaatcacaggaatccccgcggcctcgccccagatccctaaaccccgcctcgtctctcatggaaagtgcgtcctctgcgctcggctctctccgcgtctgcgacagcccgctatccatggaacgtgggtcctctgccctggatcgtcacgtcggccctcgattcgcgtccgcgacagcctaatcccgcacgtggattgggtacccctctgccccgaatcgtcgctcccgcccggcatcagcgtccgcgtccgcgttgtggtgtccgcagtctccatggaaggcgatcccgcgtgtggattagcattagcagatgaagaggcggaatgttcttcttgggatagcgacgatgagtaccagaaattcatccaaaatatgaaccctccaagggtcaccatcgacaacacctcatgtccaagtgctatagttattcatgaaagtgtccaccgacgaaggagaagccaaagcacaggagcatggtgctatgttcatggagaccagtgcaaaagctgggttcaacgtcaagcccctattccgcaagatcgctggatcccttctaggactagacgcactttcgtcaggaaagcaggaagacatggtcgacataaacctcagacctgccagcggttcgtcggcttcaggtgcagccgcgcagctggagcagaaatcaggcggttgctcctgttgagacttcgacagttttgtgttcagagaagctacaacagtactgcaacatcgaatttgtttagcaagttatcatatgctaggatataactgtttgatacacaagggacaaaatctgtggagcatcgacattcaatttcacagcaggaacttctccattccattccaatccaacatcgacaggcattccatttcacacagctaatcggtggagggaaaaatattcatcaggaaaccagctaatcgtggaaggaaaaaatattcatcaaagtggatgtcactggatgttttagtggatgtcaactttgtcatctactcgtgtttgataccaggatgcagtgcaaccatttccacatatggttccacatgcacattcagcgagtcaatcctgggatcgtgtggcttccatactgggctgttcacctcaccacatttgatggatgttagagagcgatttcagctagatgggtgctatgaaatttatgatcgcactgacctagctcctcctttctgagggcatcggggttaatatttctgaagagaaaattttgaagtactcctggtggtgctagaacaagttgaagcctatttcaggttcctcgcgctgctcgcattcaagatattttctgctgagcaggtagatgttgctattctcgaggttggcctaggagggaagttcgatgcaactaatgtggttgttagttctcgtgaatgtcctgttgtctcgaaatacaaagcttctgttcgcacctaatcgcctaaaatggaaatgtttgactcattgtttaattcggggggaagctgaaggtggtctgatccgttctaggaagagaaaggctgaccaagtcatcatctccagggacgatgttagcgaaagtcaatttaatcaggtgttgatcattgggttgcaacaaatcatcggtggagactgagtcaccgcggccagaaaaccacggtctcaatttgaggagtttttccatctatgtttgttagaaggcataatgcctatttatctcttgtattcgaacatttggcaattaagaaatagaagattacttccccaatatcccttattcctaatctcacctttcacggcttgtggtgaacaatcacttgctattaccgactgacatgtccactcctcatatgtgcgatattggggttgatatatatgttgttcgtttccatgtaattattgtatactaacatttatcgaataatttttacaccgtcgc

SEQ ID NO: 13867 - DNA, 2065 bp, Zea Mays
caggaatcatcgcgtcgtgctcaagccaccccgccgtcatcgcctcacgcaccttccttcggcaaccttctataggcgcaatcacaggaatccccgcggcctcgccccagatccctaaaccccgcctcgtctctcatggaaagtgcgtcctctgcgctcggctctctccgcgtctgcgacagcccgctatccatggaacgtgggtcctctgccctggatcgtcacgtcggccctcgattcgcgtccgcgacagcctaatcccgcacgtggattgggtacccctctgccccgaatcgtcgctcccgcccggcatcagcgtccgcgtccgcgttgtggtgtccgcagtctccatggaaggcgatcccgcgtgtggattagcattagcagatgaagaggcggaatgttcttcttgggatagcgacgatgagtaccagaaattcatccaaaatatgaaccctccaagggtcaccatcgacaacacctcatgtccaagtgctatagttattcatgaaagtgtccaccgacgaaggagaagccaaagcacaggagcatggtgctatgttcatggagaccagtgcaaaagctgggttcaacgtcaagcccctattccgcaagatcgctggatcccttctaggactagacgcactttcgtcaggaaagcaggaagacatggtcgacataaacctcagacctgccagcggttcgtcggcttcaggtgcagccgcgcagctggagcagaaatcaggcggttgctcctgttgagacttcgacagttttgtgttcagagaagctacaacagtactgcaacatcgacatcgacattcaatttcacagcaggaacttctccattccattccaatccaacatcgacaggcattccatttcacacagctaatcggtggagggaaaaatattcatcaggaaaccagctaatcgtggaaggaaaaaatattcatcaaagtggatgtcactggatgttttagtggatgtcaactttgtcatctactcgtgtttgataccaggatgcagtgcaaccatttccacatatggttccacatgcacattcagcgagtcaatcctgggatcgtgtggcttccatactgggctgttcacctcaccacatttgatggatgttagagagcgatttcagctagatgggtgctatgaaatttatgatcgcactgacctagctcctcctttctgagggcatcggggttaatatttctgaagagaaaattttgaagtactcctggtggtgctagaacaagttgaagcctatttcaggttcctcgcgctgctcgcattcaagatattttctgctgagcaggtagatgttgctattctcgaggttggcctaggagggaagttcgatgcaactaatgtggttaaagcacctgtagtttgtggcatatcttcccttggatatgatcatatggaaattcttggtgaccaaatcctgttcttggtgataaacttggtgtcgataaacgggttaattctgttggcaaaattaggatgacacaggttgttagttctcgtgaatgtcctgttgtctcgaaatacaaagcttctgttcgcacctaatcgcctaaaatggaaatgtttgactcattgtttaattcggggggaagctgaaggtggtctgatccgttctaggaagagaaaggctgaccaagtcatcatctccagggacgatgttagcgaaagtcaatttaatcaggtgttgatcattgggttgcaacaaatcatcggtggagactgagtcaccgcggccagaaaaccacggtctcaatttgaggagtttttccatctatgtttgttagaaggcataatgcctatttatctcttgtattcgaacatttggcaattaagaaatagaagattacttccccaatatcccttattcctaatctcacctttcacggcttgtggtgaacaatcacttgctattaccgactgacatgtccactcctcatatgtgcgatattggggttgatatatatgttgttcgtttccatgtaattattgtatactaacatttatcgaataatttttacaccgtcgc

SEQ ID NO: 13868 - DNA, 1829 bp, Zea Mays
caggaatcatcgcgtcgtgctcaagccaccccgccgtcatcgcctcacgcaccttccttcggcaaccttctataggcgcaatcacaggaatccccgcggcctcgccccagatccctaaaccccgcctcgtctctcatggaaagtgcgtcctctgcgctcggctctctccgcgtctgcgacagcccgctatccatggaacgtgggtcctctgccctggatcgtcacgtcggccctcgattcgcgtccgcgacagcctaatcccgcacgtggattgggtacccctctgccccgaatcgtcgctcccgcccggcatcagcgtccgcgtccgcgttgtggtgtccgcagtctccatggaaggcgatcccgcgtgtggattagcattagcagatgaagaggcggaatgttcttcttgggatagcgacgatgagtaccagaaattcatccaaaatatgaaccctccaagggtcaccatcgacaacacctcatgtccaagtgctatagttattcatgaaagtgtccaccgacgaaggagaagccaaagcacaggagcatggtgctatgttcatggagaccagtgcaaaagctgggttcaacgtcaagcccctattccgcaagatcgctggatcccttctaggactagacgcactttcgtcaggaaagcaggaagacatggtcgacataaacctcagacctgccagcggttcgtcggcttcaggtgcagccgcgcagctggagcagaaatcaggcggttgctcctgttgagacttcgacagttttgtgttcagagaagctacaacagtactgcaacatcgagaacttctccattccattccaatccaacatcgacaggcattccatttcacacagctaatcggtggagggaaaaatattcatcaggaaaccagctaatcgtggaaggaaaaaatattcatcaaagtggatgtcactggatgttttagtggatgtcaactttgtcatctactcgtgtttgataccaggatgcagtgcaaccatttccacatatggttccacatgcacattcagcgagtcaatcctgggatcgtgtggcttccatactgggctgttcacctcaccacatttgatggatgttagagagcgatttcagctagatggagaaaattttgaagtactcctggtggtgctagaacaagttgaagcctatttcaggttcctcgcgctgctcgcattcaagatattttctgctgagcaggtagatgttgctattctcgaggttggcctaggagggaagttcgatgcaactaatgtggttgttagttctcgtgaatgtcctgttgtctcgaaatacaaagcttctgttcgcacctaatcgcctaaaatggaaatgtttgactcattgtttaattcggggggaagctgaaggtggtctgatccgttctaggaagagaaaggctgaccaagtcatcatctccagggacgatgttagcgaaagtcaatttaatcaggtgttgatcattgggttgcaacaaatcatcggtggagactgagtcaccgcggccagaaaaccacggtctcaatttgaggagtttttccatctatgtttgttagaaggcataatgcctatttatctcttgtattcgaacatttggcaattaagaaatagaagattacttccccaatatcccttattcctaatctcacctttcacggcttgtggtgaacaatcacttgctattaccgactgacatgtccactcctcatatgtgcgatattggggttgatatatatgttgttcgtttccatgtaattattgtatactaacatttatcgaataatttttacaccgtcgc

SEQ ID NO: 13869 - DNA, 1990 bp, Zea Mays
caggaatcatcgcgtcgtgctcaagccaccccgccgtcatcgcctcacgcaccttccttcggcaaccttctataggcgcaatcacaggaatccccgcggcctcgccccagatccctaaaccccgcctcgtctctcatggaaagtgcgtcctctgcgctcggctctctccgcgtctgcgacagcccgctatccatggaacgtgggtcctctgccctggatcgtcacgtcggccctcgattcgcgtccgcgacagcctaatcccgcacgtggattgggtacccctctgccccgaatcgtcgctcccgcccggcatcagcgtccgcgtccgcgttgtggtgtccgcagtctccatggaaggcgatcccgcgtgtggattagcattagcagatgaagaggcggaatgttcttcttgggatagcgacgatgagtaccagaaattcatccaaaatatgaaccctccaagggtcaccatcgacaacacctcatgtccaagtgctatagttattcatgtcctcactaacctcaagctcatagtcacgaaggcatacatatcctcagacggaggatggttcatggatgtgtccaccgacgaaggagaagccaaagcacaggagcatggtgctatgttcatggagaccagtgcaaaagctgggttcaacgtcaagcccctattccgcaagatcgctggatcccttctaggactagacgcactttcgtcaggaaagcaggaagacatggtcgacataaacctcagacctgccagcggttcgtcggcttcaggtgcagccgcgcagctggagcagaaatcaggcggttgctcctgttgagacttcgacagttttgtgttcagagaagctacaacagtactgcaacatcgacatcgacattcaatttcacagcaggaacttctccattccattccaatccaacatcgacaggcattccatttcacacagctaatcggtggagggaaaaatattcatcaggaaaccagctaatcgtggaaggaaaaaatattcatcaaagtggatgtcactggatgttttagtggatgtcaactttgtcatctactcgtgtttgataccaggatgcagtgcaaccatttccacatatggttccacatgcacattcagcgagtcaatcctgggatcgtgtggcttccatactgggctgttcacctcaccacatttgatggatgttagagagcgatttcagctagatgggtgctatgaaatttatgatcgcactgacctagctcctcctttctgagggcatcggggttaatatttctgaagagaaaattttgaagtactcctggtggtgctagaacaagttgaagcctatttcaggttcctcgcgctgctcgcattcaagatattttctgctgagcaggtagatgttgctattctcgaggttggcctaggagggaagttcgatgcaactaatgtggttgttagttctcgtgaatgtcctgttgtctcgaaatacaaagcttctgttcgcacctaatcgcctaaaatggaaatgtttgactcattgtttaattcggggggaagctgaaggtggtctgatccgttctaggaagagaaaggctgaccaagtcatcatctccagggacgatgttagcgaaagtcaatttaatcaggtgttgatcattgggttgcaacaaatcatcggtggagactgagtcaccgcggccagaaaaccacggtctcaatttgaggagtttttccatctatgtttgttagaaggcataatgcctatttatctcttgtattcgaacatttggcaattaagaaatagaagattacttccccaatatcccttattcctaatctcacctttcacggcttgtggtgaacaatcacttgctattaccgactgacatgtccactcctcatatgtgcgatattggggttgatatatatgttgttcgtttccatgtaattattgtatactaacatttatcgaataatttttacaccgtcgc

SEQ ID NO: 13870 - DNA, 2996 bp, Zea Mays
caggaatcatcgcgtcgtgctcaagccaccccgccgtcatcgcctcacgcaccttccttcggcaaccttctataggcgcaatcacaggaatccccgcggcctcgccccagatccctaaaccccgcctcgtctctcatggaaagtgcgtcctctgcgctcggctctctccgcgtctgcgacagcccgctatccatggaacgtgggtcctctgccctggatcgtcacgtcggccctcgattcgcgtccgcgacagcctaatcccgcacgtggattgggtacccctctgccccgaatcgtcgctcccgcccggcatcagcgtccgcgtccgcgttgtggtgtccgcagtctccatggaaggcgatcccgcgtgtggattagcattagcagatgaagaggcggaatgttcttcttgggatagcgacgatgagtaccagaaattcatccaaaatatgaaccctccaagggtcaccatcgacaacacctcatgtccaagtgctatagttattcatgaaagtgtccaccgacgaaggagaagccaaagcacaggagcatggtgctatgttcatggagaccagtgcaaaagctgggttcaacgtcaagcccctattccgcaagatcgctggatcccttctaggactagacgcactttcgtcaggaaagcaggaagacatggtcgacataaacctcagacctgccagcggttcgtcggcttcaggtgcagccgcgcagctggagcagaaatcaggcggttgctcctgttgagacttcgacagttttgtgttcagagaagctacaacagtactgcaacatcgagttaagtactttcagagagattgtgacgaagagtgttttcgcccaaacgtccagtagtgatatactgacatccatagcgagaagccaatttctgtgtacagatttgtttagcaagttatcatatgctaggatataactgtttgatacacaagggacaaaatctgtggaggtaagggcatctcacattttttttgatgaaacattagcaggagctctgccatatcatataagaagagcaagctagagtgtcacagtctttattacatgaatgatcaaatacttagagtccatagggaaaaagtgaaaactgttgactatatggctaagagacaatcatgatccatgaaaaattctaatggactcatatacacagagggggctagcgtgcttgagagaataatattagccgccaccgcatctctctatagaggtgtacgtgctcaagtcgccaccgttgtttctgtcgtggacatggaaattatatggcggattgctggacatgtagtattggcttatctggtggacgatagactgcctagaccacatgaattaccaaatacttttgagtctttgacatgcaaaaaagggtgaaaactccattagaaaactttagaagctgaaacaaatattcccttcagtattgagttatattagggtatttcatatccccttcaatattcagttttattagagtacttcattctaataaatcacatccaatttcattctgccaatcatattttctttttatgcaattttattctattgatcctattttctttgttttgtttttggcaatgaggtgtttcagcatcgacattcaatttcacagcaggaacttctccattccattccaatccaacatcgacaggcattccatttcacacagctaatcggtggagggaaaaatattcatcaggaaaccagctaatcgtggaaggaaaaaatattcatcaaagtggatgtcactggatgttttagtggatgtcaactttgtcatctactcgtgtttgataccaggatgcagtgcaaccatttccacatatgtattggctagcattgaactgaggctttgtacagtagtaataagaaatgagaaatgtcgaattcttttagggccctgatttggcatcaattgaaaagacattgactgtatctatctacagggttccacatgcacattcagcgagtcaatcctgggatcgtgtggcttccatactgggctgttcacctcaccacatttgatggatgttagagagcgatttcagctagatgggtgctatgaaatttatgatcgcactgacctagctcctcctttctgagggcatcggggttaatatttctgaagagaaaattttgaagtactcctggtggtgctagaacaagttgaagcctatttcaggttcctcgcgctgctcgcattcaagatattttctgctgagcaggtagatgttgctattctcgaggttggcctaggagggaagttcgatgcaactaatgtggttaaagcacctgtagtttgtggcatatcttcccttggatatgatcatatggaaattcttggtgaccaaatcctgttcttggtgataaacttggtgtcgataaacgggttaattctgttggcaaaattaggatgacacaggttgttagttctcgtgaatgtcctgttgtctcgaaatacaaagcttctgttcgcacctaatcgcctaaaatggaaatgtttgactcattgtttaattcggggggaagctgaaggtggtctgatccgttctaggaagagaaaggctgaccaagtcatcatctccagggacgatgttagcgaaagtcaatttaatcaggtgttgatcattgggttgcaacaaatcatcggtggagactgagtcaccgcggccagaaaaccacggtctcaatttgaggagtttttccatctatgtttgttagaaggcataatgcctatttatctcttgtattcgaacatttggcaattaagaaatagaagattacttccccaatatcccttattcctaatctcacctttcacggcttgtggtgaacaatcacttgctattaccgactgacatgtccactcctcatatgtgcgatattggggttgatatatatgttgttcgtttccatgtaattattgtatactaacatttatcgaataatttttacaccgtcgc

SEQ ID NO: 13871 - DNA, 2856 bp, Zea Mays
caggaatcatcgcgtcgtgctcaagccaccccgccgtcatcgcctcacgcaccttccttcggcaaccttctataggcgcaatcacaggaatccccgcggcctcgccccagatccctaaaccccgcctcgtctctcatggaaagtgcgtcctctgcgctcggctctctccgcgtctgcgacagcccgctatccatggaacgtgggtcctctgccctggatcgtcacgtcggccctcgattcgcgtccgcgacagcctaatcccgcacgtggattgggtacccctctgccccgaatcgtcgctcccgcccggcatcagcgtccgcgtccgcgttgtggtgtccgcagtctccatggaaggcgatcccgcgtgtggattagcattagcagatgaagaggcggaatgttcttcttgggatagcgacgatgagtaccagaaattcatccaaaatatgaaccctccaagggtcaccatcgacaacacctcatgtccaagtgctatagttattcatgaaagtgtccaccgacgaaggagaagccaaagcacaggagcatggtgctatgttcatggagaccagtgcaaaagctgggttcaacgtcaagcccctattccgcaagatcgctggatcccttctaggactagacgcactttcgtcaggaaagcaggaagacatggtcgacataaacctcagacctgccagcggttcgtcggcttcaggtgcagccgcgcagctggagcagaaatcaggcggttgctcctgttgagacttcgacagttttgtgttcagagaagctacaacagtactgcaacatcgagttaagtactttcagagagattgtgacgaagagtgttttcgcccaaacgtccagtagtgatatactgacatccatagcgagaagccaatttctgtgtacagatttgtttagcaagttatcatatgctaggatataactgtttgatacacaagggacaaaatctgtggaggtaagggcatctcacattttttttgatgaaacattagcaggagctctgccatatcatataagaagagcaagctagagtgtcacagtctttattacatgaatgatcaaatacttagagtccatagggaaaaagtgaaaactgttgactatatggctaagagacaatcatgatccatgaaaaattctaatggactcatatacacagagggggctagcgtgcttgagagaataatattagccgccaccgcatctctctatagaggtgtacgtgctcaagtcgccaccgttgtttctgtcgtggacatggaaattatatggcggattgctggacatgtagtattggcttatctggtggacgatagactgcctagaccacatgaattaccaaatacttttgagtctttgacatgcaaaaaagggtgaaaactccattagaaaactttagaagctgaaacaaatattcccttcagtattgagttatattagggtatttcatatccccttcaatattcagttttattagagtacttcattctaataaatcacatccaatttcattctgccaatcatattttctttttatgcaattttattctattgatcctattttctttgttttgtttttggcaatgaggtgtttcagcatcgacattcaatttcacagcaggaacttctccattccattccaatccaacatcgacaggcattccatttcacacagctaatcggtggagggaaaaatattcatcaggaaaccagctaatcgtggaaggaaaaaatattcatcaaagtggatgtcactggatgttttagtggatgtcaactttgtcatctactcgtgtttgataccaggatgcagtgcaaccatttccacatatgtattggctagcattgaactgaggctttgtacagtagtaataagaaatgagaaatgtcgaattcttttagggccctgatttggcatcaattgaaaagacattgactgtatctatctacagggttccacatgcacattcagcgagtcaatcctgggatcgtgtggcttccatactgggctgttcacctcaccacatttgatggatgttagagagcgatttcagctagatgggtgctatgaaatttatgatcgcactgacctagctcctcctttctgagggcatcggggttaatatttctgaagagaaaattttgaagtactcctggtggtgctagaacaagttgaagcctatttcaggttcctcgcgctgctcgcattcaagatattttctgctgagcaggtagatgttgctattctcgaggttggcctaggagggaagttcgatgcaactaatgtggttgttagttctcgtgaatgtcctgttgtctcgaaatacaaagcttctgttcgcacctaatcgcctaaaatggaaatgtttgactcattgtttaattcggggggaagctgaaggtggtctgatccgttctaggaagagaaaggctgaccaagtcatcatctccagggacgatgttagcgaaagtcaatttaatcaggtgttgatcattgggttgcaacaaatcatcggtggagactgagtcaccgcggccagaaaaccacggtctcaatttgaggagtttttccatctatgtttgttagaaggcataatgcctatttatctcttgtattcgaacatttggcaattaagaaatagaagattacttccccaatatcccttattcctaatctcacctttcacggcttgtggtgaacaatcacttgctattaccgactgacatgtccactcctcatatgtgcgatattggggttgatatatatgttgttcgtttccatgtaattattgtatactaacatttatcgaataatttttacaccgtcgc

SEQ ID NO: 13872 - DNA, 2893 bp, Zea Mays
caggaatcatcgcgtcgtgctcaagccaccccgccgtcatcgcctcacgcaccttccttcggcaaccttctataggcgcaatcacaggaatccccgcggcctcgccccagatccctaaaccccgcctcgtctctcatggaaagtgcgtcctctgcgctcggctctctccgcgtctgcgacagcccgctatccatggaacgtgggtcctctgccctggatcgtcacgtcggccctcgattcgcgtccgcgacagcctaatcccgcacgtggattgggtacccctctgccccgaatcgtcgctcccgcccggcatcagcgtccgcgtccgcgttgtggtgtccgcagtctccatggaaggcgatcccgcgtgtggattagcattagcagatgaagaggcggaatgttcttcttgggatagcgacgatgagtaccagaaattcatccaaaatatgaaccctccaagggtcaccatcgacaacacctcatgtccaagtgctatagttattcatgtcctcactaacctcaagctcatagtcacgaaggcatacatatcctcagacggaggatggttcatggatggtaggagagccattggtttctttccttttcgtcaaaatggaaagtgtccaccgacgaaggagaagccaaagcacaggagcatggtgctatgttcatggagaccagtgcaaaagctgggttcaacgtcaagcccctattccgcaagatcgctggatcccttctaggactagacgcactttcgtcaggaaagcaggaagacatggtcgacataaacctcagacctgccagcggttcgtcggcttcaggtgcagccgcgcagctggagcagaaatcaggcggttgctcctgttgagacttcgacagttttgtgttcagagaagctacaacagtactgcaacatcgagttaagtactttcagagagattgtgacgaagagtgttttcgcccaaacgtccagtagtgatatactgacatccatagcgagaagccaatttctgtgtacagatttgtttagcaagttatcatatgctaggatataactgtttgatacacaagggacaaaatctgtggaggtaagggcatctcacattttttttgatgaaacattagcaggagctctgccatatcatataagaagagcaagctagagtgtcacagtctttattacatgaatgatcaaatacttagagtccatagggaaaaagtgaaaactgttgactatatggctaagagacaatcatgatccatgaaaaattctaatggactcatatacacagagggggctagcgtgcttgagagaataatattagccgccaccgcatctctctatagaggtgtacgtgctcaagtcgccaccgttgtttctgtcgtggacatggaaattatatggcggattgctggacatgtagtattggcttatctggtggacgatagactgcctagaccacatgaattaccaaatacttttgagtctttgacatgcaaaaaagggtgaaaactccattagaaaactttagaagctgaaacaaatattcccttcagtattgagttatattagggtatttcatatccccttcaatattcagttttattagagtacttcattctaataaatcacatccaatttcattctgccaatcatattttctttttatgcaattttattctattgatcctattttctttgttttgtttttggcaatgaggtgtttcagcatcgacattcaatttcacagcaggaacttctccattccattccaatccaacatcgacaggcattccatttcacacagctaatcggtggagggaaaaatattcatcaggaaaccagctaatcgtggaaggaaaaaatattcatcaaagtggatgtcactggatgttttagtggatgtcaactttgtcatctactcgtgtttgataccaggatgcagtgcaaccatttccacatatgtattggctagcattgaactgaggctttgtacagtagtaataagaaatgagaaatgtcgaattcttttagggccctgatttggcatcaattgaaaagacattgactgtatctatctacagggttccacatgcacattcagcgagtcaatcctgggatcgtgtggcttccatactgggctgttcacctcaccacatttgatggatgttagagagcgatttcagctagatggagaaaattttgaagtactcctggtggtgctagaacaagttgaagcctatttcaggttcctcgcgctgctcgcattcaagatattttctgctgagcaggtagatgttgctattctcgaggttggcctaggagggaagttcgatgcaactaatgtggttgttagttctcgtgaatgtcctgttgtctcgaaatacaaagcttctgttcgcacctaatcgcctaaaatggaaatgtttgactcattgtttaattcggggggaagctgaaggtggtctgatccgttctaggaagagaaaggctgaccaagtcatcatctccagggacgatgttagcgaaagtcaatttaatcaggtgttgatcattgggttgcaacaaatcatcggtggagactgagtcaccgcggccagaaaaccacggtctcaatttgaggagtttttccatctatgtttgttagaaggcataatgcctatttatctcttgtattcgaacatttggcaattaagaaatagaagattacttccccaatatcccttattcctaatctcacctttcacggcttgtggtgaacaatcacttgctattaccgactgacatgtccactcctcatatgtgcgatattggggttgatatatatgttgttcgtttccatgtaattattgtatactaacatttatcgaataatttttacaccgtcgc

SEQ ID NO: 13873 - DNA, 2562 bp, Zea Mays
ggagcccaatttacctgctttctccagtagccgcaagcctgcaaccacccattagcagatgaagaggcggaatgttcttcttgggatagcgacgatgagtaccagaaattcatccaaaatatgaaccctccaagggtcaccatcgacaacacctcatgtccaagtgctatagttattcattatggcatactgttggaggtagtgcaggtcctcactaacctcaagctcatagtcacgaaggcatacatatcctcagacggaggatggttcatggatggtaggagagccattggtttctttccttttcgtcaaaatggaaagtgtccaccgacgaaggagaagccaaagcacaggagcatggtgctatgttcatggagaccagtgcaaaagctgggttcaacgtcaagcccctattccgcaagatcgctggatcccttctaggactagacgcactttcgtcaggaaagcaggaagacatggtcgacataaacctcagacctgccagcggttcgtcggcttcaggtgcagccgcgcagctggagcagaaatcaggcggttgctcctgttgagacttcgacagttttgtgttcagagaagctacaacagtactgcaacatcgaatttgtttagcaagttatcatatgctaggatataactgtttgatacacaagggacaaaatctgtggaggtaagggcatctcacattttttttgatgaaacattagcaggagctctgccatatcatataagaagagcaagctagagtgtcacagtctttattacatgaatgatcaaatacttagagtccatagggaaaaagtgaaaactgttgactatatggctaagagacaatcatgatccatgaaaaattctaatggactcatatacacagagggggctagcgtgcttgagagaataatattagccgccaccgcatctctctatagaggtgtacgtgctcaagtcgccaccgttgtttctgtcgtggacatggaaattatatggcggattgctggacatgtagtattggcttatctggtggacgatagactgcctagaccacatgaattaccaaatacttttgagtctttgacatgcaaaaaagggtgaaaactccattagaaaactttagaagctgaaacaaatattcccttcagtattgagttatattagggtatttcatatccccttcaatattcagttttattagagtacttcattctaataaatcacatccaatttcattctgccaatcatattttctttttatgcaattttattctattgatcctattttctttgttttgtttttggcaatgaggtgtttcagcatcgacattcaatttcacagcaggaacttctccattccattccaatccaacatcgacaggcattccatttcacacagctaatcggtggagggaaaaatattcatcaggaaaccagctaatcgtggaaggaaaaaatattcatcaaagtggatgtcactggatgttttagtggatgtcaactttgtcatctactcgtgtttgataccaggatgcagtgcaaccatttccacatatgtattggctagcattgaactgaggctttgtacagtagtaataagaaatgagaaatgtcgaattcttttagggccctgatttggcatcaattgaaaagacattgactgtatctatctacagggttccacatgcacattcagcgagtcaatcctgggatcgtgtggcttccatactgggctgttcacctcaccacatttgatggatgttagagagcgatttcagctagatgggtgctatgaaatttatgatcgcactgacctagctcctcctttctgagggcatcggggttaatatttctgaagagaaaattttgaagtactcctggtggtgctagaacaagttgaagcctatttcaggttcctcgcgctgctcgcattcaagatattttctgctgagcaggtagatgttgctattctcgaggttggcctaggagggaagttcgatgcaactaatgtggttgttagttctcgtgaatgtcctgttgtctcgaaatacaaagcttctgttcgcacctaatcgcctaaaatggaaatgtttgactcattgtttaattcggggggaagctgaaggtggtctgatccgttctaggaagagaaaggctgaccaagtcatcatctccagggacgatgttagcgaaagtcaatttaatcaggtgttgatcattgggttgcaacaaatcatcggtggagactgagtcaccgcggccagaaaaccacggtctcaatttgaggagtttttccatctatgtttgttagaaggcataatgcctatttatctcttgtattcgaacatttggcaattaagaaatagaagattacttccccaatatcccttattcctaatctcacctttcacggcttgtggtgaacaatcacttgctattaccgactgacatgtccactcctcatatgtgcgatattggggttgatatatatgttgttcgtttccatgtaattattgtatactaacatttatcgaataatttttacaccgtcgc

SEQ ID NO: 13874 - DNA, 2344 bp, Zea Mays
ctgatcttctgttgtccattttgtcggaaggaaagtgtccaccgacgaaggagaagccaaagcacaggagcatggtgctatgttcatggagaccagtgcaaaagctgggttcaacgtcaagcccctattccgcaagatcgctggatcccttctaggactagacgcactttcgtcaggaaagcaggaagacatggtcgacataaacctcagacctgccagcggttcgtcggcttcaggtgcagccgcgcagctggagcagaaatcaggcggttgctcctgttgagacttcgacagttttgtgttcagagaagctacaacagtactgcaacatcgaatttgtttagcaagttatcatatgctaggatataactgtttgatacacaagggacaaaatctgtggaggtaagggcatctcacattttttttgatgaaacattagcaggagctctgccatatcatataagaagagcaagctagagtgtcacagtctttattacatgaatgatcaaatacttagagtccatagggaaaaagtgaaaactgttgactatatggctaagagacaatcatgatccatgaaaaattctaatggactcatatacacagagggggctagcgtgcttgagagaataatattagccgccaccgcatctctctatagaggtgtacgtgctcaagtcgccaccgttgtttctgtcgtggacatggaaattatatggcggattgctggacatgtagtattggcttatctggtggacgatagactgcctagaccacatgaattaccaaatacttttgagtctttgacatgcaaaaaagggtgaaaactccattagaaaactttagaagctgaaacaaatattcccttcagtattgagttatattagggtatttcatatccccttcaatattcagttttattagagtacttcattctaataaatcacatccaatttcattctgccaatcatattttctttttatgcaattttattctattgatcctattttctttgttttgtttttggcaatgaggtgtttcagcatcgacattcaatttcacagcaggaacttctccattccattccaatccaacatcgacaggcattccatttcacacagctaatcggtggagggaaaaatattcatcaggaaaccagctaatcgtggaaggaaaaaatattcatcaaagtggatgtcactggatgttttagtggatgtcaactttgtcatctactcgtgtttgataccaggatgcagtgcaaccatttccacatatgtattggctagcattgaactgaggctttgtacagtagtaataagaaatgagaaatgtcgaattcttttagggccctgatttggcatcaattgaaaagacattgactgtatctatctacagggttccacatgcacattcagcgagtcaatcctgggatcgtgtggcttccatactgggctgttcacctcaccacatttgatggatgttagagagcgatttcagctagatggagaaaattttgaagtactcctggtggtgctagaacaagttgaagcctatttcaggttcctcgcgctgctcgcattcaagatattttctgctgagcaggtagatgttgctattctcgaggttggcctaggagggaagttcgatgcaactaatgtggttaaagcacctgtagtttgtggcatatcttcccttggatatgatcatatggaaattcttggtgaccaaatcctgttcttggtgataaacttggtgtcgataaacgggttaattctgttggcaaaattaggatgacacaggttgttagttctcgtgaatgtcctgttgtctcgaaatacaaagcttctgttcgcacctaatcgcctaaaatggaaatgtttgactcattgtttaattcggggggaagctgaaggtggtctgatccgttctaggaagagaaaggctgaccaagtcatcatctccagggacgatgttagcgaaagtcaatttaatcaggtgttgatcattgggttgcaacaaatcatcggtggagactgagtcaccgcggccagaaaaccacggtctcaatttgaggagtttttccatctatgtttgttagaaggcataatgcctatttatctcttgtattcgaacatttggcaattaagaaatagaagattacttccccaatatcccttattcctaatctcacctttcacggcttgtggtgaacaatcacttgctattaccgactgacatgtccactcctcatatgtgcgatattggggttgatatatatgttgttcgtttccatgtaattattgtatactaacatttatcgaataatttttacaccgtcgc

SEQ ID NO: 13875 - DNA, 2199 bp, Zea Mays
cttctgttgtccattttgtcggaaggaaagtgtccaccgacgaaggagaagccaaagcacaggagcatggtgctatgttcatggagaccagtgcaaaagctgggttcaacgtcaagcccctattccgcaagatcgctggatcccttctaggactagacgcactttcgtcaggaaagcaggaagacatggtcgacataaacctcagacctgccagcggttcgtcggcttcaggtgcagccgcgcagctggagcagaaatcaggcggttgctcctgttgagacttcgacagttttgtgttcagagaagctacaacagtactgcaacatcgaatttgtttagcaagttatcatatgctaggatataactgtttgatacacaagggacaaaatctgtggaggtaagggcatctcacattttttttgatgaaacattagcaggagctctgccatatcatataagaagagcaagctagagtgtcacagtctttattacatgaatgatcaaatacttagagtccatagggaaaaagtgaaaactgttgactatatggctaagagacaatcatgatccatgaaaaattctaatggactcatatacacagagggggctagcgtgcttgagagaataatattagccgccaccgcatctctctatagaggtgtacgtgctcaagtcgccaccgttgtttctgtcgtggacatggaaattatatggcggattgctggacatgtagtattggcttatctggtggacgatagactgcctagaccacatgaattaccaaatacttttgagtctttgacatgcaaaaaagggtgaaaactccattagaaaactttagaagctgaaacaaatattcccttcagtattgagttatattagggtatttcatatccccttcaatattcagttttattagagtacttcattctaataaatcacatccaatttcattctgccaatcatattttctttttatgcaattttattctattgatcctattttctttgttttgtttttggcaatgaggtgtttcagcatcgacattcaatttcacagcaggaacttctccattccattccaatccaacatcgacaggcattccatttcacacagctaatcggtggagggaaaaatattcatcaggaaaccagctaatcgtggaaggaaaaaatattcatcaaagtggatgtcactggatgttttagtggatgtcaactttgtcatctactcgtgtttgataccaggatgcagtgcaaccatttccacatatgtattggctagcattgaactgaggctttgtacagtagtaataagaaatgagaaatgtcgaattcttttagggccctgatttggcatcaattgaaaagacattgactgtatctatctacagggttccacatgcacattcagcgagtcaatcctgggatcgtgtggcttccatactgggctgttcacctcaccacatttgatggatgttagagagcgatttcagctagatggagaaaattttgaagtactcctggtggtgctagaacaagttgaagcctatttcaggttcctcgcgctgctcgcattcaagatattttctgctgagcaggtagatgttgctattctcgaggttggcctaggagggaagttcgatgcaactaatgtggttgttagttctcgtgaatgtcctgttgtctcgaaatacaaagcttctgttcgcacctaatcgcctaaaatggaaatgtttgactcattgtttaattcggggggaagctgaaggtggtctgatccgttctaggaagagaaaggctgaccaagtcatcatctccagggacgatgttagcgaaagtcaatttaatcaggtgttgatcattgggttgcaacaaatcatcggtggagactgagtcaccgcggccagaaaaccacggtctcaatttgaggagtttttccatctatgtttgttagaaggcataatgcctatttatctcttgtattcgaacatttggcaattaagaaatagaagattacttccccaatatcccttattcctaatctcacctttcacggcttgtggtgaacaatcacttgctattaccgactgacatgtccactcctcatatgtgcgatattggggttgatatatatgttgttcgtttccatgtaattattgtatactaacatttatcgaataatttttacaccgtcgc

SEQ ID NO: 13876 - DNA, 2151 bp, Zea Mays
cttctgttgtccattttgtcggaaggaaagtgtccaccgacgaaggagaagccaaagcacaggagcatggtgctatgttcatggagaccagtgcaaaagctgggttcaacgtcaagcccctattccgcaagatcgctggatcccttctaggactagacgcactttcgtcaggaaagcaggaagacatggtcgacataaacctcagacctgccagcggttcgtcggcttcaggtgcagccgcgcagctggagcagaaatcaggcggttgctcctgttgagacttcgacagttttgtgttcagagaagctacaacagtactgcaacatcgaatttgtttagcaagttatcatatgctaggatataactgtttgatacacaagggacaaaatctgtggaggtaagggcatctcacattttttttgatgaaacattagcaggagctctgccatatcatataagaagagcaagctagagtgtcacagtctttattacatgaatgatcaaatacttagagtccatagggaaaaagtgaaaactgttgactatatggctaagagacaatcatgatccatgaaaaattctaatggactcatatacacagagggggctagcgtgcttgagagaataatattagccgccaccgcatctctctatagaggtgtacgtgctcaagtcgccaccgttgtttctgtcgtggacatggaaattatatggcggattgctggacatgtagtattggcttatctggtggacgatagactgcctagaccacatgaattaccaaatacttttgagtctttgacatgcaaaaaagggtgaaaactccattagaaaactttagaagctgaaacaaatattcccttcagtattgagttatattagggtatttcatatccccttcaatattcagttttattagagtacttcattctaataaatcacatccaatttcattctgccaatcatattttctttttatgcaattttattctattgatcctattttctttgttttgtttttggcaatgaggtgtttcagcatcgacattcaatttcacagcaggaacttctccattccattccaatccaacatcgacaggcattccatttcacacagctaatcggtggagggaaaaatattcatcaggaaaccagctaatcgtggaaggaaaaaatattcatcaaagtggatgtcactggatgttttagtggatgtcaactttgtcatctactcgtgtttgataccaggatgcagtgcaaccatttccacatatggttccacatgcacattcagcgagtcaatcctgggatcgtgtggcttccatactgggctgttcacctcaccacatttgatggatgttagagagcgatttcagctagatgggtgctatgaaatttatgatcgcactgacctagctcctcctttctgagggcatcggggttaatatttctgaagagaaaattttgaagtactcctggtggtgctagaacaagttgaagcctatttcaggttcctcgcgctgctcgcattcaagatattttctgctgagcaggtagatgttgctattctcgaggttggcctaggagggaagttcgatgcaactaatgtggttgttagttctcgtgaatgtcctgttgtctcgaaatacaaagcttctgttcgcacctaatcgcctaaaatggaaatgtttgactcattgtttaattcggggggaagctgaaggtggtctgatccgttctaggaagagaaaggctgaccaagtcatcatctccagggacgatgttagcgaaagtcaatttaatcaggtgttgatcattgggttgcaacaaatcatcggtggagactgagtcaccgcggccagaaaaccacggtctcaatttgaggagtttttccatctatgtttgttagaaggcataatgcctatttatctcttgtattcgaacatttggcaattaagaaatagaagattacttccccaatatcccttattcctaatctcacctttcacggcttgtggtgaacaatcacttgctattaccgactgacatgtccactcctcatatgtgcgatattggggttgatatatatgttgttcgtttccatgtaattattgtatactaacatttatcgaataatttttacaccgtcgc

SEQ ID NO: 13877 - DNA, 2260 bp, Zea Mays
ttctgttgtccattttgtcggaaggaaagtgtccaccgacgaaggagaagccaaagcacaggagcatggtgctatgttcatggagaccagtgcaaaagctgggttcaacgtcaagcccctattccgcaagatcgctggatcccttctaggactagacgcactttcgtcaggaaagcaggaagacatggtcgacataaacctcagacctgccagcggttcgtcggcttcaggtgcagccgcgcagctggagcagaaatcaggcggttgctcctgttgagacttcgacagttttgtgttcagagaagctacaacagtactgcaacatcgaatttgtttagcaagttatcatatgctaggatataactgtttgatacacaagggacaaaatctgtggaggtaagggcatctcacattttttttgatgaaacattagcaggagctctgccatatcatataagaagagcaagctagagtgtcacagtctttattacatgaatgatcaaatacttagagtccatagggaaaaagtgaaaactgttgactatatggctaagagacaatcatgatccatgaaaaattctaatggactcatatacacagagggggctagcgtgcttgagagaataatattagccgccaccgcatctctctatagaggtgtacgtgctcaagtcgccaccgttgtttctgtcgtggacatggaaattatatggcggattgctggacatgtagtattggcttatctggtggacgatagactgcctagaccacatgaattaccaaatacttttgagtctttgacatgcaaaaaagggtgaaaactccattagaaaactttagaagctgaaacaaatattcccttcagtattgagttatattagggtatttcatatccccttcaatattcagttttattagagtacttcattctaataaatcacatccaatttcattctgccaatcatattttctttttatgcaattttattctattgatcctattttctttgttttgtttttggcaatgaggtgtttcagcatcgacattcaatttcacagcaggaacttctccattccattccaatccaacatcgacaggcattccatttcacacagctaatcggtggagggaaaaatattcatcaggaaaccagctaatcgtggaaggaaaaaatattcatcaaagtggatgtcactggatgttttagtggatgtcaactttgtcatctactcgtgtttgataccaggatgcagtgcaaccatttccacatatgtattggctagcattgaactgaggctttgtacagtagtaataagaaatgagaaatgtcgaattcttttagggccctgatttggcatcaattgaaaagacattgactgtatctatctacagggttccacatgcacattcagcgagtcaatcctgggatcgtgtggcttccatactgggctgttcacctcaccacatttgatggatgttagagagcgatttcagctagatgggtgctatgaaatttatgatcgcactgacctagctcctcctttctgagggcatcggggttaatatttctgaagagaaaattttgaagtactcctggtggtgctagaacaagttgaaggttcctcgcgctgctcgcattcaagatattttctgctgagcaggtagatgttgctattctcgaggttggcctaggagggaagttcgatgcaactaatgtggttgttagttctcgtgaatgtcctgttgtctcgaaatacaaagcttctgttcgcacctaatcgcctaaaatggaaatgtttgactcattgtttaattcggggggaagctgaaggtggtctgatccgttctaggaagagaaaggctgaccaagtcatcatctccagggacgatgttagcgaaagtcaatttaatcaggtgttgatcattgggttgcaacaaatcatcggtggagactgagtcaccgcggccagaaaaccacggtctcaatttgaggagtttttccatctatgtttgttagaaggcataatgcctatttatctcttgtattcgaacatttggcaattaagaaatagaagattacttccccaatatcccttattcctaatctcacctttcacggcttgtggtgaacaatcacttgctattaccgactgacatgtccactcctcatatgtgcgatattggggttgatatatatgttgttcgtttccatgtaattattgtatactaacatttatcgaataatttttacaccgtcgc

SEQ ID NO: 13878 - DNA, 693 bp, Zea Mays
gtcggcttctcggtcgggacgcgtaactgacgcctcccagacctccccttcctcctccccgcgttcctagtgcgacgatgcgctctcgccttcctccccattgctaccttgtccctcctccgatgtgccgcgcccaacgcggcgttcctggtcctgctcctccttgaccgtgtgctggaactggaagtggtgagcagcggcgttcctggtcctcctccttgaccgtgtgctacttacgaggataaacgatgctccatagatcatgaagcagatgcccccgccacctaaggatttggagattactatagtgcaagtagagtgtagtgatcaatgggtcctgataatgttcaaaggctacaagcattagccgggacatagtccaagcctgatacaggaaaagtgtcacttaacattatgtccaactttgttttgtttgtgatacgagttgtataactatttaagcaattatgtagctatttttatttcagtttcactagcattgtctagaacacggtgttcggtatacatgttttatactaatttttaacttccgtggcaacgcagaggcacatacctagtaaaaacttatttacagaggcagctctggagcctagccgcctctccaaataaatttgtatagacggtcgtttttcttaacttgctctacacatctaattaatagttgtagatggg

SEQ ID NO: 13879 - DNA, 736 bp, Zea Mays
ggacgcgtaactgacgcctcccagacctccccttcctcctccccgcgttcctagtgcgacgatgcgctctcgccttcctccccattgctaccttgtccctcctccgatgtgccgcgcccaacgcggcgttcctggtcctgctcctccttgaccgtgtgctggaactggaagtggtgagcagcggcgttcctggtcctcctccttgaccgtgtgctacttacgagcccacggtgaggcttctcatatgaaaatgaggacatcaactctgacaacgtggccatgggataaacgatgctccatagatcatgaagcagatgcccccgccacctaaggatttggagattactatagtgcaagtagagtgtagtgatcaatgggtcctgataatgttcaaaggctacaagcattagccgggacatagtccaagcctgatacaggaaaagtgtcacttaacattatgtccaactttgttttgtttgtgatacgagttgtataactatttaagcaattatgtagctatttttatttcagtttcactagcattgtctagaacacggtgttcggtatacatgttttatactaatttttaacttccgtggcaacgcagaggcacatacctagtaaaaacttatttacagaggcagctctggagcctagccgcctctccaaataaatttgtatagacggtcgtttttcttaacttgctctacacatctaattaatagttgtagatggg

SEQ ID NO: 13880 - DNA, 1802 bp, Zea Mays
gtttgtatatgtcaagcagtttacgaacgagaaacaaaggattctgtacgccactctctggcaccttacaaatctttcatatccttcaaattgtcatttttcgctgtatccatgtcatttgacagtatcatctcacatcagatttgtttcaccacttgtcttggtttgaactaacaatctttgtatccaaatcctaaatggaccttttgtttagtttctcaggcagaggttagctttctaggaaatctgaaacatccgaacctgttcagactaattggttattattttgaggataaccaaacgcagttagtatatgaatttatgccccatggaaatctagagcaccatctcttcaggaataaccgtttggcatctgctacagcttcgttttaagcatatttgtgagctttctaagtagatgagttatttgattttttgtctatttcaaaagtcaatgtgttccggaagaacttatattataaatggctgcattgtgtgaagtgccatgtaatttatttttagatatttgttgctttataaaattggtatctattgacctggagagcagtgctctatggtggatcttagattcagattcgttgttttactggtgaagttgtcccaaatagccccaaattatggaccgagacatttttaaaccaaataccaaggttaataatagagctcatgatagttcagcatatatatattttctgcatcattccatacctattatatttgactattcatctcgtttgtttcttaagatatatatgttttctgcatcattttatatttttttgtttaactactattcatcccctttctttaactctgcggtaatagttgcaacctcagtacgaccaacttttagttaagaaaaattgtgctggtgttcagttctaacatgaaattgtttattgttctctgtaatctaacatttctttttttatatatttgaacagggattatgtgccagtttcagtttttggtaacagtctataggacttttacacattcaaagcatcgtagaagaaccacgctcctgcctacacaccagtttgttgtttctctttcaccccgcgagcgcgagtactagggcaaccacagcactatccctgctgcccatgtcttcgttggggcctttgctggtgaccaaaacccaccacagcactatccctgctgcccatgttttcgtgacagagctattggagtattagaagggatagctttggtgggagatcctgaacttgccattgttgatgaagcatacccatatatattgcacaggtccgcaaccgctggaggtcatagcgcaagatgtcaaggccaagaagcgcaaccaggcgctatgagtccaggttgttggtcactggatctacgatacagagaatggcaaaacctaccatcagtcaatgacattctcatggcatggcttgaatatttattcttcacaatttaccaaggtagagaatatcgtgtccttcacctgtctccgggagcttgttctagagtgatgaaccgaaggtttcaaggacagcctctgtataagctcagaccaagcaaattccgtgaagcaattgaggaggctttccttgctgaacgtggtttttttgatctccaaacggatggggaagaggctgcttcaaataacgagcaagaatgccaatctgagtctcaggttgttggcaaagggaaagaccattccttgcttaacccatccatagtccctgccatgcccgttagcaggaatttgattgtatgttcaccgcgaaatttttgattgtggttgtaggactgtg

SEQ ID NO: 13881 - DNA, 1586 bp, Zea Mays
aaaaaagacattgggcctcgcttgtcggcccagtccccagcaaaaccctggaggcccgcgcggcactccgaaaccgtcatctcattttccttttcacgcccactcactcacccgccgcccccgccgccgccatcccctccttgccgtctccgggcacggcctcgtcaatcctttgctcctcctccgccgcagccgctgccatggactccacgccggcgcccgaggcggctcccggagcctcctcttccgccaccgccgctgccgaggatctggcggggggcgtggcggcgatgaccctggatgagcggttcgctctgctgcgggggatcggggaggagtgcatccaggaggacgagctcaggcgcctgctcgagaacaagcccgtgcccatctgctacgacggcttcgagccctccggacgcatgcacatcgcccagggcattgtgaagaccatcaacgtcaacaagatggtcagggccgggtgcaaggtgaaaatctggattgccgactggttcgcgcagctcaacaacaagatgggaggcgacctcaagaaaatccagacagtcgggcgctacatgatcgagatttggaaggcggccgggatgaacctcgacggggtggagttcctgtggtcctccgaggagatcaaccggcgcgcccacgagtactggccaatcgtgatggacattgcccggaaaaacaacgtcaaacggataacgagatgctgccaaattatgggcagaagtgaccaggacgacttgactgctgcccagattttctacccttgcatgcaatgtgctgatatatttttcttgaaggctgacatatgccaattggggatggaccaaaggaaggtcaatgtgctagctagggagtactgtgattacatcaaaaggaagaacaaaccaattattctttcacatcatatgctccctggttttaaagaaggccaggagaaaatgtcaaagagtgacccatcctcggctatctttatggaagatgacgaggcccaagttaatgtgaagataaagcaagcattttgccctcccaaaattgttgaggggaatccttgtttggagtacattaaatacatcgttttcccttggtttggaaggtttgaggtggcccggaaggaaagcaatggcggtaacaagacatttacaagcatggatgaactaatttctgattatgagactggtgctttgcatcctgctgatgtcaaacctgcactggcaaaagcaataaatgaaattttgcagaagtacagagtaaccagttgaggagcggaaggtgttcatctttagggtgaatgtcgctgattgaaattcttctatgcttattctgttactaatgccaccactcattttagatcaagcattgagccattggttatcagtgtacaatctctctatacaggcattttggtggcagtggccttgtctgtcattggctacaacgttctagataaaaaaacatttaaattttgtggaagttgaattatcttctcatgtgtgtatgactgtatgtgagactggttgaaagtgcaagcgacaaggcatatatggccgagaagtttaaatgttttt

SEQ ID NO: 13882 - DNA, 1638 bp, Zea Mays
aaaaaagacattgggcctcgcttgtcggcccagtccccagcaaaaccctggaggcccgcgcggcactccgaaaccgtcatctcattttccttttcacgcccactcactcacccgccgcccccgccgccgccatcccctccttgccgtctccgggcacggcctcgtcaatcctttgctcctcctccgccgcagccgctgccatggactccacgccggcgcccgaggcggctcccggagcctcctcttccgccaccgccgctgccgaggatctggcggggggcgtggcggcgatgaccctggatgagcggttcgctctgctgcgggggatcggggaggagtgcatccaggaggacgagctcaggcgcctgctcgagaacaagcccgtgcccatctgctacgacggcttcgagccctccggacgcatgcacatcgcccagggcattgtgaagaccatcaacgtcaacaagatggtcagggccgggtgcaaggtgaaaatctggattgccgactggttcgcgcagctcaacaacaagatgggaggcgacctcaagaaaatccagacagtcgggcgctacatgatcgagatttggaaggcggccgggatgaacctcgacggggtggagttcctgtggtcctccgaggagatcaaccggcgcgcccacgagtactggccaatcgtgatggacattgcccggaaaaacaacgtcaaacggataacgagatgctgccaaattatgggcagaagtgaccaggacgacttgactgctgcccagattttctacccttgcatgcaatgtgctgatatatttttcttgaaggctgacatatgccaattggggatggaccaaaggaaggtcaatgtgctagctagggagtactgtgattacatcaaaaggaagaacaaaccaattattctttcacatcatatgctccctggttttaaagaaggccaggagaaaatgtcaaagagtgacccatcctcggctatctttatggaagatgacgaggcccaagttaatgtgaagataaagcaagcattttgccctcccaaaattgttgaggggaatccttgtttggagtacattaaatacatcgttttcccttggtttggaaggtttgaggtggcccggaaggaaagcaatggcggtaacaagacatttacaagcatggatgaactaatttctgattatgagactggtgctttgcatcctgctgatgtcaaacctgcactggcaaaagcaataaatgaaattttgcagcctgttcgtgaccacttcaacaacaataacgaagccaaagttctactaaacactgtcaagagtaaccagttgaggagcggaaggtgttcatctttagggtgaatgtcgctgattgaaattcttctatgcttattctgttactaatgccaccactcattttagatcaagcattgagccattggttatcagtgtacaatctctctatacaggcattttggtggcagtggccttgtctgtcattggctacaacgttctagataaaaaaacatttaaattttgtggaagttgaattatcttctcatgtgtgtatgactgtatgtgagactggttgaaagtgcaagcgacaaggcatatatggccgagaagtttaaatgttttt

SEQ ID NO: 13883 - DNA, 2391 bp, Zea Mays
cgccattatatacatccatcggcatagcacgtgcgaggatgcgacggcgagcagcggtgtcgatttttagggcattgtgacttgttgagaaattcgtaggggtatacgaaaacctctccgccgaactcctgcagatcctaattaacctccccctgctgcaccaattgccgctggcgatggatggtagcggacgagctctcgattgtcgcagcttctggaaggccggcgcgtacgaggcccccactgctccgaccagggagttccaagatgctcttgagacgggggacttcgaccgcgcgcgcgtgcaccccaagttcctccacaccaacgccacctcccacaagtgggctttcggagctatagctgaacttcttgacaatgcagtggatgagataagcaatggtgccacgttcataaaagttgataaaagcatcaatttgaaagacaatagctcaatgctagttttccaagatgatggaggcggcatggatcctgaaggtgtccgtcgatgcatgagtttaggattctcaaccaagaaatctaagaccactattggccagtatggaaatggctttaagacaagcacaatgagacttggtgcagatgcaattgtttttactcgtgctatccgaggaggtaatgttacattgagtataggtttgctctcctacacttttttgagaaagacattgaaggatgacatagttgttccaatgcttgattttaagatccaagatggggacattgtaccgttggtgtatggttcacagggtgattgggatagtagtctgaagatagtacttgattggtcccctttttcttcgaaggaagaacttctgcagcagtttcaggatgttggtagtcatggaactaaagtggtagtgtacaatttatggatgaatgatgatggccttttggaacttgactttgaggatgatgatgaggacatattacttagagatcaaggtagcgcaagtggggggttctcaaagagtcagaaagaaattgttaagcaacacatatcccacaggctcagattttcattgcgagcttatacctccatcctttacctcaggaagtttgataatttccaaattatattaagaggaaaacctgttgagcagatatttatcactgatgaactaaaatttaagaaagtcgttacttacagacctcaagcagcacatgattcccaagtggcctcggtaaaaattgatattggttttgcaaaggaggcccctattttgggcatttttgggatgaatgtctaccacaaagatcgacttataatgcctttctggaaggtccttcaagaaggatctagcagagggagaagtgtggttggtgtacttgaagcaaattttattgaaccagcacatgacaaacaagattttgagaggacaccattgtttattcggctagaaacaagacttagacaaattattattgatttctggaaagaaaggtgccatttgattggttaccagccaatggatccacatttaagatcccagtataaggccaccctcaaagaatcggttggtcctgctccagttcaccataaagcttccagtgtccgaagaactggagggctttcgtcaaatttactaccagagacatatgacgacataacaactgttgggttctcatttgcaatcgtctgatcaagcacaagagaacaatatggactcagaagttttggatgaggatctggtggagattggctcctctggtgtcctagatcctagttttattgagaagctgagtgaagaaaacatcgctctgttttcaaggcgtgaagagcttcgacaacgagatacacaactgaagcagacgattggagacctggagcttgagctggaggaaacaaaaaagaagtgcggtcagcttgctgctcagctcaaggcatggaagaaccagcagcatctaccctaaatgtgaagggcatcattaagaccgaggacacggaggtacacgacaacgaccaatactgacagaaaaccgaaggttacaaggaagcacggatgcatataatgtctgtctagtgggctggctaactcatggttgagttgttaaaaagaagtttagcatgtaaatcttaggcgtgtgtgctacttagctactagacagaatggttgtcatgtgcaagcaaggaagatgacttgggtgattcctgctgttaatttgctatgcaaaatgtcacgtaaggcccttatgatccagccttgagcatcaaataaaactgtagaactcgaaatgaattgctcatggtcccctgcatttctgattaatagggtaccaactgacgacgaacaatgcagggttcaggtgtatgaaagggattccctcccggccacagtatcgcacgaatcggtcgggctcatatttgat

SEQ ID NO: 13884 - DNA, 2389 bp, Zea Mays
attatatacatccatcggcatagcacgtgcgaggatgcgacggcgagcagcggtgtcgatttttagggcattgtgacttgttgagaaattcgtaggggtatacgaaaacctctccgccgaactcctgcagatcctaattaacctccccctgctgcaccaattgccgctggcgatggatggtagcggacgagctctcgattgtcgcagcttctggaaggccggcgcgtacgaggcccccactgctccgaccagggagttccaagatgctcttgagacgggggacttcgaccgcgcgcgcgtgcaccccaagttcctccacaccaacgccacctcccacaagtgggctttcggagctatagctgaacttcttgacaatgcagtggatgagataagcaatggtgccacgttcataaaagttgataaaagcatcaatttgaaagacaatagctcaatgctagttttccaagatgatggaggcggcatggatcctgaaggtgtccgtcgatgcatgagtttaggattctcaaccaagaaatctaagaccactattggccagtatggaaatggctttaagacaagcacaatgagacttggtgcagatgcaattgtttttactcgtgctatccgaggaggtaatgttacattgagtataggtttgctctcctacacttttttgagaaagacattgaaggatgacatagttgttccaatgcttgattttaagatccaagatggggacattgtaccgttggtgtatggttcacagggtgattgggatagtagtctgaagatagtacttgattggtcccctttttcttcgaaggaagaacttctgcagcagtttcaggatgttggtagtcatggaactaaagtggtagtgtacaatttatggatgaatgatgatggccttttggaacttgactttgaggatgatgatgaggacatattacttagagatcaaggtagcgcaagtggggggttctcaaagagtcagaaagaaattgttaagcaacacatatcccacaggctcagattttcattgcgagcttatacctccatcctttacctcaggaagtttgataatttccaaattatattaagaggaaaacctgttgagcagatatttatcactgatgaactaaaatttaagaaagtcgttacttacagacctcaagcagcacatgattcccaagtggcctcggtaaaaattgatattggttttgcaaaggaggcccctattttgggcatttttgggatgaatgtctaccacaaagatcgacttataatgcctttctggaaggtccttcaagaaggatctagcagagggagaagtgtggttgcaaattttattgaaccagcacatgacaaacaagattttgagaggacaccattgtttattcggctagaaacaagacttagacaaattattattgatttctggaaagaaaggtgccatttgattggttaccagccaatggatccacatttaagatcccagtataaggccaccctcaaagaatcggttggtcctgctccagttcaccataaagcttccagtgtccgaagaactggagggctttcgtcaaatttactaccagagacatatgacgacataacaactgttgggttagcaaataatggttctcatttgcaatcgtctgatcaagcacaagagaacaatatggactcagaagttttggatgaggatctggtggagattggctcctctggtgtcctagatcctagttttattgagaagctgagtgaagaaaacatcgctctgttttcaaggcgtgaagagcttcgacaacgagatacacaactgaagcagacgattggagacctggagcttgagctggaggaaacaaaaaagaagtgcggtcagcttgctgctcagctcaaggcatggaagaaccagcagcatctaccctaaatgtgaagggcatcattaagaccgaggacacggaggtacacgacaacgaccaatactgacagaaaaccgaaggttacaaggaagcacggatgcatataatgtctgtctagtgggctggctaactcatggttgagttgttaaaaagaagtttagcatgtaaatcttaggcgtgtgtgctacttagctactagacagaatggttgtcatgtgcaagcaaggaagatgacttgggtgattcctgctgttaatttgctatgcaaaatgtcacgtaaggcccttatgatccagccttgagcatcaaataaaactgtagaactcgaaatgaattgctcatggtcccctgcatttctgattaatagggtaccaactgacgacgaacaatgcagggttcaggtgtatgaaagggattccctcccggccacagtatcgcacgaatcggtcgggctcatatttgat

SEQ ID NO: 13885 - DNA, 2100 bp, Zea Mays
atatgatactattgctgctgcacttctaatcgcatttgataagtgatggaagctatagctgaacttcttgacaatgcagtggatgagataagcaatggtgccacgttcataaaagttgataaaagcatcaatttgaaagacaatagctcaatgctagttttccaagatgatggaggcggcatggatcctgaaggtgtccgtcgatgcatgagtttaggattctcaaccaagaaatctaagaccactattggccagtatggaaatggctttaagacaagcacaatgagacttggtgcagatgcaattgtttttactcgtgctatccgaggaggtaatgttacattgagtataggtttgctctcctacacttttttgagaaagacattgaaggatgacatagttgttccaatgcttgattttaagatccaagatggggacattgtaccgttggtgtatggttcacagggtgattgggatagtagtctgaagatagtacttgattggtcccctttttcttcgaaggaagaacttctgcagcagtttcaggatgttggtagtcatggaactaaagtggtagtgtacaatttatggatgaatgatgatggccttttggaacttgactttgaggatgatgatgaggacatattacttagagatcaaggtagcgcaagtggggggttctcaaagagtcagaaagaaattgttaagcaacacatatcccacaggctcagattttcattgcgagcttatacctccatcctttacctcaggaagtttgataatttccaaattatattaagaggaaaacctgttgagcagatatttatcactgatgaactaaaatttaagaaagtcgttacttacagacctcaagcagcacatgattcccaagtggcctcggtaaaaattgatattggttttgcaaaggaggcccctattttgggcatttttgggatgaatgtctaccacaaagatcgacttataatgcctttctggaaggtccttcaagaaggatctagcagagggagaagtgtggttggtgtacttgaagcaaattttattgaaccagcacatgacaaacaagattttgagaggacaccattgtttattcggctagaaacaagacttagacaaattattattgatttctggaaagaaaggtgccatttgattggttaccagccaatggatccacatttaagatcccagtataaggccaccctcaaagaatcggttggtcctgctccagttcaccataaagcttccagtgtccgaagaactggagggctttcgtcaaatttactaccagagacatatgacgacataacaactgttgggttagcaaataatggttctcatttgcaatcgtctgatcaagcacaagagaacaatatggactcagaagttttggatgaggatctggtggagattggctcctctggtgtcctagatcctagttttattgagaagctgagtgaagaaaacatcgctctgttttcaaggcgtgaagagcttcgacaacgagatacacaactgaagcagacgattggagacctggagcttgagctggaggaaacaaaaaagaagtgcggtcagcttgctgctcagctcaaggcatggaagaaccagcagcatctaccctaaatgtgaagggcatcattaagaccgaggacacggaggtacacgacaacgaccaatactgacagaaaaccgaaggttacaaggaagcacggatgcatataatgtctgtctagtgggctggctaactcatggttgagttgttaaaaagaagtttagcatgtaaatcttaggcgtgtgtgctacttagctactagacagaatggttgtcatgtgcaagcaaggaagatgacttgggtgattcctgctgttaatttgctatgcaaaatgtcacgtaaggcccttatgatccagccttgagcatcaaataaaactgtagaactcgaaatgaattgctcatggtcccctgcatttctgattaatagggtaccaactgacgacgaacaatgcagggttcaggtgtatgaaagggattccctcccggccacagtatcgcacgaatcggtcgggctcatatttgat

SEQ ID NO: 13886 - DNA, 1103 bp, Zea Mays
gaaaaccgtgtggcctcccaataaaaacgccaccccgccctccactcgccggagcccgaccgccgggatgcctcgagatttgcgaccagccgggatgcgcctgttcggcgtcaccatcgcgccggtgcctgaggcgaatcctccgggacgaaatccgagccccaacccacccgtggctgccagggaggacgtgatgcgcaagtgcaagagcatgggcaacctcgcggcccttggcgctggcctggacggtggaggaggatgcgcggacggcggagttgctggcgacgggtacctctccgatggcgggctgatgcagtcgtgcggaaagcggcggagggcgcaggagaggaagaaagctgttccttggactgaagaggagcatagaacatttcttgctggtcttgaaaagctagggaagggagattggaggggtatagcaaaaaaatttgttaccaccagaacaccaactcaagttgcaagtcatgctcagaaatattttcttagacaaactaatccaaataagaagcgcagatctagtctttttgacatgatgcccagagagctgtcaccaacaccaaactgccccgtattaccaccatccatggcaaaagtacatgacgtggtagctatgacgaaacaactccagaatagcaacttggaaggagcctcatcttccaatgcagctaatgtagtatctcaagtaggaagagatctccccccagttccgtcttttaaggcaacaaatatagattcaagtttcagcaaatttagccacatggagcgctactggagaactccctacccgtccagaccaattcctagagcccctgaagggacgtcttcatcaactcctgttgctgccagtacagctgttccagcctccgaagctaacctgactgcatatactagcacattcttgagccagcgagctgataccccatcattgcctccgaagggtgatcctcctccatcagaggatgatgatctggaactgactgtcgctccaccatcccaacagaatatgaccaatatgtcctcccagaatgcgctagatcatcagccacacgtcttccttccacctcccaacacccagcagcttcgac

SEQ ID NO: 13887 - DNA, 1159 bp, Zea Mays
aaaccgtgtggcctcccaataaaaacgccaccccgccctccactcgccggagcccgaccgccgggatgcctcgagatttgcgaccagccgggatgcgcctgttcggcgtcaccatcgcgccggtgcctgaggcgaatcctccgggacgaaatccgagccccaacccacccgtggctgccagggaggacgtgatgcgcaagtgcaagagcatgggcaacctcgcggcccttggcgctggcctggacggtggaggaggatgcgcggacggcggagttgctggcgacgggtacctctccgatggcgggctgatgcagtcgtgcggaaagcggcggagggcgcaggagaggaagaaagctgttccttggactgaagaggagcatagaacatttcttgctggtcttgaaaagctagggaagggagattggaggggtatagcaaaaaaatttgttaccaccagaacaccaactcaagttgcaagtcatgctcagaaatattttcttagacaaactaatccaaataagaagcgcagatctagtctttttgacatgatgcccagagagctgtcaccaacaccaaactgccccgtattaccaccatccatggcaaaagtacatgacgtggtagctatgacgaaacaactccagaatagcaacttggaaggagcctcatcttccaatgcagctaatgtagtatctcaagtaggaagagatctccccccagttccgtcttttaaggcaacaaatatagattcaagtttcagcaaatttagccacatggagcgctactggagaactccctacccgtccagaccaattcctagagcccctgaagggacgtcttcatcaactcctgttgctgccagtacagctgttccagcctccgaagctaacctgactgcatatactagcacattcttgagccagcgagctgataccccatcattgcctccgaagggtgatcctcctccatcagaggatgatgatctggaactgactgtcgctccaccatcccaacagaatatgaccaatatgtcctcccagaatgcgcagtgggattcattcatgttatgttaaccgctccctaccgccttatagttagagaaagctagatcatcagccacacgtcttccttccacctcccaacacccagcagcttcgac

SEQ ID NO: 13888 - DNA, 798 bp, Zea Mays
aacagctctagttgataactcattttggcatcacactgatgcatgcagccctgtttgatgtcatcatttggctttgtactgttccttggactgaagaggagcatagaacatttcttgctggtcttgaaaagctagggaagggagattggaggggtatagcaaaaaaatttgttaccaccagaacaccaactcaagttgcaagtcatgctcagaaatattttcttagacaaactaatccaaataagaagcgcagatctagtctttttgacatgatgcccagagagctgtcaccaacaccaaactgccccgtattaccaccatccatggcaaaagtacatgacgtggtagctatgacgaaacaactccagaatagcaacttggaaggagcctcatcttccaatgcagctaatgtagtatctcaagtaggaagagatctccccccagttccgtcttttaaggcaacaaatatagattcaagtttcagcaaatttagccacatggagcgctactggagaactccctacccgtccagaccaattcctagagcccctgaagggacgtcttcatcaactcctgttgctgccagtacagctgttccagcctccgaagctaacctgactgcatatactagcacattcttgagccagcgagctgataccccatcattgcctccgaagggtgatcctcctccatcagaggatgatgatctggaactgactgtcgctccaccatcccaacagaatatgaccaatatgtcctcccagaatgcgcagtgggattcattcatgttatgttaac

SEQ ID NO: 13889 - DNA, 543 bp, Zea Mays
ctctagttgataactcattttggcatcacactgatgcatgcagccctgtttgatgtcatcatttggctttgtactgttccttggactgaagaggagcatagaacatttcttgctggtcttgaaaagctagggaagggagattggaggggtatagcaaaaaaatttgttaccaccagaacaccaactcaagttgcaagtcatgctcagaaatattttcttagacaaactaatccaaataagaagcgcagatctagtctttttgacatgatgcccagagagctgtcaccaacaccaaactgccccgtattaccaccatccatggcaaaagtacatgacgtggtagctatgacgaaacaactccagaatagcaacttggaaggagcctcatcttccaatgcagctaatgtagtatctcaagtaggaagagatctccccccagttccgtcttttaaggcaacaaatatagattcaagtttcagcaaatttagccacatggtacaaaaacatcaatcatcatacaaagttgaagttttgaaatagaca

SEQ ID NO: 13890 - DNA, 1568 bp, Zea Mays
tcgcaccaaatccccttcctacaatctgcgcaatctgcccggtagaatccgtagttctaccaatttcattaataggagaagaaaaaaagcgggacataaacatccacacactgacccacacccatactgagacagctggagtgcgcacaagacacagagctgagagacagccaaaacagataaaaaaacaccacctggactaaacaactaagccattaagaatattactctgagctgtcaacaagactagccccttggcgccagcagaactccagcaccaaagctcattgccggctgagatcagggctgtagcaagatatggtgatttgccattgaacacagtcattcctttgccgccaaagaatccaatctcccaacacaataagagagttgagccctttctggagctcctttcccatggcgttaacacaattcttccaccagtcatcgaagataacatcagacggctgcggacaaagagcagtgagccccatctttggagaagaaagaaccagaactgcctgctgaaaacacagtttactaagatatgattaatcgtctcatcttcctgttcacaaaggggacaacagctcggtcgggagagatttctcttagccaatcgatccgatgtccagcattgattgtggatcacaagccagatgaagaaagtgaacttaggaggagcccaagtcttctagacacgatcaaaagcctcccactgcaaggatccttggaagatggctgcataagccgaggttgctaaatattttccggaactggacagcctccaaaagtgtctatctggcaatgccgggctgcagctgttccttggactgaagaggagcatagaacatttcttgctggtcttgaaaagctagggaagggagattggaggggtatagcaaaaaaatttgttaccaccagaacaccaactcaagttgcaagtcatgctcagaaatattttcttagacaaactaatccaaataagaagcgcagatctagtctttttgacatgatgcccagagagctgtcaccaacaccaaactgccccgtattaccaccatccatggcaaaagtacatgacgtggtagctatgacgaaacaactccagaatagcaacttggaaggagcctcatcttccaatgcagctaatgtagtatctcaagtaggaagagatctccccccagttccgtcttttaaggcaacaaatatagattcaagtttcagcaaatttagccacatggagcgctactggagaactccctacccgtccagaccaattcctagagcccctgaagggacgtcttcatcaactcctgttgctgccagtacagctgttccagcctccgaagctaacctgactgcatatactagcacattcttgagccagcgagctgataccccatcattgcctccgaagggtgatcctcctccatcagaggatgatgatctggaactgactgtcgctccaccatcccaacagaatatgaccaatatgtcctcccagaatgcgctagatcatcagccacacgtcttccttccacctcccaacacccagcagcttcgac

SEQ ID NO: 13891 - DNA, 2413 bp, Zea Mays
atttcgaaattcagcgaaatcgcgcgagacgaaagcgggaagctcttatctttcccaccaaatccaagcccatttgaggggccagccactccccgtcggatgccgccgccgccatgaccgtcacggccgccgcatggccggtatgcaccatctgctacgaggacctccgcccgctctccgaccagcacctccactgcctccccgcctgcggccacgtcttccacgccctctgcctggagcaatggctggagtactgccctgggggcaagaagaagcgcacctgccccgtctgcaagcagccctgcggcgccgcgcacccgccgacccgcctctacttcagctccaccggcacgtgcccgatccaggcctgcccctccccgggaagcgcctctgggggcgcggacccggaggcgctcgccgccgaggtcgcccggttggagcagaaggcggcgtcgctcggcaaggtggtcgaggagcagcgccagagcatcaacgatctcaagtccgaggctgcctggttgagggagcaggcggaggcgggagactttatgctgcaagccgcgaagaaggacaaagaatctgtccagatacttctgaatgcgaaaacagaggagttgtcgaggaagacatcagagtgcgggaggttgcaggagaagagccttgcattagccaaagagcttgcggcgctgaagctacatgaaccttcaggaggaagaaatcatgaagtttgcttcacttggtaaccagggaaacctgcagaatgctgttgatgttttgaagagatcacttgctattcggaacaagagctacaaggaattgatggtccagtgtaatgttttgggaagatcagagtctcgcatgcagcagaagcttgaaaaggccaaagaaattttaaagaagttaaaggcaagggtacaggaacttgagaaggaattagaagataaagaaaatggtctgttaagggacttgaggtcttcaaagaaatttaaagcagaccatataaaatctgggaatgtcacagctaatagtgctttcactagttcaagtcctggatatgaaaatcaaacaaacaagctcgatgaggtgatgcaagatccgtgcaacgacaagactcactttgaccggttaaaatctgaagctgggagtgttctgaatgcccaagacaacctggacaacaaggatgtagatgtgatagacctagaagccaatgattctgtttttggagatgaacagaaggctcagttttccgccaagccattcgggaccgatgatagcacaccgaattccgagaacaagtctagcctttgccaaaatgatgaccgacattccgtggcatctgaatgcacaaccgcacacgcagcaaatggaggacccttcctcaaacacagagaagcaactgtaaaatcaacctttatggcgaacattagggccaaactgcatattcctcgggagagtccttccgtgagaactaacgcgacaagttcaacgctggagagtgaaacattgacaattgatggcatctccaaacaagcaacgagattggcatctggcactggacctcagcagatccacaacttcaactctttttctgatgatttccaagcgccaggaattcctggcacggatggagcaaggagaagcattggcaaatggtgcaagggcccagcagatcccagttctgcgagtgggagcagaggcaacctgatcgccgtgggaccggatggccgaggaggcaaggtcaagatcctgagggaccttggccgaccccaggatagcaagtcccaagcgctgtggcccaaggcgcagaaggttgcaggcagaggtggccagtcccagatccatcagttctttggcaagagatgatcctgctactgaatgaatatgttgtgccgcatggagcctggttagctgaacctaaatcctgcatgcagctgtgtcggtatgcaatgcgtgctgtcgaacaactgaacgtgtatctctgttgtgcttgagctgatctacgtgtggatagttgtagagcacacctctggctcagcttggacatagccctggtttcatcacatggcagctggatgcagcagaaaagggaaacaagtttgttgaagagtctgatggtaggttctgggaggtggtgtgggcttgggagagcctacctacactacacgtcagctgtgttggatctaaccatccaatcataacaggacaccgggcatgtatggcgcttctagtttgtttgtttgtgaagtagtgcaagtgttgagcttctcgagtccctgaaaaggatgtttagtggacagctacaccagctcccgtctttttcttcaaagattttagctgccataactgatgtacttgttttgtatagtcatcattttacatttaaatatagacataaaaatcaagagttaaaacg

SEQ ID NO: 13892 - DNA, 1641 bp, Zea Mays
ctgcactatactactccctcccttctgaattgagctacaaggaattgatggtccagtgtaatgttttgggaagatcagagtctcgcatgcagcagaagcttgaaaaggccaaagaaattttaaagaagttaaaggcaagggtacaggaacttgagaaggaattagaagataaagaaaatggtctgttaagggacttgaggtcttcaaagaaatttaaagcagaccatataaaatctgggaatgtcacagctaatagtgctttcactagttcaagtcctggatatgaaaatcaaacaaacaagctcgatgaggtgatgcaagatccgtgcaacgacaagactcactttgaccggttaaaatctgaagctgggagtgttctgaatgcccaagacaacctggacaacaaggatgtagatgtgatagacctagaagccaatgattctgtttttggagatgaacagaaggctcagttttccgccaagccattcgggaccgatgatagcacaccgaattccgagaacaagtctagcctttgccaaaatgatgaccgacattccgtggcatctgaatgcacaaccgcacacgcagcaaatggaggacccttcctcaaacacagagaagcaactgtaaaatcaacctttatggcgaacattagggccaaactgcatattcctcgggagagtccttccgtgagaactaacgcgacaagttcaacgctggagagtgaaacattgacaattgatggcatctccaaacaagcaacgagattggcatctggcactggacctcagcagatccacaacttcaactctttttctgatgatttccaagcgccaggaattcctggcacggatggagcaaggagaagcattggcaaatggtgcaagggcccagcagatcccagttctgcgagtgggagcagaggcaacctgatcgccgtgggaccggatggccgaggaggcaaggtcaagatcctgagggaccttggccgaccccaggatagcaagtcccaagcgctgtggcccaaggcgcagaaggttgcaggcagaggtggccagtcccagatccatcagttctttggcaagagatgatcctgctactgaatgaatatgttgtgccgcatggagcctggttagctgaacctaaatcctgcatgcagctgtgtcggtatgcaatgcgtgctgtcgaacaactgaacgtgtatctctgttgtgcttgagctgatctacgtgtggatagttgtagagcacacctctggctcagcttggacatagccctggtttcatcacatggcagctggatgcagcagaaaagggaaacaagtttgttgaagagtctgatggtaggttctgggaggtggtgtgggcttgggagagcctacctacactacacgtcagctgtgttggatctaaccatccaatcataacaggacaccgggcatgtatggcgcttctagtttgtttgtttgtgaagtagtgcaagtgttgagcttctcgagtccctgaaaaggatgtttagtggacagctacaccagctcccgtctttttcttcaaagattttagctgccataactgatgtacttgttttgtatagtcatcattttacatttaaatatagacataaaaatcaagagttaaaacg

SEQ ID NO: 13893 - DNA, 2833 bp, Zea Mays
ccgccttcttcctcagttcctcttctgtgtcttccccagtccccactccaccccgccgcagggctggaatggtctgtcgccttgtcgcgtccgtgatccgtcccttggcctctcgcagcggacagcggccctccgccccctccaaatagcagcgaaacccctcgcgtttaaactattccctgatccaacccctcctcaaactctgacgacgcctccttccgtgcccgtccgtcctctataagggcgccgccgaggagagagaacgatgacttcaggttcttcccccgatcttccccgctcagcttcgcttaattgcatttaagcccctttggcactcattgccgtcccctcggctccatttcttggaggtgaccgcagctctccggcggaaggcggcgcagatggcttccgcggcgacacagtgcttcagctactcctcgttgccggccacgtgggctctgcggcagcggggcggcggtgccagcgtgctccggctctcttcccggcggaccttctcggtctccgcggcggccgggttcgacaaccagaaccgcgagtatgtgatcgtcgggggagggaacgctgcgggttacgccgccaggacgttcgtcgagcatggcatggctgacggccgcctttgcatcgtctccaaggagccagttccaccatacgagcggccagccttgaccaaaggctatctttttcctccggacaagaaaccggctcgcctacctggtttccatacatgcgttggatctggtggacagcgacagactgctgaatggtacaaggagaatggtatagaggtgctgtatgaggatccagttgtagcatttgatggcaaaacgcaaaccttaaagacttcatcggggaaagttctgaaatacggctcacttattatttctactggatgtgaagcatcgagattacctgagaaaattggagggaaattacctggagttcactacatacgggatgttgctgatgctgatgctctagtatcctcattgggaagtgcaaagaaggtggtggttattggtgggggctatattggcatggaggtagctgcagcagcttgtggctggaatcttgacacaactattatattcccagaggaccacattatgccaagattatttacaccctcgcttgctaagaagtatgaggaactgtatcagcaaaatggtgtcaaattcataaagggagctcttatcgaaaaacttggagctggctctgatggaagggtgtcttctgcagtacttaaggatggatctgtagttgaagctgatacagttatgctatttatttccttctaatggttcatgcagtagtactatacaactgaaattattacttttactgccagataaatttaaatatcatattcattttttgatccacttctctgtgagaaccaatgttcttcacttcttcatagatacaaaatcttcaaccttctgtagttacttatagactcaatttgatagatttgttcactcgatattcaatacaagggtagttgatatatttactcattgtctcattcacttaagcccataaagtaaaaaagaagacaaaaagtatttgatattcttgttgttttaacaagatgaaaggacaggcctgacgcagtggtgagaagccttttcactgagccaaaggtcctaggttcgatgcagcctctctgcattggcttgcctcggttataccttccttagaccccactcatgtgggagctgccaacactgggtttatcatgtcctcttgttttaacaagattaagtgcaggtaattgttggtataggagcaaaaccagttgtcagcccgtttgaagctgttggagttaaccctaaagttggtggaatagaggttgattccttgttcagaactagtgtacctggcatctttgcaattggagatgtagcagcgttccccctgaagatgtacaatagaattgctcgagtggaacatgtggatcatgctcggaagtctgcgcaccactgtgtagagacgctcctaacatcccagacaaaagcgtatgactaccttccatacttctactcgagggtttttgagtacgagggaagttcgaggaaagtctggtggcagttttatggcgacaatgtcggcgaagcagtcgaagtagggaactttgatccaaaggttgcgactttctggatcgactctgccggctgaagggtgttttcctcgagagtggaacctcagaggaattctcgcttcttccgcagctcgccaaatctcagcctgttgttgacaagtcaaagctccaggccgcgacttctgttgaagatgcattagagattgcaagaagctcactccggtccagtgccatggtttagctctcagaatctagtactttcttgaacccgaggctgtgcgctgctcgagcggttcatagcgtcgagaccacgtcagcaataacgcacaattacatagaatctattcccactggggttgtaacattcttcagtgcacctgcgtcggctatttccagcttgaaataaacctggttgccctttgaggggttgatgaggatgatagattgaagcctttatgctacttttttcttgatggtcttctgatcactcatgcattcatgtttactgctcgacatatagttcgtttaacagtccctcttttccgaagttactgtaagacgtgttttcccctatattcattatttttgctgtgtatctagacatagggctagtttgtaaactcaaatttccttcggattagagaggattgaagaagaaattagttttgaagggaatttgagttttcaaactagttcatagtatatatgtgagcg

SEQ ID NO: 13894 - DNA, 2734 bp, Zea Mays
ccgccttcttcctcagttcctcttctgtgtcttccccagtccccactccaccccgccgcagggctggaatggtctgtcgccttgtcgcgtccgtgatccgtcccttggcctctcgcagcggacagcggccctccgccccctccaaatagcagcgaaacccctcgcgtttaaactattccctgatccaacccctcctcaaactctgacgacgcctccttccgtgcccgtccgtcctctataagggcgccgccgaggagagagaacgatgacttcagctctccggcggaaggcggcgcagatggcttccgcggcgacacagtgcttcagctactcctcgttgccggccacgtgggctctgcggcagcggggcggcggtgccagcgtgctccggctctcttcccggcggaccttctcggtctccgcggcggccgggttcgacaaccagaaccgcgagtatgtgatcgtcgggggagggaacgctgcgggttacgccgccaggacgttcgtcgagcatggcatggctgacggccgcctttgcatcgtctccaaggagccagttccaccatacgagcggccagccttgaccaaaggctatctttttcctccggacaagaaaccggctcgcctacctggtttccatacatgcgttggatctggtggacagcgacagactgctgaatggtacaaggagaatggtatagaggtgctgtatgaggatccagttgtagcatttgatggcaaaacgcaaaccttaaagacttcatcggggaaagttctgaaatacggctcacttattatttctactggatgtgaagcatcgagattacctgagaaaattggagggaaattacctggagttcactacatacgggatgttgctgatgctgatgctctagtatcctcattgggaagtgcaaagaaggtggtggttattggtgggggctatattggcatggaggtagctgcagcagcttgtggctggaatcttgacacaactattatattcccagaggaccacattatgccaagattatttacaccctcgcttgctaagaagtatgaggaactgtatcagcaaaatggtgtcaaattcataaagggagctcttatcgaaaaacttggagctggctctgatggaagggtgtcttctgcagtacttaaggatggatctgtagttgaagctgatacagttatgctatttatttccttctaatggttcatgcagtagtactatacaactgaaattattacttttactgccagataaatttaaatatcatattcattttttgatccacttctctgtgagaaccaatgttcttcacttcttcatagatacaaaatcttcaaccttctgtagttacttatagactcaatttgatagatttgttcactcgatattcaatacaagggtagttgatatatttactcattgtctcattcacttaagcccataaagtaaaaaagaagacaaaaagtatttgatattcttgttgttttaacaagatgaaaggacaggcctgacgcagtggtgagaagccttttcactgagccaaaggtcctaggttcgatgcagcctctctgcattggcttgcctcggttataccttccttagaccccactcatgtgggagctgccaacactgggtttatcatgtcctcttgttttaacaagattaagtgcaggtaattgttggtataggagcaaaaccagttgtcagcccgtttgaagctgttggagttaaccctaaagttggtggaatagaggttgattccttgttcagaactagtgtacctggcatctttgcaattggagatgtagcagcgttccccctgaagatgtacaatagaattgctcgagtggaacatgtggatcatgctcggaagtctgcgcaccactgtgtagagacgctcctaacatcccagacaaaagcgtatgactaccttccatacttctactcgagggtttttgagtacgagggaagttcgaggaaagtctggtggcagttttatggcgacaatgtcggcgaagcagtcgaagtagggaactttgatccaaaggttgcgactttctggatcgactctgatagccggctgaagggtgttttcctcgagagtggaacctcagaggaattctcgcttcttccgcagctcgccaaatctcagcctgttgttgacaagtcaaagctccaggccgcgacttctgttgaagatgcattagagattgcaagaagctcactccggtccagtgccatggtttagctctcagaatctagtactttcttgaacccgaggctgtgcgctgctcgagcggttcatagcgtcgagaccacgtcagcaataacgcacaattacatagaatctattcccactggggttgtaacattcttcagtgcacctgcgtcggctatttccagcttgaaataaacctggttgccctttgaggggttgatgaggatgatagattgaagcctttatgctacttttttcttgatggtcttctgatcactcatgcattcatgtttactgctcgacatatagttcgtttaacagtccctcttttccgaagttactgtaagacgtgttttcccctatattcattatttttgctgtgtatctagacatagggctagtttgtaaactcaaatttccttcggattagagaggattgaagaagaaattagttttgaagggaatttgagttttcaaactagttcatagtatatatgtgagcg

SEQ ID NO: 13895 - DNA, 2819 bp, Zea Mays
agttcctcttctgtgtcttccccagtccccactccaccccgccgcagggctggaatggtctgtcgccttgtcgcgtccgtgatccgtcccttggcctctcgcagcggacagcggccctccgccccctccaaatagcagcgaaacccctcgcgtttaaactattccctgatccaacccctcctcaaactctgacgacgcctccttccgtgcccgtccgtcctctataagggcgccgccgaggagagagaacgatgacttcaggttcttcccccgatcttccccgctcagcttcgcttaattgcatttaagcccctttggcactcattgccgtcccctcggctccatttcttggaggtgaccgcagctctccggcggaaggcggcgcagatggcttccgcggcgacacagtgcttcagctactcctcgttgccggccacgtgggctctgcggcagcggggcggcggtgccagcgtgctccggctctcttcccggcggaccttctcggtctccgcggcggccgggttcgacaaccagaaccgcgagtatgtgatcgtcgggggagggaacgctgcgggttacgccgccaggacgttcgtcgagcatggcatggctgacggccgcctttgcatcgtctccaaggagttccaccatacgagcggccagccttgaccaaaggctatctttttcctccggacaagaaaccggctcgcctacctggtttccatacatgcgttggatctggtggacagcgacagactgctgaatggtacaaggagaatggtatagaggtgctgtatgaggatccagttgtagcatttgatggcaaaacgcaaaccttaaagacttcatcggggaaagttctgaaatacggctcacttattatttctactggatgtgaagcatcgagattacctgagaaaattggagggaaattacctggagttcactacatacgggatgttgctgatgctgatgctctagtatcctcattgggaagtgcaaagaaggtggtggttattggtgggggctatattggcatggaggtagctgcagcagcttgtggctggaatcttgacacaactattatattcccagaggaccacattatgccaagattatttacaccctcgcttgctaagaagtatgaggaactgtatcagcaaaatggtgtcaaattcataaagggagctcttatcgaaaaacttggagctggctctgatggaagggtgtcttctgcagtacttaaggatggatctgtagttgaagctgatacagttatgctatttatttccttctaatggttcatgcagtagtactatacaactgaaattattacttttactgccagataaatttaaatatcatattcattttttgatccacttctctgtgagaaccaatgttcttcacttcttcatagatacaaaatcttcaaccttctgtagttacttatagactcaatttgatagatttgttcactcgatattcaatacaagggtagttgatatatttactcattgtctcattcacttaagcccataaagtaaaaaagaagacaaaaagtatttgatattcttgttgttttaacaagatgaaaggacaggcctgacgcagtggtgagaagccttttcactgagccaaaggtcctaggttcgatgcagcctctctgcattggcttgcctcggttataccttccttagaccccactcatgtgggagctgccaacactgggtttatcatgtcctcttgttttaacaagattaagtgcaggtaattgttggtataggagcaaaaccagttgtcagcccgtttgaagctgttggagttaaccctaaagttggtggaatagaggttgattccttgttcagaactagtgtacctggcatctttgcaattggagatgtagcagcgttccccctgaagatgtacaatagaattgctcgagtggaacatgtggatcatgctcggaagtctgcgcaccactgtgtagagacgctcctaacatcccagacaaaagcgtatgactaccttccatacttctactcgagggtttttgagtacgagggaagttcgaggaaagtctggtggcagttttatggcgacaatgtcggcgaagcagtcgaagtagggaactttgatccaaaggttgcgactttctggatcgactctgatagccggctgaagggtgttttcctcgagagtggaacctcagaggaattctcgcttcttccgcagctcgccaaatctcagcctgttgttgacaagtcaaagctccaggccgcgacttctgttgaagatgcattagagattgcaagaagctcactccggtccagtgccatggtttagctctcagaatctagtactttcttgaacccgaggctgtgcgctgctcgagcggttcatagcgtcgagaccacgtcagcaataacgcacaattacatagaatctattcccactggggttgtaacattcttcagtgcacctgcgtcggctatttccagcttgaaataaacctggttgccctttgaggggttgatgaggatgatagattgaagcctttatgctacttttttcttgatggtcttctgatcactcatgcattcatgtttactgctcgacatatagttcgtttaacagtccctcttttccgaagttactgtaagacgtgttttcccctatattcattatttttgctgtgtatctagacatagggctagtttgtaaactcaaatttccttcggattagagaggattgaagaagaaattagttttgaagggaatttgagttttcaaactagttcatagtatatatgtgagcg

SEQ ID NO: 13896 - DNA, 2199 bp, Zea Mays
agttcctcttctgtgtcttccccagtccccactccaccccgccgcagggctggaatggtctgtcgccttgtcgcgtccgtgatccgtcccttggcctctcgcagcggacagcggccctccgccccctccaaatagcagcgaaacccctcgcgtttaaactattccctgatccaacccctcctcaaactctgacgacgcctccttccgtgcccgtccgtcctctataagggcgccgccgaggagagagaacgatgacttcagctctccggcggaaggcggcgcagatggcttccgcggcgacacagtgcttcagctactcctcgttgccggccacgtgggctctgcggcagcggggcggcggtgccagcgtgctccggctctcttcccggcggaccttctcggtctccgcggcggccgggttcgacaaccagaaccgcgagtatgtgatcgtcgggggagggaacgctgcgggttacgccgccaggacgttcgtcgagcatggcatggctgacggccgcctttgcatcgtctccaaggagccagttccaccatacgagcggccagccttgaccaaaggctatctttttcctccggacaagaaaccggctcgcctacctggtttccatacatgcgttggatctggtggacagcgacagactgctgaatggtacaaggagaatggtatagaggtgctgtatgaggatccagttgtagcatttgatggcaaaacgcaaaccttaaagacttcatcggggaaagttctgaaatacggctcacttattatttctactggatgtgaagcatcgagattacctgagaaaattggagggaaattacctggagttcactacatacgggatgttgctgatgctgatgctctagtatcctcattgggaagtgcaaagaaggtggtggttattggtgggggctatattggcatggaggtagctgcagcagcttgtggctggaatcttgacacaactattatattcccagaggaccacattatgccaagattatttacaccctcgcttgctaagaagtatgaggaactgtatcagcaaaatggtgtcaaattcataaagggagctcttatcgaaaaacttggagctggctctgatggaagggtgtcttctgcagtacttaaggatggatctgtagttgaagctgatacagtaattgttggtataggagcaaaaccagttgtcagcccgtttgaagctgttggagttaaccctaaagttggtggaatagaggttgattccttgttcagaactagtgtacctggcatctttgcaattggagatgtagcagcgttccccctgaagatgtacaatagaattgctcgagtggaacatgtggatcatgctcggaagtctgcgcaccactgtgtagagacgctcctaacatcccagacaaaagcgtatgactaccttccatacttctactcgagggtttttgagtacgagggaagttcgaggaaagtctggtggcagttttatggcgacaatgtcggcgaagcagtcgaagtagggaactttgatccaaagatagccggctgaagggtgttttcctcgagagtggaacctcagaggaattctcgcttcttccgcagctcgccaaatctcagcctgttgttgacaagtcaaagctccaggccgcgacttctgttgaagatgcattagagattgcaagaagctcactccggtccagtgccatggtttagctctcagaatctagtactttcttgaacccgaggctgtgcgctgctcgagcggttcatagcgtcgagaccacgtcagcaataacgcacaattacatagaatctattcccactggggttgtaacattcttcagtgcacctgcgtcggctatttccagcttgaaataaacctggttgccctttgaggggttgatgaggatgatagattgaagcctttatgctacttttttcttgatggtcttctgatcactcatgcattcatgtttactgctcgacatatagttcgtttaacagtccctcttttccgaagttactgtaagacgtgttttcccctatattcattatttttgctgtgtatctagacatagggctagtttgtaaactcaaatttccttcggattagagaggattgaagaagaaattagttttgaagggaatttgagttttcaaactagttcatagtatatatgtgagcg

SEQ ID NO: 13897 - DNA, 3346 bp, Zea Mays
ggagtacatgcttctcctttcccttcacttcatacccttcaggctgagaaacatacatacacttcttccagttcaccattctgaaaataacattgacaaagaaaatagaaaaggttgattgggagttgggactggccgtctgcccttgttgcaatggaacagcgatcttttggtcaatcaaacctgagccattgtttacaaaacataaataacatcatatctgctagggcaaattgatgtgaagataagacgcttcttaatttacaaaacataaatgacatcacatctaatattaatttggaaataagacgcctcttaatttagagccacacccttctgaggacccgtccagttccctgcaacctacgttccactgaaaacagcatctttaaaagcatgttgaaaatccaaaccaaatttctccaggccgctaaaagaaggaacttgtcaaaaagagctatcacgttcgttccaagaagctagaattttcgcaattgcattgctaggtagtctggcttctgcctccccaattgagtgttaagtacaaactccatccgagttgctgcacataaacatttgccggcacctactctactattgccatttttcccaccatggccgtgttcgacatgaagtccgctcccttgatgatcctagaactcctcttagttagccttggccttaccattgcgcccttcagcgccgaagaaaacaacgaccactggttcgtctactctggcttcgccaatgctagcctcaccctagacaacacagcctcgatcacaccaagcgggttgctggagctgaccaatggcacggtcatgagcatgggccatgccttctacccgactccactgcgcctccgtgactcgcccaacagcacggtgcagtccttctctgcctccttcgtgttcggcatcatctccatctacgacgacttgagcagccacggcctcgctatgttgattgcaccgagcaggacactttccgcgcttccagtgcaatacctgggcctcctaagtggctccaacgatggcaacaagagcaaccatatcttcgccgttgagcttgacacctaccagaacagtgagtttaaggacatcaacaacaaccacatcggcatcgacatcaacagcatgacctccgtgcagtccaacccggctggtttcttccatgatcaagatggaaccttcgaaaacctgacactcagtagcaaagaggcgatgcgggtgtgggtggagtacgatcgagagaatacacagattgacgtcaccatggctcctctggccatagtcaaacctaagagaccaacagtgtccactatccaaaacctctcagacgtgctcaccgacgtggcatacgtcggtttctcatcgtcaacgggcaagatccatacgcaacactatgttctcggctggagcttcgccatgaacggccctgctccgtccatcgacctgagcatgcttccaaagcttccacggcatcatcacaagagtcgacgatcctgggtgttagagacagttctgcccatagcaactgcagcattgctcttgtctcttggtgtcgttgctttcttgcttgtgcggaggcatgtcaggtacgcggagatacgggaagactgggaattggagttcggcccgcaccgattctcatacaaggacctgttccatgcgacgggtggatttgagaacaagaatcttcttggcattggaggatttgggagagtgtacaaaggggagctcccgagatcgagattgaagatagccgtgaagagggtatcgcatgactccaagcaagggatgaaggagtttatcgcggagatcgtcagcataggacgtcttcagaaccgcaatctcgtccagttgcttggctactgtcgtcgcaaaggtgagctcctactggtatatgagtacatgcccaatggaagcttggataaatacctgcataatgcaaaagagggcaactctgcgttgagttgggctcaaaggtttcggatcatcaagggaatcgcatccggcctactgtatctccatgaggagtgggagaaggtagttgttcacagagacatcaagggaagcaatgtgctcctcgacagcgagatgaatggacggttaggcgatttcggccttgcaaggttgtatgatcacggtgtcgacccacagaccacacatgtggttggcaccataggttaccttgctccgaagctcgcacgcggcggaaatgccactccccttacagatgttttctcctttggtatgtttgtccttgaggtcacctgtggacagaggcctgtcagacacgaaaatgtgcaagatagccaactcatgctggttgattgggtgctcgacaaggtgcgagaaggatcattcggtgctaccatggatgctaggcttgaagggaagtatgatatcggtgaggcatacttggcgttgaaaatagggctgttgtgttcacacccattcgccagtgaaaggcctaccatgcggcaagtcatacaatacttggatggggagattgaggctccagatttaagcttcgaggtgctagcctctatgcaaagtgaagggatcgatccatacctcatttcatatcccttgtcaacagaatgcttcagcacaacgtcaaacgtcgtctctggaggaagatgaaaatgtgttgtcatgaatggatacaaatatgtttattgcataccctaagtaacttatttgcaggttctttttaggagaacacactgactaaggttttggagtcaacttcaaagtaaagatgaaaacaaggatctaataataaaaggctgcagaaggatggagtcagttgggatgcacatcttcgcgcactatggctggagattcataaacagattgtcattataattttgtttttctgtgttttcgtgagtgcctatactatgtgtcggaggtttgtccatccttggtgttgtagtccctgtgactactgtttttgtaagcgttggccctagcctctcgttttgacttttgaggttaaagccggacatttccattatctaaaaaaagaaattaaatgtgcattgtatatatagaggaagcctacataactcgaggatattgttattaatttgcctgtaaaatagtgtgcttctttttctgtttgcatccagatatcttgtgttttttgttcaattacttcgtgcagcacccttgttttgcattagaacctccaatcaaataattgacggtactcactgatgtcaaaattcactagctttcactgtaagataactactattcataagtagtcagttatatatgtttgtttttttacaactattcatatgtgcatccatgagaatcataaggccagatgg

SEQ ID NO: 13898 - DNA, 4129 bp, Zea Mays
agctaggttctggctcttgcttaagcttagtatttaaaaaatttagatcacattgcatatataagaaattatatgcacgtaggattagatcctatttctacagaacaaaattttatgtataatcgcagcttcaggcctttaatcagaagcctgagatatgagttaacaagtattccctccaacctaggtaatcacttcaagtggccgtcagataggtatacatcaaagctttattacacatttaacaagctttgttttcagcctccatctttaaatgcaatgttgtaagctattcttgtccacaacctgttaaaggactacaaaaagttgattggaatcctctacccttgttgcaatggaacagcgatctttactagcccgtgtctcacgggacacatttgtttcttttgttaagctctaaccagtccacattctggatgaaagcagaaatgtatgctaacaatgcttgactcaaaaatttagccttcttgtgcaaacaatggaagctttctttctggatcttagtttgggttcatagtttatgtacaagcattaaagcttcccttatagaaaaaaagttttatatacaagcatgaaagatgctacttgtacaatacggagcctcctattcatgacaaaaagttgatatgatgatatgatggttcagctgaatgatttttagctgacattgtcttactacatttcatgttcagttattctggaatcctaaatactcccttcattccaaattgtaagatgttttgtcttttctagttacatagcttttgctatacacttggatatgcattgtatctaaaagaacgtcttacaatttagaacagatggagtacttgttaggctgttacttaaaatcaattctaagatgtggtagcaaataaacctaacagtataagtgtctatatcacctattaaaatttagacaataacagatgttgaaaatccagaaactagacttggtatgaagcagcaagttaaaatctaatataaactgaaccactgagtgcaagcggaaaccagatagcattggttgcccacataacacttactgcttgctatccttgttgatttgcagcttgcaagacacacacatgcttgtaatggcaatgaagcatacgtccttccttccgtacctgctcctcctcacaaccttggcatcctgcgatgatcaatttctgttatctggcttcacccaatccagcttaaaccttgatggttctgccatcgtcacaaatgatggcctccttgatctgaccaatagcactgcaattaccaacggtcacgcattctaccccagccctttgcacttccgcaaatcacctgatggtaaagttgaatccttctcagtcaatgttgttttcagcatcttcatcacatacccagacttgagtgctgacggcatggccttcttcatcgcacctaccaagaatttctctgatgcacgggcaggcaagtactttggcttgctcaacgaaaacaacaatggaaacacaagaaaccacatcttcatggtcgagcttgatacctacaaaaatgctgaggtacaagatatcaacgacaaccacgttggaatcaacatcaacggtgtattctccttcaaatccaatacatctggcttctatgaagatagtggtgccttccgggagctgacactgaatggaaacaagggaacacaactgtggatcgactatgacaagagtactatgcagatcaatgtgaccctggctccgatcaacgtgcacaaaccatccaggccactgctgtctacaacctatgatctctcaactgtaatctccacctcaacttcatacattggattcgcatccggagcttctcccgtgaactcccgtcattatgtgatgggctggagctttggcatgaataaaccagccccaccccttgacgtctccaagcttcccaagttgcctttccatggccccaaggcccagtccaagctcttggcaattgtcctgccgatagccactgcaacgttgatcctctccataggcactattgtcactctggttgtccgaaggcggctgaagtatgctgaggtgcgtgaggattgggagggtgagtttggtccacatcggttttcatacaaggatttgtaccatgctacaggggggtttaagaataagcacctgcttggagaaggagggtttgggaaagtatacaaaggagtccttccattatctaatgtagaggttgctgtgaagaggatgtctcatgagtcaagacaaggaatgaaagagtttgtcactgaggttgttagcatcggtcgactccgccatcgcaaccttgtccagctacttggctactgcaggagaaaaggtgagctgtttttggtttataactacatgcccaatggtagccttgataaatatctatactgtgaagagcacggtgctattttgaactgggaacagaggtttcgagtcatcagaaacatcgctaccgtcttgctgtatctccatgagaagtgggagaagatagtgatccacagagacatcaaggcaagcaacgtactcctagatggtgaaatgaacggccgcctcggcgacttcggccttgcaaggttgtatgatcacggcactgacccacaaacaacacatatggttggaacaaagggatacctagcacccgagcttctgcgcacagggaaggcgtcccctcatacagatgtctttgccttcggcatgttccttcttgaggttgcgtgtgggcaaagacctgtcaagaaaaatgcagaggggactgaatttttcttggtcgattgggtgctcgagcactggaataatggtgttattacaaagacactggattcaaggcttcagggtgactacaacattgatgaggcccatcttgtgttgaagctaggactcttgtgctcgcacccacttcctagttcaaggcctaggatgcgacaagttatgcaatacctcgatggcgatacgccactacccgagctaaggccaacgcaactgagctcgaacatggttgccttgatgaaaaacagtggactcaactcatctgtcgtgtcatatccgcaaatatcgacgagcttctgcacaatatctagcctctcgggaggaagatgatatctgccatttttccgtacttcattacttagctgtttagtatgtgacgcgtttaattttattgtataagtctttgtatttttaggtgcccacgggttgtatgtttgtctgtttagtgcggggatttatgtctgtttgtcttttgaattctttaggtgttggcagtagtttctttttaacggaacatttttcttcgttgttttcgtcacaaggacttgtccacaagcagcaacatgttcaataccctaacacgatagtgaatttagtgatgctaaaacacgacataactgaataaataaatccgcataaaaagaatgcataacgagatttcttcatctaacagaagttcaccagaagactcgcacggatctgacgccgagaatgaaatctaacagatataaaaagaaatccacaagggagaatggtttctccttgtgtgtgtgtgtgtttgtgtcagttttgtcagaatttgtggcaaattgctcttcaaatcgtgccgcagagagcactgacatacacgcacagtttcatatagtatttgttttggggcgaaaatgaagcgatgtatggttcggtaatatattcatctagataagctccgaacaagcactaatcgcaatttgcggacaagcttcagaaatcacgattacctcgtactactgtagtgccgtctccgtggcagcccggcggatacctacgccgagcacaggataaggcgcagccccctgccccttgccccccgcccgctgcaatctggccttcggcggaggaatcaggaggccgtagccgaggagacgatgtcacgaccctggtattcctgctactgctacttatgctgttaatgtttagtctttgattaagtcagtcggagaagaagaggattagagagggattactgttgaccatcagggttctaagtcttgtaatagatccagaccattaggctcatattagagtctataaatatttataatcacatctggaagagactatgaaatggaataaagaac

SEQ ID NO: 13899 - DNA, 1485 bp, Zea Mays
attcgtttttgattggcgtcgcagcaaccacctgtcaagtgtcaacactccagtccactacaatcatcgctgtaggagatggaggcggcggcggcggcggtgaggtatgggatagtcggggtggggatgatgggccgggagcacctccacaacctcgcccacctcgccacagaggtcgagcgggagcagtccgtccgggtgcgggtcaccggcctcgccgacccccaccaggagtcactccgccttggcctccagctcgccgctgagctcggcctcccgcctccccaggtcaccgcgagctgctggacagcgggctctgtgacgccatcatcgtatcgtccccaaacatgacccactacgagatactcatggacatcatccgccatcgtgaaccgcagcacatccttgtcgagaagcccctgtgcaccactgtgcaggactgcaagaaggtcattgaagctgctaaacagagaccagagatagttgtgcaagttggattagaatacaggtaaacaactggaatagattcaattgtaacagtgggggaactctagtagagaagtgctgccacttctttgatctgatgatattgtttgcggctgcaaatccagttcgtgtgatggcttcaggagccattgatgttaaccataagaatgaagtgtatgatggacaggtaccagatattattgataatgcatatgtgatagtagaatttgataatggctcccgtggcatgcttgatctctgcatgtttgctgaaggaagtagaaacgagcaagaaatttgtgtggttggtgacattgggaagggcgaaacttttgttccagagagcattgtcaggtttggaaagagaacagaaggcagagatggagttgtaacaataatggcggaagatgaacggatcaagtatcaaggtcttcatcatggatccagctacttggagcacctcaatttcttgtctgctataagggctcaaggtgcatccggaccatctgtgaacttgagtgacggcctactatctgttgccgtcggtgtggctgggcaattatcaatcgagcagggccggtttgtaaccatggaagaggtcttaggtttgtagcctggtgataattcaggcatcctaatgtactgtaaaaccttttgtgtattattaggtatatgttcttaataatgctgcggactgacgagtttatgcaaagttaggataacattataacatgcatttcaaatagaggaatatgatgataatcttcaagcaaatgtcatggagtagcagggttatgttatctgcaagtgatatcttggacctcttggttgtgattaatggaccaatatctagaacatgtcatattatttcttgatttttctcttagttttttttgagaattttaatggcgtatcaacaatatcactatattatattttcctataaggattttggaggattgaagctattgattgatctcaagactggaccgaatcaag

SEQ ID NO: 13900 - DNA, 1498 bp, Zea Mays
attcgtttttgattggcgtcgcagcaaccacctgtcaagtgtcaacactccagtccactacaatcatcgctgtaggagatggaggcggcggcggcggcggtgaggtatgggatagtcggggtggggatgatgggccgggagcacctccacaacctcgcccacctcgccacagaggtcgagcgggagcagtccgtccgggtgcgggtcaccggcctcgccgacccccaccaggagtcactccgccttggcctccagctcgccgctgagctcggcctcccgcctccccaggtcaccgcgagctgctggacagcgggctctgtgacgccatcatcgtatcgtccccaaacatgacccactacgagatactcatggacatcatccgccatcgtgaaccgcagcacatccttgtcgagaagcccctgtgcaccactgtgcaggactgcaagaaggtcattgaagctgctaaacagagaccagagatagttgtgcaagttggattagaatacaggtacaacttgcaggtaaacaactggaatagattcaattgtaacagtgggggaactctagtagagaagtgctgccacttctttgatctgatgatattgtttgcggctgcaaatccagttcgtgtgatggcttcaggagccattgatgttaaccataagaatgaagtgtatgatggacaggtaccagatattattgataatgcatatgtgatagtagaatttgataatggctcccgtggcatgcttgatctctgcatgtttgctgaaggaagtagaaacgagcaagaaatttgtgtggttggtgacattgggaagggcgaaacttttgttccagagagcattgtcaggtttggaaagagaacagaaggcagagatggagttgtaacaataatggcggaagatgaacggatcaagtatcaaggtcttcatcatggatccagctacttggagcacctcaatttcttgtctgctataagggctcaaggtgcatccggaccatctgtgaacttgagtgacggcctactatctgttgccgtcggtgtggctgggcaattatcaatcgagcagggccggtttgtaaccatggaagaggtcttaggtttgtagcctggtgataattcaggcatcctaatgtactgtaaaaccttttgtgtattattaggtatatgttcttaataatgctgcggactgacgagtttatgcaaagttaggataacattataacatgcatttcaaatagaggaatatgatgataatcttcaagcaaatgtcatggagtagcagggttatgttatctgcaagtgatatcttggacctcttggttgtgattaatggaccaatatctagaacatgtcatattatttcttgatttttctcttagttttttttgagaattttaatggcgtatcaacaatatcactatattatattttcctataaggattttggaggattgaagctattgattgatctcaagactggaccgaatcaag

SEQ ID NO: 13901 - DNA, 1609 bp, Zea Mays
attcgtttttgattggcgtcgcagcaaccacctgtcaagtgtcaacactccagtccactacaatcatcgctgtaggagatggaggcggcggcggcggcggtgaggtatgggatagtcggggtggggatgatgggccgggagcacctccacaacctcgcccacctcgccacagaggtcgagcgggagcagtccgtccgggtgcgggtcaccggcctcgccgacccccaccaggagtcactccgccttggcctccagctcgccgctgagctcggcctcccgcctccccaggtttcaagatctttccaggtcaccgcgagctgctggacagcgggctctgtgacgccatcatcgtatcgtccccaaacatgacccactacgagatactcatggacatcatccgccatcgtgaaccgcagcacatccttgtcgagaagcccctgtgcaccactgtgcaggactgcaagaaggtcattgaagctgctaaacagagaccagagatagttgtgcaagttggattagaatacaggtatatgccacccgttgctaagctgatagacatcgttaagagcggtacactaggacaagtcagaatggtggcaatacgcgaacaccgttttcctttccttgttaaggtaaacaactggaatagattcaattgtaacagtgggggaactctagtagagaagtgctgccacttctttgatctgatgatattgtttgcggctgcaaatccagttcgtgtgatggcttcaggagccattgatgttaaccataagaatgaagtgtatgatggacaggtaccagatattattgataatgcatatgtgatagtagaatttgataatggctcccgtggcatgcttgatctctgcatgtttgctgaaggaagtagaaacgagcaagaaatttgtgtggttggtgacattgggaagggcgaaacttttgttccagagagcattgtcaggtttggaaagagaacagaaggcagagatggagttgtaacaataatggcggaagatgaacggatcaagtatcaaggtcttcatcatggatccagctacttggagcacctcaatttcttgtctgctataagggctcaaggtgcatccggaccatctgtgaacttgagtgacggcctactatctgttgccgtcggtgtggctgggcaattatcaatcgagcagggccggtttgtaaccatggaagaggtcttaggtttgtagcctggtgataattcaggcatcctaatgtactgtaaaaccttttgtgtattattaggtatatgttcttaataatgctgcggactgacgagtttatgcaaagttaggataacattataacatgcatttcaaatagaggaatatgatgataatcttcaagcaaatgtcatggagtagcagggttatgttatctgcaagtgatatcttggacctcttggttgtgattaatggaccaatatctagaacatgtcatattatttcttgatttttctcttagttttttttgagaattttaatggcgtatcaacaatatcactatattatattttcctataaggattttggaggattgaagctattgattgatctcaagactggaccgaatcaag

SEQ ID NO: 13902 - DNA, 1614 bp, Zea Mays
attcgtttttgattggcgtcgcagcaaccacctgtcaagtgtcaacactccagtccactacaatcatcgctgtaggagatggaggcggcggcggcggcggtgaggtatgggatagtcggggtggggatgatgggccgggagcacctccacaacctcgcccacctcgccacagaggtcgagcgggagcagtccgtccgggtgcgggtcaccggcctcgccgacccccaccaggagtcactccgccttggcctccagctcgccgctgagctcggcctcccgcctccccagatctttccaggtcaccgcgagctgctggacagcgggctctgtgacgccatcatcgtatcgtccccaaacatgacccactacgagatactcatggacatcatccgccatcgtgaaccgcagcacatccttgtcgagaagcccctgtgcaccactgtgcaggactgcaagaaggtcattgaagctgctaaacagagaccagagatagttgtgcaagttggattagaatacaggtatatgccacccgttgctaagctgatagacatcgttaagagcggtacactaggacaagtcagaatggtggcaatacgcgaacaccgttttcctttccttgttaaggtacaacttgcaggtaaacaactggaatagattcaattgtaacagtgggggaactctagtagagaagtgctgccacttctttgatctgatgatattgtttgcggctgcaaatccagttcgtgtgatggcttcaggagccattgatgttaaccataagaatgaagtgtatgatggacaggtaccagatattattgataatgcatatgtgatagtagaatttgataatggctcccgtggcatgcttgatctctgcatgtttgctgaaggaagtagaaacgagcaagaaatttgtgtggttggtgacattgggaagggcgaaacttttgttccagagagcattgtcaggtttggaaagagaacagaaggcagagatggagttgtaacaataatggcggaagatgaacggatcaagtatcaaggtcttcatcatggatccagctacttggagcacctcaatttcttgtctgctataagggctcaaggtgcatccggaccatctgtgaacttgagtgacggcctactatctgttgccgtcggtgtggctgggcaattatcaatcgagcagggccggtttgtaaccatggaagaggtcttaggtttgtagcctggtgataattcaggcatcctaatgtactgtaaaaccttttgtgtattattaggtatatgttcttaataatgctgcggactgacgagtttatgcaaagttaggataacattataacatgcatttcaaatagaggaatatgatgataatcttcaagcaaatgtcatggagtagcagggttatgttatctgcaagtgatatcttggacctcttggttgtgattaatggaccaatatctagaacatgtcatattatttcttgatttttctcttagttttttttgagaattttaatggcgtatcaacaatatcactatattatattttcctataaggattttggaggattgaagctattgattgatctcaagactggaccgaatcaag

SEQ ID NO: 13903 - DNA, 1187 bp, Zea Mays
catttataaagttccactagaatgagaaaacccgctatcgtttcaggcaaaaggaagtataggaattcctcatctggaaagccatcacaacataatcagccgagaacctctctatacttgcagtgattcactctccgcttgcccctttcgggtaaggttatccctcactagctttcataattaatcagccaagggcgttccattccacccttgtggtagcacaattgtctcaggtggttgctccattttccaattaacaaaatgatcttatcatgcataataataaagccaacaatagtaataaggtatgatcataaaggtgttcgtttaggtctgagaagaaatggactcattttgaataggcccggtttggactttttttattccaccactgttcgacattaatcttggtctagtgccctccatatccaatctgtaatgctggcggcggaggaggcgaagagacgacactgccaggtgacagcgtggcggcgcgaagcagcgacgacggccaccctctccgctgccttctcactacaaacagtagaccaaaccgtggatcagtgtagtagtagcagtagtagtatatcacaatgcaagagtggttgatgcacgcgtgtgcttggagcgagaggcgtcgggaactccaacttctccaaaactgttggcctatctgcgttgtggcatcaggacatgtcaagacgctctcaagtacgcgcagcagtgaatccatagccaatggtgcttgcttgattagtggagcgcggcctggatgtagccgctcggcctactcctcctgcagaacctctgatccagcaacggcaaagcttgtcctatggagcctcgatagagcatggtggggagtaatctcgacacgcgcgagtggcagctgccggcctgctagcctacagaacttataatcagttacggatgctttaacatggatggacaataatcgtcagtggtgcgagcatccagattacctgatgcatatttttgactagtcttcattggccacatgctttgcttctctatcctgaactccattgtacctgatattcagaacctgtttcgtgcttgtatgagttgtggtccttgactgttgtattgatttgggttccattagatgattgctagcatgcattattgactttaaatgccgagcgtgaaatgtgaatggtggggca

SEQ ID NO: 13904 - DNA, 969 bp, Zea Mays
cacaattgtctcaggtggttgctccattttccaattaacaaaatgatcttatcatgcataataataaagccaacaatagtaataaggtatgatcataaaggtgttcgtttaggtctgagaagaaatggactcattttgaataggcccggtttggactttttttattccaccactgttcgacattaatcttggtctagtgccctccatatccaatctgtaatgctggcggcggaggaggcgaagagacgacactgccaggtgacagcgtggcggcgcgaagcagcgacgacggccaccctctccgctgccttctcactagcaaacagtagaccaaaccgtggatcagtgtagtagtagcagtagtagtatatcacaatgcaagagtggttgatgcacgcgtgtgcttggagcgagaggcgtcgggaactccaacttctccaaaactgttggcctatctgcgttgtggcatcaggacatgtcaagacgctctcaagtacgcgcagcagtgaatccatagccaatggtgcttgcttgattagtggagcgcggcctggatgtagccgctcggcctactcctcctgcagaacctctgatccagcaacggcaaagcttgtcctatggagcctcgatagagcatggtggggagtaatctcgacacgcgcgagtggcagctgccggcctgctagcctacagaacttataatcagttacggatgctttaacatggatggacaataatcgtcagtggtgcgagcatccagattacctgatgcatatttttgactagtcttcattggccacatgctttgcttctctatcctgaactccattgtacctgatattcagaacctgtttcgtgcttgtatgagttgtggtccttgactgttgtattgatttgggttccattagatgattgctagcatgcattattgactttaaatgccgagcgtgaaatgtgaatggtggggca

SEQ ID NO: 13905 - DNA, 1107 bp, Zea Mays
aaaccttctaccctcaaatgcggagaggctgctctgaacccgtgacctggtgactcggtatctatggcccaaaaggcgttactgttcctgatccggttcaatcagtttgcacgagatggggcagtgatcctttttgctcaggttcatactcgcacatcagagttgggtcttccggtgctgactatgacattctttccgagagtgtgaatgaccgactcttcttcgctggagaagccacgaaccgcgcgtaccctgcaaccatgcacggggccctattgagcgggttaagagaagcttccaaaatctatcgtgcctcagatagcttagtgaattatgaccagaagaagaattcactgccaaagagcctcaaaccaccagatggtgcccttctagatctcttcttggagccggacctagcattcgggagattctcgttcgtgttctcctcactgacacccgatgatccagcggctccagggttacttcgggtttcgctcgacaagcgtttccttctgcagcccaattataattcagagctaaagggcgaccaaaaggatcacagccacagccacgcatctggggccttccatctgtacgccgctgtctctcgggagcaggcagatcggctacgaaggtcaagcgaagatgacagaactaggttaggagtattatgcaaggatcgtactgtaaagctaatgggttacgatagtacttgcgacgtaggtagcgatctgatctcgagcatcttgggtgcgcggaaagccaggaaactgctgcagcacccaaagaactccaagatcccgcgttgatgtgtacccggttcctctctttttttcttctttgtagaacagaatgcattcttttgttatgtacacaaggtacgaagggccggccgccggctggtggagctcagattttgctgtggcgtgtacaggctacgaactgtgacgcttcggcaggaacgtaactgagatcctccatgttctggtcctcacttgtaaaaattgccgttcatgtgacttcagacttcagttgattagatattgttctgtggatttaactgcaggcaccattgtgatcttgctctatctatctttcgcctgagta

SEQ ID NO: 13906 - DNA, 942 bp, Zea Mays
ctcgaaaaatcgtcatcatcctgccctgccttttaaagcgcgcacggacacgggacactccgtctctctgaccttatccccttgcggcaaaaccttgcgcgcaacaatggccgcctccctcccgaccaccgccgcgcgcctcgcggccccggccttcgcctacatcgacgtgaagaacaaggactacggaggtgacaagtacgtgaacggcgagataatcccctgcacgtacccgacgtaccagccgaaggagcggaggacgtccaagtacgagagcaggcggtacgagaggcggagagatgggccaccggcggccagcaggaaaccgaggcagcaggcaccagctcagactcagaccgagtccgcgtcttcgtgacgaggcattttgtccacgtacctacctacctagaagtagaacaagagaggaggacgcctaaaattctgtcgccttgggcaccgcgtactggactggacaggcgggtcgggatccatcatccatcgtcagccagaaaaattgtcgctgtccaagcagcctgggcagcttgtgtgtgtgtgtgctgataagcctgatatcttgagctagctgtggcagaaactgaaaaccctactcttccccccgactccttagtgagctgtgtgatgccgactggtgtagagctgtatcgctgattgcgtgaaaccgaaatgctgtggctttatttagactgaagttggcacttcgagccatcggatcactccaagcactttgttcgttcatcgcgtatttggctgtgctaggctcgtttcatgtctaatgttattttttttaatttaaccaactaaccttggttatgttgtaaaacgttatggtgtaacagagttagccggtaactaaacatactcagtccacttcagtggcggaagacaaaataataatttggtatagctaaaacaagaaaaaaa

SEQ ID NO: 13907 - DNA, 842 bp, Zea Mays
aataaagcatcctcacctgactaaagtctgcctggggtgctgtgggtgctccctgattcctacatcgacgtgaagaacaaggactacggaggtgacaagtacgtgaacggcgagataatcccctgcacgtacccgacgtaccagccgaaggagcggaggacgtccaagtacgagagcaggcggtacgagaggcggagagatgggccaccggcggccagcaggaaaccgaggcagcaggcaccagctcagactcagaccgagtccgcgtcttcgtgacgaggcattttgtccacgtacctacctacctagaagtagaacaagagaggaggacgcctaaaattctgtcgccttgggcaccgcgtactggactggacaggcgggtcgggatccatcatccatcgtcagccagaaaaattgtcgctgtccaagcagcctgggcagcttgtgtgtgtgtgtgctgataagcctgatatcttgagctagctgtggcagaaactgaaaaccctactcttccccccgactccttagtgagctgtgtgatgccgactggtgtagagctgtatcgctgattgcgtgaaaccgaaatgctgtggctttatttagactgaagttggcacttcgagccatcggatcactccaagcactttgttcgttcatcgcgtatttggctgtgctaggctcgtttcatgtctaatgttattttttttaatttaaccaactaaccttggttatgttgtaaaacgttatggtgtaacagagttagccggtaactaaacatactcagtccacttcagtggcggaagacaaaataataatttggtatagctaaaacaagaaaaaaa

SEQ ID NO: 13908 - DNA, 791 bp, Zea Mays
aaccctaccaccaccacggagtggtaaaatggtcatttaactcggagccccagaaagatcttaaaccctagaaagctcttaaaagcccccagggctagcagcggcgacgtatccctaatcccacctccagtctttgggcaccaaatttccggcggcgatggcggcggctgtggcgaggcttaagcaagcgtaccacaagtgaaggacttagagaagcctttgcggagtttggtgaagttttgcatgctcgagttgtgaccgatcgtgtcagtgggttttctaagggatttggctttgtaaggtatgctacgaccgaagaggcagccaagggaatagaaggaaaggatggaaagttccttgatggatgggttatttttgcggaatacgctaaacccagaccaccgccggaggaaacagggatgaattcgcagccccagcagtcatggggagctccatcaggttcctggggtgcacagtagatgaagtgatattgtgagagcccctccctgtcccagccctggggctcgtagcggatcgtgagggatgaatttgtgtgtggtgtgtcgcaggtgtgaatgcctttgttgtccaaatattcctacgtgttggggtggtcgcttgctcgcgtccacgtctttcacatgaattggttactgtggtagttgtagttctggatacggtaccaaaacaaaagtattgctgtcaacaatctgcaacagccgggaaaacagtcgaaaacctttgcaaataatgcctgctgccgtggaaaatgtcgtctcctctgcttgtgg

SEQ ID NO: 13909 - DNA, 3799 bp, Zea Mays
cgggcccttctccttcctcgctgtcggcccgcccagatgatgcgcacagccaccccgatgacacatggcacacggcggggcccagatgatgctcagtctctctactgatatactcctcaccttgctcccccattcctctgtctctgtgtgtgtaactaactgtatatgcagccactctctcctgtcatcctgtgtcctcgtcctttccacccaaaatccccgatcctcgaatcgattaaaccctaagcggcatggcgggtagcgactactgccggccggcagtgcgcccgcgcgacttctgagccaccggaagccgcccttgtcccggctccactgtcgcgtgccccatccaacactgggggagtgggagttcagagccgcaaacgctcagggcaaccgggaggacgggaaggtgtggccgcaaccgcaagacgcaggcaagaggcaatcaactcaccgatgtctcagtcaccgggaggacgggaaggcatatattacagcaggcagaggaaaccttcggaacgcaacggcagtgtatttacacccatagctgcaatgtatcccagcggtcacgcacttcctgatgcaaacaggaaccacagtttggtatttggcggtacgagcaaggactgggacaacatccgtcagttcattgctagtctggaacgcgcctctgaaaactcctctgcgatagccagcaaaaccggaggtggcaaatcgaccaaccattccgtggagccagccgaacaaaaaggaaagggtgacataatagttctcgattcagatgatgaggatggagatggaaacagtccagaacacaataagttggcatctgagatgaacaaagaactcggaacatctgtattggctagtaatatcgcagaaaggatggcaactaatgggagccaaacatttgaaaccgtgcatgcttatggaggtagtaagaacacgcagattgttccgtatggccaaggttctgctctggtgaatcagtttcctttgcaaaccagttggcaaccatctattcagtttgagagagttgtgttgacgaaaaggcctgaggagcagcggatgcaagatcttgtggctgctaccatagcggagaagagggcagaaacacaaatgttcctatcacttcctacggagagaaagcgaaggagaacagaccatagtttgttgatgcttgactcatttgtccctaaacaaagaagaagaaaaggtgacacaggtctagcaccagctgatttgtcattggatttacatcaaactgctacatcacaagaacctgacatagctatagaggaagaagagaaacgtaaaaatgatggtgatggtcttgaggattattggaaagattttgcattggctgttgaaagcacaaagcttgacgatgttgacgaggcggcggcaaatgaaaaggaagataatggaaagatggaggacatcgactgcaaccatgacattcggattcatgaagatttgggccatgtatgccgtgtgtgtggtatgattgtgagaagagctgattcaataattgattaccagtggaaaaaggcttcaaggagaagaatgaatggctatggaggaaattcaaaggatgctgatgagatagactgtggtactgtcaaactgtctgaagatttcatagttgcagatattgctattcatcctagacacgctcaggcaatgaaaccacatcaggtggaaggtttcaactttttggttaagaatttgattggagacaagcctggaggttgcattcttgctcatgccccaggttcagggaaaacatttttgcttataagcttcattcagagcttcatggcaaggtatccatctgcaaggccccttgttgtgctgcctaaagggatactagttatatggaagaaagaaattcaacgatggcaagtgcaggatataccagtgtacgatttctactctgtaaaggctgaaaaaagagtagaacagttgcaaatcctcaaatcttgggaggacaagatgggtatactgtttcttggatacaagcagttctccacaatcgtcactgatgatgggggcagcaaggtaacagctgcatgccgggacaggctgcttaaggttcccaaccttctgatacttgacgagggtcatacacctagaaataaggagactgatgtactagagtcgctaagtagagtagaaacaccacgcaaagtggttctctcaggtacacttttccagaatcatgttgaggaagtgtttaatatcttgaatcttgtccgcccaaagtttcttaggatggaatcgtcacgccctattgccagacgtataatgagtcaggttgaaatatttggcagaagttcaaaagggcttgctgatggcgcattcactgaggcagttgaaggaaccttgttgaacgatgaaaacttcaagagaaaagttcatgttattagaggtcttagagaactaacaagggatgtgcttcactattataagggcgctatattagatgaactacctggcttagtagacttcagtgtgtttttgaagctcacacccaagcagaaggacattgttcacaagttggaaatgcatgataggttcaaaagaagtgcagtagggagtgcactgtacatccatccttgtctttcaggactttcagaggttaatgctgagaacagggctcacaccttgagagatgattcagttgatagtctgatggattccatcaatgtgagagacggcgtgaaggccaattttttcatgaatatcctgtcacttgctaattccgcaggagagaaagtacttgcttttagccaatatatacttcccatgaccttctttgaaaggctgctggttaagaagaagggctggcatgtggggagagagattttcatgatctctggcgacactagccaagaagacagagaagcggcagtggaccgtttcaacagctccgctgatgcgaaggttctgttcggttcgatcagggcatgtggagagggcatttccatcgtcggcgcgtcgagagtcgtcattctggacgttcacctgaacccatctgtcacccgtcaggcgatcgggcgcgcgttcaggcctggccagcagaagaaagtgttcgtgtacaggctcgtagctgccgactctgacgaggtgaaggtccacgagacggcgttcaagaaagaagtcatacagaagctgtggtttgaatggagcgagcagtgtaccacggaaaacttcaagcttggtcaagtcgatatcgacgactctggggacgagctattggataccagagcgatccgccaggatatcaaggcgctgtacagaaggtaacaaacttcgtggccgatggacaccatgtaaatactggcggtgctgatcaatgagaagagtttttttttccttgtacaatcgcgctttaaattacatcatgaaaataatgctccgcattccattccattttatggtcaacagatactggcttctctacagacctgagtttgctctaaaactaggacttttcaagctatatctgtggaatggtttcttttcttttgtattatgtgccagcttcggacagcagtcagctgatcctcgactcatttcttgactcgtaggccaggattattgaggattaactgctatggtgtttagacttcttaagggctagtctaagggctagtctgagaaccccggatttctaatttgccaaggaaaattagttcatttttcattggaaaaatgaaaatccctgggagaatggagtttccaaactaatccttagtaaatatttccgtcggcgataataaacaccacccag

SEQ ID NO: 13910 - DNA, 3685 bp, Zea Mays
atatgcagccactctctcctgtcatcctgtgtcctcgtcctttccacccaaaatccccgatcctcgaatcgattaaaccctaagcggcatggcgggtagcgactactgccggccggcagtgcgcccgcgcgacttctgagccaccggaagccgcccttgtcccggctccactgtcgcgtgccccatccaacactgggggagtgggagttcagagccgcaaacgctcagggcaaccgggaggacgggaaggtgtggccgcaaccgcaagacgcaggcaagaggcaatcaactcaccgatgtctcagtcaccgggaggacgggaaggcatatattacagcaggcagaggaaaccttcggaacgcaacggcagtgtatttacacccatagctgcaatgtatcccagcggtcacgcacttcctgatgcaaacaggaaccacagtttggtatttggcggtacgagcaaggactgggacaacatccgtcagttcattgctagtctggaacgcgcctctgaaaactcctctgcgatagccagcaaaaccggaggtggcaaatcgaccaaccattccgtggagccagccgaacaaaaaggaaagggtgacataatagttctcgattcagatgatgaggatggagatggaaacagtccagaacacaataagttggcatctgagatgaacaaagaactcggaacatctgtattggctagtaatatcgcagaaaggatggcaactaatgggagccaaacatttgaaaccgtgcatgcttatggaggtagtaagaacacgcagattgttccgtatggccaaggttctgctctggtgaatcagtttcctttgcaaaccagttggcaaccatctattcagtttgagagagttgtgttgacgaaaaggcctgaggagcagcggatgcaagatcttgtggctgctaccatagcggagaagagggcagaaacacaaatgttcctatcacttcctacggagagaaagcgaaggagaacagaccatagtttgttgatgcttgactcatttgtccctaaacaaagaagaagaaaaggtgacacaggtctagcaccagctgatttgtcattggatttacatcaaactgctacatcacaagaacctgacatagctatagaggaagaagagaaacgtaaaaatgatggtgatggtcttgaggattattggaaagattttgcattggctgttgaaagcacaaagcttgacgatgttgacgaggcggcggcaaatgaaaaggaagataatggaaagatggaggacatcgactgcaaccatgacattcggattcatgaagatttgggccatgtatgccgtgtgtgtggcttcaaggagaagaatgaatggctatggaggaaattcaaaggatgctgatgagatagactgtggtactgtcaaactgtctgaagatttcatagttgcagatattgctattcatcctagacacgctcaggcaatgaaaccacatcaggtggaaggtttcaactttttggttaagaatttgattggagacaagcctggaggttgcattcttgctcatgccccaggttcagggaaaacatttttgcttataagcttcattcagagcttcatggcaaggtatccatctgcaaggccccttgttgtgctgcctaaagggatactagttatatggaagaaagaaattcaacgatggcaagtgcaggatataccagtgtacgatttctactctgtaaaggctgaaaaaagagtagaacagttgcaaatcctcaaatcttgggaggacaagatgggtatactgtttcttggatacaagcagttctccacaatcgtcactgatgatgggggcagcaaggtaacagctgcatgccgggacaggctgcttaaggttcccaaccttctgatacttgacgagggtcatacacctagaaataaggagactgatgtactagagtcgctaagtagagtagaaacaccacgcaaagtggttctctcaggtacacttttccagaatcatgttgaggaagtgtttaatatcttgaatcttgtccgcccaaagtttcttaggatggaatcgtcacgccctattgccagacgtataatgagtcaggttgaaatatttggcagaagttcaaaagggcttgctgatggcgcattcactgaggcagttgaaggaaccttgttgaacgatgaaaacttcaagagaaaagttcatgttattagaggtcttagagaactaacaagggatgtgcttcactattataagggcgctatattagatgaactacctggcttagtagacttcagtgtgtttttgaagctcacacccaagcagaaggacattgttcacaagttggaaatgcatgataggttcaaaagaagtgcagtagggagtgcactgtacatccatccttgtctttcaggactttcagaggttaatgctgagaacagggctcacaccttgagagatgattcagttgatagtctgatggattccatcaatgtgagagacggcgtgaaggccaattttttcatgaatatcctgtcacttgctaattccgcaggagagaaagtacttgcttttagccaatatatacttcccatgaccttctttgaaaggctgctggttaagaagaagggctggcatgtggggagagagattttcatgatctctggcgacactagccaagaagacagagaagcggcagtggaccgtttcaacagctccgctgatgcgaaggttctgttcggttcgatcagggcatgtggagagggcatttccatcgtcggcgcgtcgagagtcgtcattctggacgttcacctgaacccatctgtcacccgtcaggcgatcgggcgcgcgttcaggcctggccagcagaagaaagtgttcgtgtacaggctcgtagctgccgactctgacgaggtgaaggtccacgagacggcgttcaagaaagaagtcatacagaagctgtggtttgaatggagcgagcagtgtaccacggaaaacttcaagcttggtcaagtcgatatcgacgactctggggacgagctattggataccagagcgatccgccaggatatcaaggcgctgtacagaaggtgaaggctccccccctccctccctccctccctttcttaaccccaatgatgttttgcacgctggtcgctggtagcctcaactggtgtctttgtaggtaggtaacaaacttcgtggccgatggacaccatgtaaatactggcggtgctgatcaatgagaagagtttttttttccttgtacaatcgcgctttaaattacatcatgaaaataatgctccgcattccattccattttatggtcaacagatactggcttctctacagacctgagtttgctctaaaactaggacttttcaagctatatctgtggaatggtttcttttcttttgtattatgtgccagcttcggacagcagtcagctgatcctcgactcatttcttgactcgtaggccaggattattgaggattaactgctatggtgtttagacttcttaagggctagtctaagggctagtctgagaaccccggatttctaatttgccaaggaaaattagttcatttttcattggaaaaatgaaaatccctgggagaatggagtttccaaactaatccttagtaaatatttccgtcggcgataataaacaccacccag

SEQ ID NO: 13911 - DNA, 3788 bp, Zea Mays
atatgcagccactctctcctgtcatcctgtgtcctcgtcctttccacccaaaatccccgatcctcgaatcgattaaaccctaagcggcatggcgggtagcgactactgccggccggcagtgcgcccgcgcgacttctgagccaccggaagccgcccttgtcccggctccactgtcgcgtgccccatccaacactgggggagtgggagttcagagccgcaaacgctcagggcaaccgggaggacgggaaggtgtggccgcaaccgcaagacgcaggcaagaggcaatcaactcaccgatgtctcagtcaccgggaggacgggaagtcgtcaactcatcatcaggaattgagtccaccgatgctagaatgttgggctaggcatatattacagcaggcagaggaaaccttcggaacgcaacggcagtgtatttacacccatagctgcaatgtatcccagcggtcacgcacttcctgatgcaaacaggaaccacagtttggtatttggcggtacgagcaaggactgggacaacatccgtcagttcattgctagtctggaacgcgcctctgaaaactcctctgcgatagccagcaaaaccggaggtggcaaatcgaccaaccattccgtggagccagccgaacaaaaaggaaagggtgacataatagttctcgattcagatgatgaggatggagatggaaacagtccagaacacaataagttggcatctgagatgaacaaagaactcggaacatctgtattggctagtaatatcgcagaaaggatggcaactaatgggagccaaacatttgaaaccgtgcatgcttatggaggtagtaagaacacgcagattgttccgtatggccaaggttctgctctggtgaatcagtttcctttgcaaaccagttggcaaccatctattcagtttgagagagttgtgttgacgaaaaggcctgaggagcagcggatgcaagatcttgtggctgctaccatagcggagaagagggcagaaacacaaatgttcctatcacttcctacggagagaaagcgaaggagaacagaccatagtttgttgatgcttgactcatttgtccctaaacaaagaagaagaaaaggtgacacaggtctagcaccagctgatttgtcattggatttacatcaaactgctacatcacaagaacctgacatagctatagaggaagaagagaaacgtaaaaatgatggtgatggtcttgaggattattggaaagattttgcattggctgttgaaagcacaaagcttgacgatgttgacgaggcggcggcaaatgaaaaggaagataatggaaagatggaggacatcgactgcaaccatgacattcggattcatgaagatttgggccatgtatgccgtgtgtgtggtatgattgtgagaagagctgattcaataattgattaccagtggaaaaaggcttcaaggagaagaatgaatggctatggaggaaattcaaaggatgctgatgagatagactgtggtactgtcaaactgtctgaagatttcatagttgcagatattgctattcatcctagacacgctcaggcaatgaaaccacatcaggtggaaggtttcaactttttggttaagaatttgattggagacaagcctggaggttgcattcttgctcatgccccaggttcagggaaaacatttttgcttataagcttcattcagagcttcatggcaaggtatccatctgcaaggccccttgttgtgctgcctaaagggatactagttatatggaagaaagaaattcaacgatggcaagtgcaggatataccagtgtacgatttctactctgtaaaggctgaaaaaagagtagaacagttgcaaatcctcaaatcttgggaggacaagatgggtatactgtttcttggatacaagcagttctccacaatcgtcactgatgatgggggcagcaaggtaacagctgcatgccgggacaggctgcttaaggttcccaaccttctgatacttgacgagggtcatacacctagaaataaggagactgatgtactagagtcgctaagtagagtagaaacaccacgcaaagtggttctctcaggtacacttttccagaatcatgttgaggaagtgtttaatatcttgaatcttgtccgcccaaagtttcttaggatggaatcgtcacgccctattgccagacgtataatgagtcaggttgaaatatttggcagaagttcaaaagggcttgctgatggcgcattcactgaggcagttgaaggaaccttgttgaacgatgaaaacttcaagagaaaagttcatgttattagaggtcttagagaactaacaagggatgtgcttcactattataagggcgctatattagatgaactacctggcttagtagacttcagtgtgtttttgaagctcacacccaagcagaaggacattgttcacaagttggaaatgcatgataggttcaaaagaagtgcagtagggagtgcactgtacatccatccttgtctttcaggactttcagaggttaatgctgagaacagggctcacaccttgagagatgattcagttgatagtctgatggattccatcaatgtgagagacggcgtgaaggccaattttttcatgaatatcctgtcacttgctaattccgcaggagagaaagtacttgcttttagccaatatatacttcccatgaccttctttgaaaggctgctggttaagaagaagggctggcatgtggggagagagattttcatgatctctggcgacactagccaagaagacagagaagcggcagtggaccgtttcaacagctccgctgatgcgaaggttctgttcggttcgatcagggcatgtggagagggcatttccatcgtcggcgcgtcgagagtcgtcattctggacgttcacctgaacccatctgtcacccgtcaggcgatcgggcgcgcgttcaggcctggccagcagaagaaagtgttcgtgtacaggctcgtagctgccgactctgacgaggtgaaggtccacgagacggcgttcaagaaagaagtcatacagaagctgtggtttgaatggagcgagcagtgtaccacggaaaacttcaagcttggtcaagtcgatatcgacgactctggggacgagctattggataccagagcgatccgccaggatatcaaggcgctgtacagaaggtgaaggctccccccctccctccctccctccctttcttaaccccaatgatgttttgcacgctggtcgctggtagcctcaactggtgtctttgtaggtaggtaacaaacttcgtggccgatggacaccatgtaaatactggcggtgctgatcaatgagaagagtttttttttccttgtacaatcgcgctttaaattacatcatgaaaataatgctccgcattccattccattttatggtcaacagatactggcttctctacagacctgagtttgctctaaaactaggacttttcaagctatatctgtggaatggtttcttttcttttgtattatgtgccagcttcggacagcagtcagctgatcctcgactcatttcttgactcgtaggccaggattattgaggattaactgctatggtgtttagacttcttaagggctagtctaagggctagtctgagaaccccggatttctaatttgccaaggaaaattagttcatttttcattggaaaaatgaaaatccctgggagaatggagtttccaaactaatccttagtaaatatttccgtcggcgataataaacaccacccag

SEQ ID NO: 13912 - DNA, 1779 bp, Zea Mays
gtagctttattcttaacaggaagttacactcccctgccaaaagtcgaggacatatagccgtcgcgcgctcttcttcctgggtggagcgtccatgaggtggaagcagcagcgtccctagtgccagggtctgtcggctgagtgcgggggagaatgaaaggagtgtccgaaggcctgatcatcgggaccacggtcggggtggtcataggcgtgctgctggctctcgggacgctgctgtgcctgaggcggcgtcggcgttcccagacgcagataaggagcagcagctcgaggagggcgtcgactgtccccatccgcaccaatggcgttaacgcctgcgccatgctctcgaactcgaccacggggcaggagtctccgactccgcgggagctcgaagagcgtgggagttctctgtggatccaagggccaggtagaaagagcgtgatctctgcttctggggtacccagatatgcgtacaaggagctacagaaagctacaagcaatttcacaacattgttaggccaaggagccttcggccctgtctacaaagcagacatgtcttctggcgaggtactggctgtcaaagtgctgtcgaacaattccaggcaaggtgaaaaggagttccaaaacgaggtcttactccttgggcgactgcaccacaggaacctggtgaatttggtcggctactgcgccgacaaagggcagcatatgctactgtacgcgtacatgccgaacgggagccttgcgtcacacttatacggcgaagacagtgcgccactaaagtgggacttgagagtaagcatcgctctggatgtcgctcggggtctggagtacctgcacgacggggctgttcctccggtagtccaccgcgacatcaaatcccccaacattctgctggaccaggcgatgcatgctagggtcgccgacttcgggttgtcgagagaggagatggtcactcgcggcgacggcgccgccaacaacatacggggaacctacgggtacctcgacccggagtacgtgtccacgcggtcgttcaccaagaagagcgacgtgtacagctacggcgtcctgctgttcgagctgatcgccggcaggaacccacagcagggcctcatggagtacgccgagctcgccgccatcaacgccgacgacgggaggaggaccgggtgggaggagatcgcggacgcgcggctaggaggcgcgttcgacgcggacgagctcaacgacgtcgccgccgtggcctaccgctgcgtcagccgcgcgtcccgcaagcgccccgcgatgcgggacgtcgtgcaggccctggcccgcgtggcgaggcgcggccgcggccgcggcaggaagcagcagcaccacccgccgcaggccagcagtgccgccgcgggcgacgagtccgccgtcgacctggaggcggaggaggggtccgaggcaggccggtcgtcgttctctggccttcttcagagagaggagtcggtcggcagcgtctctgatctaccagatgtctgagcctgacggattcttttgtttttgttgcctagagatgcagttttgagcagtgagggtgggtgtaacttgtggtggtgcctagtcaattgtaagtgtgttgtatagagtgcattgtgagttgtgactacttttgttgatatacacaagctgattgttaccatgtcatttgtcattgcctttttcagcttatgcatgcatggcgcatatacatcacagtgtaaaaagttgttttgcactatagactcctttgaaataaagaaaaaatatgaagaatttttt

SEQ ID NO: 13913 - DNA, 1973 bp, Zea Mays
cgtcgtctttccctcgcctctctctctctctctctctctctctctctctctctctctctcgaaacccacgtgaagcctgagcgccgaggcctcccctccgtccaccgatcccgccgctcccctccatccgcattcctggccacgagccgtgaaatcgggatccgctgcggccgctgatcccgacgacgagcccggattcgcccgccggccccatgggtcccgtcttctccggccgcatttgggacatatagccgtcgcgcgctcttcttcctgggtggagcgtccatgaggtggaagcagcagcgtccctagtgccagggtctgtcggctgagtgcgggggagaatgaaaggagtgtccgaaggcctgatcatcgggaccacggtcggggtggtcataggcgtgctgctggctctcgggacgctgctgtgcctgaggcggcgtcggcgttcccagacgcagataaggagcagcagctcgaggagggcgtcgactgtccccatccgcaccaatggcgttaacgcctgcgccatgctctcgaactcgaccacggggcaggagtctccgactccgcgggagctcgaagagcgtgggagttctctgtggatccaagggccaggtagaaagagcgtgatctctgcttctggggtacccagatatgcgtacaaggagctacagaaagctacaagcaatttcacaacattgttaggccaaggagccttcggccctgtctacaaagcagacatgtcttctggcgaggtactggctgtcaaagtgctgtcgaacaattccaggcaaggtgaaaaggagttccaaaacgaggtcttactccttgggcgactgcaccacaggaacctggtgaatttggtcggctactgcgccgacaaagggcagcatatgctactgtacgcgtacatgccgaacgggagccttgcgtcacacttatacggcgaagacagtgcgccactaaagtgggacttgagagtaagcatcgctctggatgtcgctcggggtctggagtacctgcacgacggggctgttcctccggtagtccaccgcgacatcaaatcccccaacattctgctggaccaggcgatgcatgctagggtcgccgacttcgggttgtcgagagaggagatggtcactcgcggcgacggcgccgccaacaacatacggggaacctacgggtacctcgacccggagtacgtgtccacgcggtcgttcaccaagaagagcgacgtgtacagctacggcgtcctgctgttcgagctgatcgccggcaggaacccacagcagggcctcatggagtacgccgagctcgccgccatcaacgccgacgacgggaggaggaccgggtgggaggagatcgcggacgcgcggctaggaggcgcgttcgacgcggacgagctcaacgacgtcgccgccgtggcctaccgctgcgtcagccgcgcgtcccgcaagcgccccgcgatgcgggacgtcgtgcaggccctggcccgcgtggcgaggcgcggccgcggccgcggcaggaagcagcagcaccacccgccgcaggccagcagtgccgccgcgggcgacgagtccgccgtcgacctggaggcggaggaggggtccgaggcaggccggtcgtcgttctctggccttcttcagagagaggagtcggtcggcagcgtctctgatctaccagatgtctgagcctgacggattcttttgtttttgttgcctagagatgcagttttgagcagtgagggtgggtgtaacttgtggtggtgcctagtcaattgtaagtgtgttgtatagagtgcattgtgagttgtgactacttttgttgatatacacaagctgattgttaccatgtcatttgtcattgcctttttcagcttatgcatgcatggcgcatatacatcacagtgtaaaaagttgttttgcactatagactcctttgaaataaagaaaaaatatgaagaatttttt

SEQ ID NO: 13914 - DNA, 1274 bp, Zea Mays
gtctttccctcgcctctctctctctctctctctctctctctctctctctctctctcgaaacccacgtgaagcctgagcgccgaggcctcccctccgtccaccgatcccgccgctcccctccatccgcattcctggccacgagccgtgaaatcgggatccgctgcggccgctgatcccgacgacgagcccggattcgcccgccggccccatgggtcccgtcttctccggccgcatttgggacatatagccgtcgcgcgctcttcttcctgggtggagcgtccatgaggtggaagcagcagcgtccctagtgccagggtctgtcggctgagtgcgggggagaatgaaaggagtgtccgaaggcctgatcatcgggaccacggtcggggtggtcataggcgtgctgctggctctcgggacgctgctgtgcctgaggcggcgtcggcgttcccagacgcagataaggagcagcagctcgaggagggcgtcgactgtccccatccgcaccaatggcgttaacgcctgcgccatgctctcgaactcgaccacggggcaggagtctccgactccgcgggagctcgaagagcgtgggagttctctgtggatccaagggccaggccaaggagccttcggccctgtctacaaagcagacatgtcttctggcgaggtactggctgtcaaagtgctgtcgaacaattccaggcaaggtgaaaaggagttccaaaacgaggtcttactccttgggcgactgcaccacaggaacctggtgaatttggtcggctactgcgccgacaaagggcagcatatgctactgtacgcgtacatgccgaacgggagccttgcgtcacacttatacggcgaagacagtgcgccactaaagtgggacttgagagtaagcatcgctctggatgtcgctcggggtctggagtacctgcacgacggggctgttcctccggtagtccaccgcgacatcaaatcccccaacattctgctggaccaggcgatgcatgctagggtcgccgacttcgggttgtcgagagaggagatggtcactcgcggcgacggcgccgccaacaacatacggggaacctacgggtacctcgacccggagtacgtgtccacgcggtcgttcaccaagaagagcgacgtgtacagctacggcgtcctgctgttcgagctgatcgccggcaggaacccacagcagggcctcatggagcttcccgttcggctcgaggggacactagctgaccacactgcatcttatctatcgcgcgcag

SEQ ID NO: 13915 - DNA, 2715 bp, Zea Mays
gtctttccctcgcctctctctctctctctctctctctctctctctctctctctctcgaaacccacgtgaagcctgagcgccgaggcctcccctccgtccaccgatcccgccgctcccctccatccgcattcctggccacgagccgtgaaatcgggatccgctgcggccgctgatcccgacgacgagcccggattcgcccgccggccccatgggtcccgtcttctccggccgcatttgggacatatagccgtcgcgcgctcttcttcctgggtggagcgtccatgaggtggaagcagcagcgtccctagtgccagggtctgtcggctgagtgcgggggagaatgaaaggagtgtccgaaggcctgatcatcgggaccacggtcggggtggtcataggcgtgctgctggctctcgggacgctgctgtgcctgaggcggcgtcggcgttcccagacgcagataaggagcagcagctcgaggagggcgtcgactgtccccatccgcaccaatggcgttaacgcctgcgccatgctctcgaactcgaccacggggcaggagtctccgactccgcgggagctcgaagagcgtgggagttctctgtggatccaagggccaggtagaaagagcgtgatctctgcttctggggtacccagatatgcgtacaagtatgtttcgtgaattcttgttgttgtttttttgactaatttgtttagcaaatgatcggttttgttgcgtgatagataagtcggttagttactgcatcctttgtttaaatccacttaatatattgctgctgaaacgttcgaggatgacttcatggaagtggtttccatcagaatgtttgatgtgaggaatgaacaggcttgtctctagactctagttaaacaagagtgaagggtagatgggaacatctgtcataagaacttaaataaaaaggatgttaaatgtcaaagtagcacaaacatgtggacgtagagatctcacgaggtgaaatccaatttggtttgaactgtatacatggaaggcatgtgcttctgtgttgaccaaagcattcagccacatctgcatgttcggatgaatcaaacttcaggtggtaggaaccaaaattacaaccttttgacttgtgatataacttcattcattaggttgtgacttgtgagtattaagtatatatagtgtttctttttttgttttcaaaagtattattaatgtatttttattccaaaaaaaatagaatacacattcattcatttgaatattcctgctacaaatctcagttgcttggacataatgcatcttacataaccgtcgaccgctcagatataatcaaatccttgcggcccttctaatggttggcttagaaccgtacatgctcttgctgagctccatgattctgtctcataatctctagggagctacagaaagctacaagcaatttcacaacattgttaggccaaggagccttcggccctgtctacaaagcagacatgtcttctggcgaggtactggctgtcaaagtgctgtcgaacaattccaggcaaggtgaaaaggagttccaaaacgaggtcttactccttgggcgactgcaccacaggaacctggtgaatttggtcggctactgcgccgacaaagggcagcatatgctactgtacgcgtacatgccgaacgggagccttgcgtcacacttatacggcgaagacagtgcgccactaaagtgggacttgagagtaagcatcgctctggatgtcgctcggggtctggagtacctgcacgacggggctgttcctccggtagtccaccgcgacatcaaatcccccaacattctgctggaccaggcgatgcatgctagggtcgccgacttcgggttgtcgagagaggagatggtcactcgcggcgacggcgccgccaacaacatacggggaacctacgggtacctcgacccggagtacgtgtccacgcggtcgttcaccaagaagagcgacgtgtacagctacggcgtcctgctgttcgagctgatcgccggcaggaacccacagcagggcctcatggagtacgccgagctcgccgccatcaacgccgacgacgggaggaggaccgggtgggaggagatcgcggacgcgcggctaggaggcgcgttcgacgcggacgagctcaacgacgtcgccgccgtggcctaccgctgcgtcagccgcgcgtcccgcaagcgccccgcgatgcgggacgtcgtgcaggccctggcccgcgtggcgaggcgcggccgcggccgcggcaggaagcagcagcaccacccgccgcaggccagcagtgccgccgcgggcgacgagtccgccgtcgacctggaggcggaggaggggtccgaggcaggccggtcgtcgttctctggccttcttcagagagaggagtcggtcggcagcgtctctgatctaccagatgtctgagcctgacggattcttttgtttttgttgcctagagatgcagttttgagcagtgagggtgggtgtaacttgtggtggtgcctagtcaattgtaagtgtgttgtatagagtgcattgtgagttgtgactacttttgttgatatacacaagctgattgttaccatgtcatttgtcattgcctttttcagcttatgcatgcatggcgcatatacatcacagtgtaaaaagttgttttgcactatagactcctttgaaataaagaaaaaatatgaagaatttttt

SEQ ID NO: 13916 - DNA, 2092 bp, Zea Mays
gtctttccctcgcctctctctctctctctctctctctctctctctctctctctctcgaaacccacgtgaagcctgagcgccgaggcctcccctccgtccaccgatcccgccgctcccctccatccgcattcctggccacgagccgtgaaatcgggatccgctgcggccgctgatcccgacgacgagcccggattcgcccgccggccccatgggtcccgtcttctccggccgcatttggattatcgtgttgtgatggtgcttaagtgtcagaggaggggaaagggggcaccttatatttggcgttggcggttttattagtgtttgtggagacaagcgcaaagggagtaattttgtttttaatgacatatagccgtcgcgcgctcttcttcctgggtggagcgtccatgaggtggaagcagcagcgtccctagtgccagggtctgtcggctgagtgcgggggagaatgaaaggagtgtccgaaggcctgatcatcgggaccacggtcggggtggtcataggcgtgctgctggctctcgggacgctgctgtgcctgaggcggcgtcggcgttcccagacgcagataaggagcagcagctcgaggagggcgtcgactgtccccatccgcaccaatggcgttaacgcctgcgccatgctctcgaactcgaccacggggcaggagtctccgactccgcgggagctcgaagagcgtgggagttctctgtggatccaagggccaggtagaaagagcgtgatctctgcttctggggtacccagatatgcgtacaaggagctacagaaagctacaagcaatttcacaacattgttaggccaaggagccttcggccctgtctacaaagcagacatgtcttctggcgaggtactggctgtcaaagtgctgtcgaacaattccaggcaaggtgaaaaggagttccaaaacgaggtcttactccttgggcgactgcaccacaggaacctggtgaatttggtcggctactgcgccgacaaagggcagcatatgctactgtacgcgtacatgccgaacgggagccttgcgtcacacttatacggcgaagacagtgcgccactaaagtgggacttgagagtaagcatcgctctggatgtcgctcggggtctggagtacctgcacgacggggctgttcctccggtagtccaccgcgacatcaaatcccccaacattctgctggaccaggcgatgcatgctagggtcgccgacttcgggttgtcgagagaggagatggtcactcgcggcgacggcgccgccaacaacatacggggaacctacgggtacctcgacccggagtacgtgtccacgcggtcgttcaccaagaagagcgacgtgtacagctacggcgtcctgctgttcgagctgatcgccggcaggaacccacagcagggcctcatggagtacgccgagctcgccgccatcaacgccgacgacgggaggaggaccgggtgggaggagatcgcggacgcgcggctaggaggcgcgttcgacgcggacgagctcaacgacgtcgccgccgtggcctaccgctgcgtcagccgcgcgtcccgcaagcgccccgcgatgcgggacgtcgtgcaggccctggcccgcgtggcgaggcgcggccgcggccgcggcaggaagcagcagcaccacccgccgcaggccagcagtgccgccgcgggcgacgagtccgccgtcgacctggaggcggaggaggggtccgaggcaggccggtcgtcgttctctggccttcttcagagagaggagtcggtcggcagcgtctctgatctaccagatgtctgagcctgacggattcttttgtttttgttgcctagagatgcagttttgagcagtgagggtgggtgtaacttgtggtggtgcctagtcaattgtaagtgtgttgtatagagtgcattgtgagttgtgactacttttgttgatatacacaagctgattgttaccatgtcatttgtcattgcctttttcagcttatgcatgcatggcgcatatacatcacagtgtaaaaagttgttttgcactatagactcctttgaaataaagaaaaaatatgaagaatttttt

SEQ ID NO: 13917 - DNA, 63 bp, Zea Mays
ccgatccttgggattctttgatgacgcacggaatgacgacgatcttcgattgaagtcttcgac

SEQ ID NO: 13918 - DNA, 312 bp, Zea Mays
atggggagcagggccgcccgcgcgggagcctggcaagggcacggcagagagcttcgacggcggccatggaggggctccgagctgtggtcgagaaacgggagcgcgacaccagggagtttcacggcgccggagctggaggaggaagaagagcgggtgagctgggcgctggctaagggagaaggagctccggccggctggaagttggaggcgggctggggcagagaggagcggccggcgctggagaagatgggcgctgaacagggaacctgcgtgcaggacatggaagaagcggaaggagcagaggccggatga

SEQ ID NO: 13919 - DNA, 1273 bp, Zea Mays
ccgccccaccacctgcgcgccttttgcttcctcaacccctcatcatggacatggaggaggatccagcaggcggcgaagacctctcttccacggccgccagcggccactcctgctccggtgacgacggcgaggagagtggctggacgtcctacatcgactacttcatggagacgcagcagcgacgacgacgcaagcagggggacgtgagccgtgctgctgctggtgatggtccatccaccgacgacgatgctgggcgccgccgcagctctacggcggagtgcagtagtggcgctggagtgggagcctcgtcgtcatgcctggcgccaccggtgctcgtcgacccgccagtagtggtggtgtcgagaaggttgagcctcagggagggctggaggaggaagaaggtcctgcacgatgagtccttggaggataccgccacgtctcctatcagtagccctaaggttagagctagctagctagcccaatcatcgtcacaggctaattgttaattacctaccctaaagatttttctttttttgtgtgtgagtgtgctgcatgcttattttacaaattaaaacttggctagtgtttatttggttcgggagatctgattcgatttgatttgatttgctggcgtggaagcagaagtgaattttattgcatgctggtttcagttgattgagttgagggatcccgacgacgcgacccaccaccagacgaaaacgagttgctgtgctgagatttcgcgttctaagcggaagaacagtacaggcggtgatgtaaacaacggggcaaacacaagaacagacacggcggcggtcaaggaagacagtgcagcatatagcaacgacgatgaagctgaggaagaaataagcaggcctaatttggtcggcccggcctatgcctgcttctcgtgtatagctgatggcgatgccaacaaattcattggttgctagctgaaaacaacaacaccctacgtacgtacacacatgcatatatacatgtagtacacactggcacacatgagaaaattaaaggtagcagctagagagtcttgtgaaggttagccattccgttcctgtttgtgaaaagggtacaaaagctactagctttcacttcacacatgagagaagaagctaaggagaagaggtacaggctgctgtgggtgggttcgatggtaggtgagacatcgcaatgctatgttagatatggggtctattccatctatcttgtgaccaagattgttatcatcagttacactcttctgttctgttca

SEQ ID NO: 13920 - DNA, 3350 bp, Zea Mays
tcgctgctcgccgcaattactccggcattcaatacgcgcaccctccacccttcccttcctctcctccaatccttccccgtccgtctccatcgccgccgccgtccctttctctctccctccctccctccctccctccctcctccacacctacaagcagccagctacaagcggaggactcctcctccgtcatgcatcctctatctaccgtctcatgatcactgcactctacgcggagctgtgttctgccggtccacgtacgcgcgcgtgcatacaaagatcggatcgaaggtagctcccgggcggccgcgcgtagatctacgctcggggacggaacggagaggaagctagctaggagcgtgcatgctatgcccgggggcctgatgacccccggccgcaacatgccgacggcggcggccatgatcggcggcctcgccagctacgcagctccttcggccagaacatgatggatgggcaccatcagctcgctatgatgcagcagcagcatcagaaccacggccagcagcaggcagccacgagcgagagcgacgcgcgaggcccgcgccacgacgagctgctgatggagagcaagtccggcagcgacaacatggagggaggcgcccggtcaggcggctccggcggtgaggagctgcaggaggaggatctcggcctgcggcagccggcccgcaagaagcgctaccaccgccacacccagcaccagatccaggagctcgaagcgttcttcaaggagtacccgcaccctgacgacaagcagaggaaggagctgagccgggagctgggcctggagcctctccaggtcaagttctggttccagaacaagcgtacccagatgaagacgcagcaggaacggcacgagaacatgcagctgcgggcggagaacgagaagctgcgcgccgagaacgcgcggtacaaggacgcgctcgccaacgcctcgtgcccgagctgcggcggcccggcggccacggccgtcatcggcgagatgtccttcgacgagcaccacctccgcgtcgagaacgcgcgcctccgcgacgaggtcgaccgcatctccaccatcgccgccaagtacgtcggcaagcccgctggcagcctgctgctgctgccccccaacaacctgtcaaacaacgtctccggcccggcgctttcctcccaccaccacctcctgcccggcggaacagacgtgttcggtggcctccaccgtcatgctggcggtgggtttgactttgacaaggggttggttgtcgagctcgccgtcgccgccatggaggagctggtgcggatggctctgctcggcgagccgctctggatccctgcccttgccgtagacggggctaccaccgagactctcaacgaggaagagtacgcccgcgggttcttccccaggggcgttggtcccaagctgccggagctccggtcggaagcgtcgcgggaggccgtcgtggtcatcatgaaccacgtcagcctcatcgagatgctcatggacgtgaaccagtggtcgacgctgttctcaagcatcgtgtcacgggctgccaccctcgaggtgctctccaccggcgtcgccggcaactacaatggcgcgctgcagctgatgacggcggagttccagatgccgtcgccgctggtgccgacacgtgagtgccagttcctgcgctactgcaagcagcacacggacggcagctgggcggtggtggacgtgtccgtcgagggccagctgctacgtaccggcagcagacaggggcgcgggcgcggtcgacgccggccctcaggctgcctgatccaggagatgccgaacggctactcgagggtgacgtgggtggagcacgcggaggcggacgacatgatggtgcacgacctgtaccgccccctagtctgctccggcctggcgttcggcgcgcggcggtgggcatcgacgctggagcggcagtgcgagcggctcgccagcgccatggccagcggcgtcgtcgtgccggcggcagcagcagggccagccgcgggcgtggtgacgtcgccggaggggcgccgcagcatgatgcggctggcggagcgcatggtggcgagcttctgcggcggcgtgacggcgtcgacgacgcaccagtggaccacgctgtcgggcagcggcgcggaggacgtgcgcgtgatgacgcgcaagagcgtggacgacccgggccggccgccgggcatcatcctcaacgccgccacctccttctggctccccgtggcccccgcgcgcgtcttcggcttcctccgggacgacgccacccgcagcgagtgggacatgctctccaacggcggcgacgtgcaggagatggcccacattgccaacggccgcgaccacggcaacgctgtctcgctgctccgcgtcgataacgccaactcgaaccagggcaacatgctgatcctgcaggagtgctgcacggacgcgacggggtcgtacgtgatctacgcgccggtggacgtggtggccatgaacgtggtgctcaacggcggggacccggactacgtggcgctgctgccgtcagggttcgccatcctccccgacggcggtggcggtggcggtggcgggtcgctcctcaccgtggcgttccagatcctggtcgactcggtgcccaccgccaagctgtccctgggctccgtcgccaccgtcaacagcctcatcgcctgcaccgtcgagcgcatcaaggctgccgtcgccgccgacaacgccggtgtggcggcggcggcggcggcgacgtcccaccattgacgaccatccccagcgcgcggagactgccgggatctgtggagggacgaagagcagggtcgcgtcaaactcaaaccaaaactgaaactggggaggatttggcaaacgcagggagtcaagaacgcaccgcgtgctctccttgcaagctgttgcacatgccctcgatctgatgagcaacacaacaccttgcaagggggttggttcgggcattgactctcttgctctgtcctcccgtcgtcgacctgccactctctcctcggtccatggccgggctgtagtagaagctcgtccgtcagacagctagctaggagcttagaccatgcatgcatgcatatgtagcttgtaactgggattcttccattgtaacgtgcctgtacctctgcctctgtgcatgcacggagcgaggttgtacgtctatggagattgcagaagtctaaaaccggttaatttgatttttttttccaccgtcggagattcattgcttctgtgttttttttacgttcagcatttttttagtatcattgttgcaatattgaaatgcatgtttatactcgtatttacatatttcaatatttataagatcatttacaccaca

SEQ ID NO: 13921 - DNA, 1614 bp, Zea Mays
atagtaggactagagagtagagaggccccgcccccaggaccgaccgaccagggagtccagcggcgcacatcgcggcgacccccaccccaccgagcgcccgcggccgcgatggagagaggcgatggcgggagcgggaggccgccggccgagaggaaggcggcgtggagggacggcgccgtcacctacttccacctcctcttctacatcgccatctccggcggccagatcttcttcaacaagtgggtcttatcctccaaagagatcaactttccctatcccgtggcactgactctgctgcacatggtcttctcctctgtagtgtgctttgcaatcacaaaagttttcaagatatattacttcagtcattccaattggaggaatgtttgcaatgacactttggctagggaacagtgcgtacctctacatatctgtcgcatttgcacagatgttgaaggcaataatgcctgtagccgtgtttcttctgggagcagcatttggcctggaagaaatgagctataaaatgctttctatcatgtctgtcatcagtgttggagttattgtggcttctgttggtgaaattacaatcagttgggttggagtggtttaccagatgggtggagttgttgcggaagccctaagacttatcttcattgagatatttctgaagaaaaagggtgtcaagctcaacttgatatccatgatgtactatgttagcccttgcagtgctgtatgcctctttattccctggctgttcttagagaagccaaagatggatgatagtatttcatggaacttcccaccattcacattgttcttaaactgcctgtgcacctttgtactcaatatgtcggttttccttgtcatatcaaggactagtgcgctgacggctcgagttactggtgtcgtgagggattggtccgtagttttgctgtcagctgccatctttgctgatacacagcttaccttcataaacataattggttatgccatagccatagctggtgttgttgcgtataacaaccacaagctcaaggtaaaaccccaagcgaacccacagcaaggcgacgagaacaaggtcatctcaggaagcactcaagatgtggtgttatcagtgagctcagcaaaagaaacttcgtagcaccaaaagtagcacgattttgaaacaattttatttttcacaaaggagaattgtgctctctttcgttgggttggccagctctccttggactatacattctttttccttcccctgggtctggagggaagatattttgtacaatgatatgctcaagatgatgatacgctgccttcactgtcgtaatattgctgctcaaaaaagtgggagcacgccacagatggaaattaggccatgtaaagttgtgttttctcttgaactggtgtagcgactcatcaggtgctccaaaaatggcagccctgaatctttgtacatggttgcttggtggtggtcatgagatgtgatgtaaaacgatatatgtaagcctggcagatcaaagaattcaagatacgcaagtttctgtgtttttgaatccagcatttctcttgcgctgatagtttgcttgagatattgattctgcaatatatgtttttaaacta

SEQ ID NO: 13922 - DNA, 1661 bp, Zea Mays
acagaagcagtttatcggttttgcacaatgatgctatgttcgaaacttctaatattgataactaaggcctcgagaaagtactgattttactctgaacaaagcagggtaccattctcaccatgaaaggaaaacttaaagtcacctgtatttttaaaaaccaaagttggcagcattgaaggatgaacatattgattacttgaaatttggttgaacaatgcttggtaattggatggtgttttttctgtcaaaagtttgattattattttttgaataagtaggcatcatatccttcaggatttttttgatatggaaatcctaaactgtggacatattggttttttaatcttaaatgtaaacctgaactacctaggaggaaacgtgttaagaagaaataagcagctgaacttgggtggcttagtatttaccggaattcatcattttcttcctactgttctgttcccaattcatttgtgcttgtactatgatgttcctgaactcattgttttatttactttaagtacaagaactgtctttttttccttactagttccctgaactttcagatatattacttcagtcattccaattggaggaatgtttgcaatgacactttggctagggaacagtgcgtacctctacatatctgtcgcatttgcacagatgttgaaggcaataatgcctgtagccgtgtttcttctgggagcagcatttggcctggaagaaatgagctataaaatgctttctatcatgtctgtcatcagtgttggagttattgtggcttctgttggtgaaattacaatcagttgggttggagtggtttaccagatgggtggagttgttgcggaagccctaagacttatcttcattgagatatttctgaagaaaaagggtgtcaagctcaacttgatatccatgatgactagtgcgctgacggctcgagttactggtgtcgtgagggattggtccgtagttttgctgtcagctgccatctttgctgatacacagcttaccttcataaacataattggttatgccatagccatagctggtgttgttgcgtataacaaccacaagctcaaggtaaaaccccaagcgaacccacagcaaggcgacgagaacaaggtcatctcaggaagcactcaagatgtggtgttatcagtgagctcagcaaaagaaacttcgtagcaccaaaagtagcacgattttgaaacaattttatttttcacaaaggagaattgtgctctctttcgttgggttggccagctctccttggactatacattctttttccttcccctgggtctggagggaagatattttgtacaatgatatgctcaagatgatgatacgctgccttcactgtcgtaatattgctgctcaaaaaagtgggagcacgccacagatggaaattaggccatgtaaagttgtgttttctcttgaactggtgtagcgactcatcaggtgctccaaaaatggcagccctgaatctttgtacatggttgcttggtggtggtcatgagatgtgatgtaaaacgatatatgtaagcctggcagatcaaagaattcaagatacgcaagtttctgtgtttttgaatccagcatttctcttgcgctgatagtttgcttgagatattgattctgcaatatatgtttttaaacta

SEQ ID NO: 13923 - DNA, 1829 bp, Zea Mays
acagaagcagtttatcggttttgcacaatgatgctatgttcgaaacttctaatattgataactaaggcctcgagaaagtactgattttactctgaacaaagcagggtaccattctcaccatgaaaggaaaacttaaagtcacctgtatttttaaaaaccaaagttggcagcattgaaggatgaacatattgattacttgaaatttggttgaacaatgcttggtaattggatggtgttttttctgtcaaaagtttgattattattttttgaataagtaggcatcatatccttcaggatttttttgatatggaaatcctaaactgtggacatattggttttttaatcttaaatgtaaacctgaactacctaggaggaaacgtgttaagaagaaataagcagctgaacttgggtggcttagtatttaccggaattcatcattttcttcctactgttctgttcccaattcatttgtgcttgtactatgatgttcctgaactcattgttttatttactttaagtacaagaactgtctttttttccttactagttccctgaactttcagatatattacttcagtcattccaattggaggaatgtttgcaatgacactttggctagggaacagtgcgtacctctacatatctgtcgcatttgcacagatgttgaaggcaataatgcctgtagccgtgtttcttctgggagcagcatttggcctggaagaaatgagctataaaatgctttctatcatgtctgtcatcagtgttggagttattgtggcttctgttggtgaaattacaatcagttgggttggagtggtttaccagatgggtggagttgttgcggaagccctaagacttatcttcattgagatatttctgaagaaaaagggtgtcaagctcaacttgatatccatgatgtactatgttagcccttgcagtgctgtatgcctctttattccctggctgttcttagagaagccaaagatggatgatagtatttcatggaacttcccaccattcacattgttcttaaactgcctgtgcacctttgtactcaatatgtcggttttccttgtcatatcaaggactagtgcgctgacggctcgagttactggtgtcgtgagggattggtccgtagttttgctgtcagctgccatctttgctgatacacagcttaccttcataaacataattggttatgccatagccatagctggtgttgttgcgtataacaaccacaagctcaaggtaaaaccccaagcgaacccacagcaaggcgacgagaacaaggtcatctcaggaagcactcaagatgtggtgttatcagtgagctcagcaaaagaaacttcgtagcaccaaaagtagcacgattttgaaacaattttatttttcacaaaggagaattgtgctctctttcgttgggttggccagctctccttggactatacattctttttccttcccctgggtctggagggaagatattttgtacaatgatatgctcaagatgatgatacgctgccttcactgtcgtaatattgctgctcaaaaaagtgggagcacgccacagatggaaattaggccatgtaaagttgtgttttctcttgaactggtgtagcgactcatcaggtgctccaaaaatggcagccctgaatctttgtacatggttgcttggtggtggtcatgagatgtgatgtaaaacgatatatgtaagcctggcagatcaaagaattcaagatacgcaagtttctgtgtttttgaatccagcatttctcttgcgctgatagtttgcttgagatattgattctgcaatatatgtttttaaacta

SEQ ID NO: 13924 - DNA, 305 bp, Zea Mays
  misc_feature (304)..(305): n is a, c, g, or t
gacggatccgaccgtcccggccagcggcgacggcgagctgccttggggcctggcactccggcagagtcgcagagaacaaacggctgccacagtgccacggcttgctctgcggcgagccttgggcaccgaggcgcctcccatcctctaagctccagttccttcttctcggggaaatcgatccggagagaatggaagagccggattgcccagaaggttccgttcccgaccgcggaggagagcggcggacggcttccctgccgctgccggccgccttcctcgagttcctcagcgagaacggcctggnn

SEQ ID NO: 13925 - DNA, 1159 bp, Zea Mays
  misc_feature (1)..(2): n is a, c, g, or t
nnccggaaattcagattgctggctccaaggcttatcagcaagggaagatctatggaattgatgccgcttctggagctgctatattagcacttgatgttcgaccaggaaatcatgttcttgacctctgtgctgccccaggtgcaaagctttgcatgctcgcagatacgcttggaaccactggttctctgactggtgttgatgttgcaaagcaccgccttgcggcctgtcgtacaatgttgcagaagtattctcttggtgaccgtactcggctctttgttgctgatggaactttgttttcccttttacctgtgaactccaggatgcaaagaatggaagggtcaattggcgttgaagaaaatggaagcatattcccagaatggacttcaaggagatcatggaaggatcggcagaagactaggaaagcaaatgcaaatggtcaacagcacctactggcagcttcagaacctgaactgatatactatggtaaacattcaggattagttggacagtgtaaatctgatgtcttttgtccatcagttgatgatgaagcttgtacatctggctatgacaaggtcctagtggatgcggagtgtactcatgatggatccataaaacatattcaaaaatttgaattctggggatggaaaagtctagatcgccgcgtacttgatgctgaaagaactgagaaccttcttcagcttcagttacatctcctcacaaatggttttaaattgttgaaaaccggtggatcacttgtatatagtacttgcagcttgacagttgcacagaatgaatgcgtggttcaacaattcctttcaacacacccttctgcagaagatcaatttggccgacaattggccctgcagaagtggcggcatccccaaaacactgcgattcgatcctgcagtttcacaaaccagtggtctttttgttgccaagttctgtaaactaccgacttaaagcattttctggtctatcttcctggaccattcatgtcctctcacatgtaaaactgggttttcctgtcagcaactaaattacaatttctgttcttgcagttggattggtcagtcaaatacccaaacgatagcaaaccaggtactcaaatggctgatgttatcggcatgaaaccaaatcagttcaaagagattggtgttct

SEQ ID NO: 13926 - DNA, 1223 bp, Zea Mays
ccggaaattcagattgctggctccaaggcttatcagcaagggaagatctatggaattgatgccgcttctggagctgctatattagcacttgatgttcgaccaggaaatcatgttcttgacctctgtgctgccccaggtgcaaagctttgcatgctcgcagatacgcttggaaccactggttctctgactggtgttgatgttgcaaagcaccgccttgcggcctgtcgtacaatgttgcagaagtattctcttggtgaccgtactcggctctttgttgctgatggaactttgttttcccttttacctgtgaactccaggatgcaaagaatggaagggtcaattggcgttgaagaaaatggaagcatattcccagaatggacttcaaggagatcatggaaggatcggcagaagactaggaaagcaaatgcaaatggtcaacagcacctactggcagcttcagaacctgaactgatatactatggtaaacattcaggattagttggacagtgtaaatctgatgtcttttgtccatcagttgatgatgaagcttgtacatctggctatgacaaggtcctagtggatgcggagtgtactcatgatggatccataaaacatattcaaaaatttgaattctggggatggaaaagtctagatcgccgcgtacttgatgctgaaagaactgagaaccttcttcagcttcagttacatctcctcacaaatggttttaaattgttgaaaaccggtggatcacttgtatatagtacttgcagcttgacagttgcacagaatgaatgcgtggttcaacaattcctttcaacacacccttctgcagttatgctgatgcccagatcatgaaaattatcccttggtatcatgttttaaacttccagatttgcagaagatcaatttggccgacaattggccctgcagaagtggcggcatccccaaaacactgcgattcgatcctgcagtttcacaaaccagtggtctttttgttgccaagttctgtaaactaccgacttaaagcattttctggtctatcttcctggaccattcatgtcctctcacatgtaaaactgggttttcctgtcagcaactaaattacaatttctgttcttgcagttggattggtcagtcaaatacccaaacgatagcaaaccaggtactcaaatggctgatgttatcggcatgaaaccaaatcagttcaaagagattggtgttct

SEQ ID NO: 13927 - DNA, 1227 bp, Zea Mays
ccggaaattcagattgctggctccaaggcttatcagcaagggaagatctatggaattgatgccgcttctggagctgctatattagcacttgatgttcgaccaggaaatcatgttcttgacctctgtgctgccccaggtgcaaagctttgcatgctcgcagatacgcttggaaccactggttctctgactggtgttgatgttgcaaagcaccgccttgcggcctgtcgtacaatgttgcagaagtattctcttggtgaccgtactcggctctttgttgctgatggaactttgttttcccttttacctgtgaactccaggatgcaaagaatggaagggtcaattggcgttgaagaaaatggaagcatattcccagaatggacttcaaggagatcatggaaggatcggcagaagactaggaaagcaaatgcaaatggtcaacagcacctactggcagcttcagaacctgaactgatatactatggtaaacattcaggattagttggacagtgtaaatctgatgtcttttgtccatcagttgatgatgaagcttgtacatctggctatgacaaggtcctagtggatgcggagtgtactcatgatggatccataaaacatattcaaaaatttgaattctggggatggaaaagtctagatcgccgcgtacttgatgctgaaagaactgagaaccttcttcagcttcagttacatctcctcacaaatggttttaaattgttgaaaaccggtggatcacttgtatatagtacttgcagttgcacagaatgaatgcgtggttcaacaattcctttcaacacacccttctgcagaagatcaatttggccgacaattggccctgcagaagtggcggcatccccaaaacactgcgattcgatcctgcagtttcacaaaccagtggtctttttgttgccaagttctgtaaactaccgacttaaagcattttctggtctatcttcctggaccattcatgtcctctcacatgtaaaactgggttttcctgtcagcaactaaattacaagttggttcccaattcccctgcttttttttgtgataaattctcatttaatgtatgcttctaactttggcgagacaaaagtttctgttcttgcagttggattggtcagtcaaatacccaaacgatagcaaaccaggtactcaaatggctgatgttatcggcatgaaaccaaatcagttcaaagagattggtgttct

SEQ ID NO: 13928 - DNA, 1157 bp, Zea Mays
ccggaaattcagattgctggctccaaggcttatcagcaagggaagatctatggaattgatgccgcttctggagctgctatattagcacttgatgttcgaccaggaaatcatgttcttgacctctgtgctgccccaggtgcaaagctttgcatgctcgcagatacgcttggaaccactggttctctgactggtgttgatgttgcaaagcaccgccttgcggcctgtcgtacaatgttgcagaagtattctcttggtgaccgtactcggctctttgttgctgatggaactttgttttcccttttacctgtgaactccaggatgcaaagaatggaagggtcaattggcgttgaagaaaatggaagcatattcccagaatggacttcaaggagatcatggaaggatcggcagaagactaggaaagcaaatgcaaatggtcaacagcacctactggcagcttcagaacctgaactgatatactatggtaaacattcaggattagttggacagtgtaaatctgatgtcttttgtccatcagttgatgatgaagcttgtacatctggctatgacaaggtcctagtggatgcggagtgtactcatgatggatccataaaacatattcaaaaatttgaattctggggatggaaaagtctagatcgccgcgtacttgatgctgaaagaactgagaaccttcttcagcttcagttacatctcctcacaaatggttttaaattgttgaaaaccggtggatcacttgtatatagtacttgcagttgcacagaatgaatgcgtggttcaacaattcctttcaacacacccttctgcagatttgcagaagatcaatttggccgacaattggccctgcagaagtggcggcatccccaaaacactgcgattcgatcctgcagtttcacaaaccagtggtctttttgttgccaagttctgtaaactaccgacttaaagcattttctggtctatcttcctggaccattcatgtcctctcacatgtaaaactgggttttcctgtcagcaactaaattacaatttctgttcttgcagttggattggtcagtcaaatacccaaacgatagcaaaccaggtactcaaatggctgatgttatcggcatgaaaccaaatcagttcaaagagattggtgttct

SEQ ID NO: 13929 - DNA, 5476 bp, Zea Mays
ctttcagtctttcttcattcttcttcctatgtgaacaatataggtggtgggaccctgctggggcttattccttatcggaaatagagcaacaagttcacttggataaaaagaagaaacagcttgcgtacgtataacaaggagtcctttattattattcttattatcttagtgtaaatattattattattaggggcgtttacagcgtagcaagttcactcttgcaagcaagggacttttacaagagcatgtagctagttagttcatttggagtgtgaacatgtcttatttgcacacttgcttttttcccctctctttattttctccatcttcaggatggctattattagctcctttgcatgcgttcatggaattctgcgtcagaaaaccaaaacggaaaatagcattattggtcagtgtaatatacatgatatatatatgctacggtggagttattaggatgatatatctctactactacttatgttagtagtgtaggcgtccacacaccctctcggcgcatggttctgcctctgcagccgcgacacccgcgcgtgccttcgcctccgccgccgcgatggccgtgcctctgcccccgcctcctccgccctcgcgacgctgcgccctcccccgcgatgcctgcgccttcgtccccgtgatgctcgcgcctacccccgcctcctctgcccccgcgacaccgcgcgcgcagcctcctccccgcgatgcccgcccaagctcccaaatgccggcccccgtctcctccaccgcgactcccctcgctctcccgagactcccagatgctggcccccgtatcctcggccctgatgccgccgcgattcccagatgccggcccccgtatcctcggccccgcgctcgctctcctgagctccgacgggctcccgccctagcccctgacaccatgttgtgcccaaccctaaacctagccaccacgccgtcaacaacgccaccttccttcctcgccaccacaccttctttagatggaaggcgcgactggtggcatcttcctgatctcggagcacgtctaatcctcgctccaaatgctgctccgcccccaatccgtgcggcatcttcagatggaagccgggacaatgccccatccccctctcccgagccccgacgactgacattccagggatgtcgctctgcgatcctcacctcctcgtcgttggcggtcgcgcgacctcctgaccgtcgtctccgcccgcgagatccccccgactcgcccacctctccgtccacagccgcctccatcacgcacctccacgccgacgagaaggctcgcccacctctcagtccacgactgcctacgacgcgtcttctgaataaagatctctcgaagcacccggtggatgggttctctgctgggctggtcgacgacagcaatgtcttcgagtggcaggtcaccatcatcggaccgcctgacaccctatagattggttgttggacctgtttggtgttcttcatgatgggaagaagtcgtacccgaccattctggcataacttggtttgcaagttgtgaacaatgttgatgatgcagagtttatattagcccatggtactgaagtctttggttcaccttctagcaatcctcttcccaaaagtctcgagaagcttgagcaggttctaatgcttggcctagaaaagggacttccaatggtgctgcctaatccagaattccagattatgtcactgtcgaagcttgagatcttcgtgtcatgtctgggtttggaggctcgtcggcaaccggacaggaaaacagcaaggcggaagggcattgctcgatcgctggtccgatgagtggcactgtcagggagcgtgacaggggcgacaaatctagacctccacgtcggtaagatgttgtggcaaaatgtcagtgagctcacattttgaggagctgagggtcaatgtcagcgagctcactgttgaggagctgagggtccctgagtacctgcagttcaaggaacaacttatggaagaaggctttaaggttgaggctgggagaacttaccatcggacagttctagagatacttgaccaattggaaaaaatttggcttacattgatggatgaatatgatttatatgaagttcctggtatctatcggcttcatggtatatctctactactcttaagaagataccaggtatgttcctttcctttcttttattttcttagccccatctttatcatgttttcaccattacagagtttgcctaccgcccccgttcgcccgcaagcaaactctagccgaggaagacgcggtttctcacctctgcgccctcgccagtcccacgagccccgccttccctagcctctcaatgcctccagattctctaccccttgccccccagtcgttgtttccgcccgcgccgctgacccatgacctcgcatgcggggctagggtttccacatgcgatggaagtagcggtgatgactttgctgttgtttgcatctgcctcgacttcctcggtccggtcttgccatctaccagcgctgcctaggtttgcctctcctgtcctgcagtgctgaagttccgcgtgtgctggttggtgtgtgttacgcgtcttggaacgagagggcaacttcgatgcggggctttgattggctgttttgtttgtggtgggggtagttgggtttgcgacattttttaggaaaccgattggtttcgtttcagcttgttttcagagaagggatagtggatttgtcaacactagactggattccataaaaatttgatagaatcagtgctttcagctttgagctagactacacatttttctgtgaggttgcaccatttttccctagataacttctatgttgaaatggtttagttctgaagctgtcattgttagataataacaaggcaaatagatggttactgtggcagtcaaaagtttgaagccagatgcgcttcaaggtcatagagaatgggtggtaagtattgtatgtcatttttatttttgaatggagtgttggaggtatggtttttaaaaataatcacatttccaggcagaagttgactttctgggacagttgcatcataaacaccttattaagctgattggatattgtattgaggatgatcaaaggttacttgtatatgaatttcatggcacggggaagtcttgaaaatcatcttttcagaagtaagcaatcacctaacagagttaatgctttaagttgagtagatttagtggctttattaataatttgtttccccacttaggcctaaccagtttttttcttcactaagtcttctttcattttttgagcaaccttggatttttttggttctctatcctctgtgacatcagagataattacattctaacttgatttgattatggtaatgtagacctgaacattttaacctgcccttattaagtttgatctgttccagttacacctgttcagatcttcttagttaaatactagatgaatttcgcacacacaaaaaagttgcaatagtactgtagtgagcaaggatacatgcctactaccaatggtggtgttcattctattgctaacttctatattggtattaggtcatacccatgtaaccattattattttgaaggggggtagggacattaccagctttccacaaagttgattttattttatgtgcctaatcttgtcgaccataatttttctatctgctcgttcttatgatcctgtcatcttactttgtttaatcttgaagggactcttcccctaccttggtccaacaggatgaagattgctctaggtgccgcgaaaggactagccttcctccatggaggtcccaaacctgttatttacaaggattttaagacattgaatgttcttcttgatgtggagtacaacgcaaaactatctgatttcggtttagcaaaagctggtcatcagggtgaaaaaactcatgtatctactcgggttgttggcacctatggttatgttgcaccagagtatgtaatgacaggtatcagggataaacttttgacttcagtagctacctatagcagaaattatgtaccttgtttatctgttgcatgttggttctttacactgttttctgagcttgtagttattctcgtgttcactccatattggatagtaaattggcttaacatttttgtccgaagacataaaactaaggtgccattacaaatgttcttctttcaagtgaaactgtgtttttcgtttttacatgcagtaaaggttgtaaggctgtagacttatataatgaatcttgcgctccacttctttgggacatgatttaacatttcttaacatttctcactctataacgctttcagatcacttttcatatgttttttagatgcactttttttttggagactaagccctaagggcaacaatggagatgaccagcgtcttggtttatcaagaggaagttaatccctctcaactgaaactcccatcaaatttggggcgtagtgtgtcgattcagttgtaactattatatgtcattttgggttagcaaactgtatctactaatttctcagacttatgccttttgagctagaaacttgtgtaagaattttttgcactcagtgacatgctggatagtgcgagtagcagattacaatagtgacggatgaacattgtattttactttacatgatggatttttttgatgtgtaaggcttttaaggcatgtaaaaattcttaacttttaaaagatgctaacacgaatataaaattgcaatcattattcttgaatttcaatgtatcttatcataacatgttcactccgtagcaacgtacgggcatttacctagtatatatatatatacgcacgtggtgcagtcgaagttgagggtgagcgggaacggcagcggcgcgccgcactgcgcggggaggtcgcggatggcgtcggcgttgagcggctggtaattggccgccgcctgcttgacgcactcgcacgcctgccgccgctccgccgggccggacggcatggccctgatccgcttcacgccggcgcagcactcggcggccggggccgcctccttgcccgtcacgtagccgacgcaggggcgcaggcttgcgtccacgtccgcgcagttcacgtccgccctaaccgccgccgccgccagcaggaccaacgccactgctgccaccgctgttgttgcggcgccgcccttcttcttcatcatcgccatcgatcgatctgtgtctctctctctcccgaacttgacttgctgctgctggagctcgatcttagcttgttgctgctgcgttcatggagcggctcgagcgctggggttttatagggcttgctgggtcggcgaagcggttcagcatcttgttggtgctgatgttgctcgtaatggcagcgctttgagtgatgcattggtacgccaaaactggcagatggatagggtcccttttttttggccataccgtgcatgaacgccacggctagctgccgttgcaaccgtttaatgcttcgctt

SEQ ID NO: 13930 - DNA, 6150 bp, Zea Mays
cggaaatagagcaacaagttcacttggataaaaagaagaaacagcttgcgtacgtataacaaggagtcctttattattattcttattatcttagtgtaaatattattattattaggggcgtttacagcgtagcaagttcactcttgcaagcaagggacttttacaagagcatgtagctagttagttcatttggagtgtgaacatgtcttatttgcacacttgcttttttcccctctctttattttctccatcttcaggatggctattattagctcctttgcatgcgttcatggaattctgcgtcagaaaaccaaaacggaaaatagcattattggtcagtgtaatatacatgatatatatatgctacggtggagttattaggatgatatatctctactactacttatgttagtagtgtaggcgtccacacaccctctcggcgcatggttctgcctctgcagccgcgacacccgcgcgtgccttcgcctccgccgccgcgatggccgtgcctctgcccccgcctcctccgccctcgcgacgctgcgccctcccccgcgatgcctgcgccttcgtccccgtgatgctcgcgcctacccccgcctcctctgcccccgcgacaccgcgcgcgcagcctcctccccgcgatgcccgcccaagctcccaaatgccggcccccgtctcctccaccgcgactcccctcgctctcccgagactcccagatgctggcccccgtatcctcggccctgatgccgccgcgattcccagatgccggcccccgtatcctcggccccgcgctcgctctcctgagctccgacgggctcccgccctagcccctgacaccatgttgtgcccaaccctaaacctagccaccacgccgtcaacaacgccaccttccttcctcgccaccacaccttctttagatggaaggcgcgactggtggcatcttcctgatctcggagcacgtctaatcctcgctccaaatgctgctccgcccccaatccgtgcggcatcttcagatggaagccgggacaatgccccatccccctctcccgagccccgacgactgacattccagggatgtcgctctgcgatcctcacctcctcgtcgttggcggtcgcgcgacctcctgaccgtcgtctccgcccgcgagatccccccgactcgcccacctctccgtccacagccgcctccatcacgcacctccacgccgacgagaaggctcgcccacctctcagtccacgactgcctacgacgcgtcttctgaataaagatctctcgaagcacccggtggatgggttctctgctgggctggtcgacgacagcaatgtcttcgagtggcaggtcaccatcatcggaccgcctgacaccctatagtgagtcagatcctctccatctcaagcgtgcttccatgccttgtcaagatgaattgcttgtttgttgtgtcggtgccatgagcaatggactacgatggtgtttgtgtggagaactggagatctcgtctgtgtgttactgtggaccggcatctgggaccatatgttttatagaatatattccaaaagcttcacttctcagagctaatcaaatttgagttatcacgtttttagtagaacaattcaacatattcagatcagggtcatggatatgttctcggtcaagagtctttatctctactcggattggttgttggacctgtttggtgttcttcatgatgggaagaagtcgtacccgaccattctggcatttgtgaacaatgttgatgatgcagagtttatattagcccatggtactgaagtctttggttcaccttctagcaatcctcttcccaaaagtctcgagaagcttgagcaggttctaatgcttggcctagaaaagggacttccaatggtgctgcctaatccagaattccagattatgtcactgtcgaagcttgagatcttcgtgtcatgtctggagctgagggtcaatgtcagcgagctcactgttgaggagctgagggtccctgagtacctgcagttcaaggaacaacttatggaagaaggctttaaggttgaggctgggagaacttaccatcggacagttctagagatacttgaccaattggaaaaagtatgtatgttcctaacttttctatttgagtatatttatatatattgggttgcttgttggaactaattttttgcgctccgaacttctgaaaatctttgccatatccatttgatgattatgttctgattaagtgatggtgtctaagcaccaaaaatgaaagcaccctgactcccgcaactgaaaattgatatcaaggtctttctgtttgatcttgttcactgagaatatgatgtacccattcacattctttgctttcccatatatttttctagctttcaataggatccttgtgaacccaatccactatcatttctgcttaagttgtctccctaaaatgaaagaagtatagacattgacttaggaagcatgacgaggtaaaatgaaaattaaacaaatcctgactatagcacacattcacgccaaagaccttaaattgcttcatgttttagcccatttcccagtgtgtgaatggtgttgttgatcctgaaataaaattgttggttttctgtgctgtttttcttcacaaattctggacagtaggtatgattcatttttatcactgaatatattagaattcttatcttttcagtgtgcaaaatcatgttctcctattgatagaagcatttatttagatttggcttacattgatggatgaatatgatttatatgaagttcctggtatctatcggcttcatggtatatctctactactcttaagaagataccaggtatgttcctttcctttcttttattttcttagccccatctttatcatgttttcaccattacagagtttgcctaccgcccccgttcgcccgcaagcaaactctagccgaggaagacgcggtttctcacctctgcgccctcgccagtcccacgagccccgccttccctagcctctcaatgcctccagattctctaccccttgccccccagtcgttgtttccgcccgcgccgctgacccatgacctcgcatgcggggctagggtttccacatgcgatggaagtagcggtgatgactttgctgttgtttgcatctgcctcgacttcctcggtccggtcttgccatctaccagcgctgcctaggtttgcctctcctgtcctgcagtgctgaagttccgcgtgtgctggttggtgtgtgttacgcgtcttggaacgagagggcaacttcgatgcggggctttgattggctgttttgtttgtggtgggggtagttgggtttgcgacattttttaggaaaccgattggtttcgtttcagcttgttttcagagaagggatagtggatttgtcaacactagactggattccataaaaatttgatagaatcagtgctttcagctttgagctagactacacatttttctgtgaggttgcaccatttttccctagataacttctatgttgaaatggtttagttctgaagctgtcattgttagataataacaaggcaaatagatggttactgtggcagtcaaaagtttgaagccagatgcgcttcaaggtcatagagaatgggtggtaagtattgtatgtcatttttatttttgaatggagtgttggaggtatggtttttaaaaataatcacatttccaggcagaagttgactttctgggacagttgcatcataaacaccttattaagctgattggatattgtattgaggatgatcaaaggttacttgtatatgaatttcatggcacggggaagtcttgaaaatcatcttttcagaagtaagcaatcacctaacagagttaatgctttaagttgagtagatttagtggctttattaataatttgtttccccacttaggcctaaccagtttttttcttcactaagtcttctttcattttttgagcaaccttggatttttttggttctctatcctctgtgacatcagagataattacattctaacttgatttgattatggtaatgtagacctgaacattttaacctgcccttattaagtttgatctgttccagttacacctgttcagatcttcttagttaaatactagatgaatttcgcacacacaaaaaagttgcaatagtactgtagtgagcaaggatacatgcctactaccaatggtggtgttcattctattgctaacttctatattggtattaggtcatacccatgtaaccattattattttgaaggggggtagggacattaccagctttccacaaagttgattttattttatgtgcctaatcttgtcgaccataatttttctatctgctcgttcttatgatcctgtcatcttactttgtttaatcttgaagggactcttcccctaccttggtccaacaggatgaagattgctctaggtgccgcgaaaggactagccttcctccatggaggtcccaaacctgttatttacaaggattttaagacattgaatgttcttcttgatgtggagtacaacgcaaaactatctgatttcggtttagcaaaagctggtcatcagggtgaaaaaactcatgtatctactcgggttgttggcacctatggttatgttgcaccagagtatgtaatgacaggtatcagggataaacttttgacttcagtagctacctatagcagaaattatgtaccttgtttatctgttgcatgttggttctttacactgttttctgagcttgtagttattctcgtgttcactccatattggatagtaaattggcttaacatttttgtccgaagacataaaactaaggtgccattacaaatgttcttctttcaagtgaaactgtgtttttcgtttttacatgcagtaaaggttgtaaggctgtagacttatataatgaatcttgcgctccacttctttgggacatgatttaacatttcttaacatttctcactctataacgctttcagatcacttttcatatgttttttagatgcactttttttttggagactaagccctaagggcaacaatggagatgaccagcgtcttggtttatcaagaggaagttaatccctctcaactgaaactcccatcaaatttggggcgtagtgtgtcgattcagttgtaactattatatgtcattttgggttagcaaactgtatctactaatttctcagacttatgccttttgagctagaaacttgtgtaagaattttttgcactcagtgacatgctggatagtgcgagtagcagattacaatagtgacggatgaacattgtattttactttacatgatggatttttttgatgtgtaaggcttttaaggcatgtaaaaattcttaacttttaaaagatgctaacacgaatataaaattgcaatcattattcttgaatttcaatgtatcttatcataacatgttcactccgtagcaacgtacgggcatttacctagtatatatatatatacgcacgtggtgcagtcgaagttgagggtgagcgggaacggcagcggcgcgccgcactgcgcggggaggtcgcggatggcgtcggcgttgagcggctggtaattggccgccgcctgcttgacgcactcgcacgcctgccgccgctccgccgggccggacggcatggccctgatccgcttcacgccggcgcagcactcggcggccggggccgcctccttgcccgtcacgtagccgacgcaggggcgcaggcttgcgtccacgtccgcgcagttcacgtccgccctaaccgccgccgccgccagcaggaccaacgccactgctgccaccgctgttgttgcggcgccgcccttcttcttcatcatcgccatcgatcgatctgtgtctctctctctcccgaacttgacttgctgctgctggagctcgatcttagcttgttgctgctgcgttcatggagcggctcgagcgctggggttttatagggcttgctgggtcggcgaagcggttcagcatcttgttggtgctgatgttgctcgtaatggcagcgctttgagtgatgcattggtacgccaaaactggcagatggatagggtcccttttttttggccataccgtgcatgaacgccacggctagctgccgttgcaaccgtttaatgcttcgctt

SEQ ID NO: 13931 - DNA, 4750 bp, Zea Mays
caagttcacttggataaaaagaagaaacagcttgcgtacgtataacaaggagtcctttattattattcttattatcttagtgtaaatattattattattaggggcgtttacagcgtagcaagttcactcttgcaagcaagggacttttacaagagcatgtagctagttagttcatttggagtgtgaacatgtcttatttgcacacttgcttttttcccctctctttattttctccatcttcaggatggctattattagctcctttgcatgcgttcatggaattctgcgtcagaaaaccaaaacggaaaatagcattattggtcagtgtaatatacatgatatatatatgctacggtggagttattaggatgatatatctctactactacttatgttagtagtgtaggcgtccacacaccctctcggcgcatggttctgcctctgcagccgcgacacccgcgcgtgccttcgcctccgccgccgcgatggccgtgcctctgcccccgcctcctccgccctcgcgacgctgcgccctcccccgcgatgcctgcgccttcgtccccgtgatgctcgcgcctacccccgcctcctctgcccccgcgacaccgcgcgcgcagcctcctccccgcgatgcccgcccaagctcccaaatgccggcccccgtctcctccaccgcgactcccctcgctctcccgagactcccagatgctggcccccgtatcctcggccctgatgccgccgcgattcccagatgccggcccccgtatcctcggccccgcgctcgctctcctgagctccgacgggctcccgccctagcccctgacaccatgttgtgcccaaccctaaacctagccaccacgccgtcaacaacgccaccttccttcctcgccaccacaccttctttagatggaaggcgcgactggtggcatcttcctgatctcggagcacgtctaatcctcgctccaaatgctgctccgcccccaatccgtgcggcatcttcagatggaagccgggacaatgccccatccccctctcccgagccccgacgactgacattccagggatgtcgctctgcgatcctcacctcctcgtcgttggcggtcgcgcgacctcctgaccgtcgtctccgcccgcgagatccccccgactcgcccacctctccgtccacagccgcctccatcacgcacctccacgccgacgagaaggctcgcccacctctcagtccacgactgcctacgacgcgtcttctgaataaagatctctcgaagcacccggtggatgggttctctgctgggctggtcgacgacagcaatgtcttcgagtggcaggtcaccatcatcggaccgcctgacaccctatagattggttgttggacctgtttggtgttcttcatgatgggaagaagtcgtacccgaccattctggcatgtatgttggtagtttctctcgagaacttggtttgcaagttgtgaacaatgttgatgatgcagagtttatattagcccatggtactgaagtctttggttcaccttctagcaatcctcttcccaaaagtctcgagaagcttgagcaggttctaatgcttggcctagaaaagggacttccaatggtgctgcctaatccagaattccagattatgtcactgtcgaagcttgagatcttcgtgtcatgtctgggtttggaggctcgtcggcaaccggacaggaaaacagcaaggcggaagggcattgctcgatcgctggtccgatgagtggcactgtcagggagcgtgacaggggcgacaaatctagacctccacgtcggtaagatgttgtggcaaaatgtcagtgagctcacattttgaggagctgagggtcaatgtcagcgagctcactgttgaggagctgagggtccctgagtacctgcagttcaaggaacaacttatggaagaaggctttaaggttgaggctgggagaacttaccatcggacagttctagagatacttgaccaattggaaaaaatttggcttacattgatggatgaatatgatttatatgaagttcctggtatctatcggcttcatggtatatctctactactcttaagaagataccaggtatgttcctttcctttcttttattttcttagccccatctttatcatgttttcaccattacagagtttgcctaccgcccccgttcgcccgcaagcaaactctagccgaggaagacgcggtttctcacctctgcgccctcgccagtcccacgagccccgccttccctagcctctcaatgcctccagattctctaccccttgccccccagtcgttgtttccgcccgcgccgctgacccatgacctcgcatgcggggctagggtttccacatgcgatggaagtagcggtgatgactttgctgttgtttgcatctgcctcgacttcctcggtccggtcttgccatctaccagcgctgcctaggtttgcctctcctgtcctgcagtgctgaagttccgcgtgtgctggttggtgtgtgttacgcgtcttggaacgagagggcaacttcgatgcggggctttgattggctgttttgtttgtggtgggggtagttgggtttgcgacattttttaggaaaccgattggtttcgtttcagcttgttttcagagaagggatagtggatttgtcaacactagactggattccataaaaatttgatagaatcagtgctttcagctttgagctagactacacatttttctgtgaggttgcaccatttttccctagataacttctatgttgaaatggtttagttctgaagctgtcattgttagataataacaaggcaaatagatggttactgtggcagtcaaaagtttgaagccagatgcgcttcaaggtcatagagaatgggtggcagaagttgactttctgggacagttgcatcataaacaccttattaagctgattggatattgtattgaggatgatcaaaggttacttgtatatgaatttcatggcacggggaagtcttgaaaatcatcttttcagaagatgaagattgctctaggtgccgcgaaaggactagccttcctccatggaggtcccaaacctgttatttacaaggattttaagacattgaatgttcttcttgatgtggagtacaacgcaaaactatctgatttcggtttagcaaaagctggtcatcagggtgaaaaaactcatgtatctactcgggttgttggcacctatggttatgttgcaccagagtatgtaatgacaggtatcagggataaacttttgacttcagtagctacctatagcagaaattatgtaccttgtttatctgttgcatgttggttctttacactgttttctgagcttgtagttattctcgtgttcactccatattggatagtaaattggcttaacatttttgtccgaagacataaaactaaggtgccattacaaatgttcttctttcaagtgaaactgtgtttttcgtttttacatgcagtaaaggttgtaaggctgtagacttatataatgaatcttgcgctccacttctttgggacatgatttaacatttcttaacatttctcactctataacgctttcagatcacttttcatatgttttttagatgcactttttttttggagactaagccctaagggcaacaatggagatgaccagcgtcttggtttatcaagaggaagttaatccctctcaactgaaactcccatcaaatttggggcgtagtgtgtcgattcagttgtaactattatatgtcattttgggttagcaaactgtatctactaatttctcagacttatgccttttgagctagaaacttgtgtaagaattttttgcactcagtgacatgctggatagtgcgagtagcagattacaatagtgacggatgaacattgtattttactttacatgatggatttttttgatgtgtaaggcttttaaggcatgtaaaaattcttaacttttaaaagatgctaacacgaatataaaattgcaatcattattcttgaatttcaatgtatcttatcataacatgttcactccgtagcaacgtacgggcatttacctagtatatatatatatacgcacgtggtgcagtcgaagttgagggtgagcgggaacggcagcggcgcgccgcactgcgcggggaggtcgcggatggcgtcggcgttgagcggctggtaattggccgccgcctgcttgacgcactcgcacgcctgccgccgctccgccgggccggacggcatggccctgatccgcttcacgccggcgcagcactcggcggccggggccgcctccttgcccgtcacgtagccgacgcaggggcgcaggcttgcgtccacgtccgcgcagttcacgtccgccctaaccgccgccgccgccagcaggaccaacgccactgctgccaccgctgttgttgcggcgccgcccttcttcttcatcatcgccatcgatcgatctgtgtctctctctctcccgaacttgacttgctgctgctggagctcgatcttagcttgttgctgctgcgttcatggagcggctcgagcgctggggttttatagggcttgctgggtcggcgaagcggttcagcatcttgttggtgctgatgttgctcgtaatggcagcgctttgagtgatgcattggtacgccaaaactggcagatggatagggtcccttttttttggccataccgtgcatgaacgccacggctagctgccgttgcaaccgtttaatgcttcgctt

SEQ ID NO: 13932 - DNA, 4941 bp, Zea Mays
aaaaagaagaaacagcttgcgtacgtataacaaggagtcctttattattattcttattatcttagtgtaaatattattattattaggggcgtttacagcgtagcaagttcactcttgcaagcaagggacttttacaagagcatgtagctagttagttcatttggagtgtgaacatgtcttatttgcacacttgcttttttcccctctctttattttctccatcttcaggatggctattattagctcctttgcatgcgttcatggaattctgcgtcagaaaaccaaaacggaaaatagcattattggtcagtgtaatatacatgatatatatatgctacggtggagttattaggatgatatatctctactactacttatgttagtagtgtaggcgtccacacaccctctcggcgcatggttctgcctctgcagccgcgacacccgcgcgtgccttcgcctccgccgccgcgatggccgtgcctctgcccccgcctcctccgccctcgcgacgctgcgccctcccccgcgatgcctgcgccttcgtccccgtgatgctcgcgcctacccccgcctcctctgcccccgcgacaccgcgcgcgcagcctcctccccgcgatgcccgcccaagctcccaaatgccggcccccgtctcctccaccgcgactcccctcgctctcccgagactcccagatgctggcccccgtatcctcggccctgatgccgccgcgattcccagatgccggcccccgtatcctcggccccgcgctcgctctcctgagctccgacgggctcccgccctagcccctgacaccatgttgtgcccaaccctaaacctagccaccacgccgtcaacaacgccaccttccttcctcgccaccacaccttctttagatggaaggcgcgactggtggcatcttcctgatctcggagcacgtctaatcctcgctccaaatgctgctccgcccccaatccgtgcggcatcttcagatggaagccgggacaatgccccatccccctctcccgagccccgacgactgacattccagggatgtcgctctgcgatcctcacctcctcgtcgttggcggtcgcgcgacctcctgaccgtcgtctccgcccgcgagatccccccgactcgcccacctctccgtccacagccgcctccatcacgcacctccacgccgacgagaaggctcgcccacctctcagtccacgactgcctacgacgcgtcttctgaataaagatctctcgaagcacccggtggatgggttctctgctgggctggtcgacgacagcaatgtcttcgagtggcaggtcaccatcatcggaccgcctgacaccctatatagaacaattcaacatattcagatcagggtcatggatatgttctcggtcaagagtctttatctctactcggattggttgttggacctgtttggtgttcttcatgatgggaagaagtcgtacccgaccattctggcatgtatgttggtagtttctctcgaggtttgtttcctgtcacttctgcttagcatcagaatggatttagtgtaatcggtttttcattttttcatactatagaacttggtttgcaagttgtgaacaatgttgatgatgcagagtttatattagcccatggtactgaagtctttggttcaccttctagcaatcctcttcccaaaagtctcgagaagcttgagcaggttctaatgcttggcctagaaaagggacttccaatggtgctgcctaatccagaattccagattatgtcactgtcgaagcttgagatcttcgtgtcatgtctgggtttggaggctcgtcggcaaccggacaggaaaacagcaaggcggaagggcattgctcgatcgctggtccgatgagtggcactgtcagggagcgtgacaggggcgacaaatctagacctccacgtcggtaagatgttgtggcaaaatgtcagtgagctcacattttgaggagctgagggtcaatgtcagcgagctcactgttgaggagctgagggtccctgagtacctgcagttcaaggaacaacttatggaagaagggtatgaattcttatattcaccaatgaagatgatccttttggtactattacaggagcaacaacaataataatcaatggcacctaaacattttcttatcctctaagttcatgtatttcatgtttactaatcattcctattttagctttaaggttgaggctgggagaacttaccatcggacagttctagagatacttgaccaattggaaaaatgtgcaaaatcatgttctcctattgatagaagcatttatttagatttggcttacattgatggatgaatatgatttatatgaagttcctggtatctatcggcttcatggtatatctctactactcttaagaagataccagataataacaaggcaaatagatggttactgtggcagtcaaaagtttgaagccagatgcgcttcaaggtcatagagaatgggtggcagaagttgactttctgggacagttgcatcataaacaccttattaagctgattggatattgtattgaggatgatcaaaggttacttgtatatgaatttcatggcacggggaagtcttgaaaatcatcttttcagaagtaagcaatcacctaacagagttaatgctttaagttgagtagatttagtggctttattaataatttgtttccccacttaggcctaaccagtttttttcttcactaagtcttctttcattttttgagcaaccttggatttttttggttctctatcctctgtgacatcagagataattacattctaacttgatttgattatggtaatgtagacctgaacattttaacctgcccttattaagtttgatctgttccagttacacctgttcagatcttcttagttaaatactagatgaatttcgcacacacaaaaaagttgcaatagtactgtagtgagcaaggatacatgcctactaccaatggtggtgttcattctattgctaacttctatattggtattaggtcatacccatgtaaccattattattttgaaggggggtagggacattaccagctttccacaaagttgattttattttatgtgcctaatcttgtcgaccataatttttctatctgctcgttcttatgatcctgtcatcttactttgtttaatcttgaagggactcttcccctaccttggtccaacaggatgaagattgctctaggtgccgcgaaaggactagccttcctccatggaggtcccaaacctgttatttacaaggattttaagacattgaatgttcttcttgatgtggagtacaacgcaaaactatctgatttcggtttagcaaaagctggtcatcagggtgaaaaaactcatgtatctactcgggttgttggcacctatggttatgttgcaccagagtatgtaatgacaggtatcagggataaacttttgacttcagtagctacctatagcagaaattatgtaccttgtttatctgttgcatgttggttctttacactgttttctgagcttgtagttattctcgtgttcactccatattggatagtaaattggcttaacatttttgtccgaagacataaaactaaggtgccattacaaatgttcttctttcaagtgaaactgtgtttttcgtttttacatgcagtaaaggttgtaaggctgtagacttatataatgaatcttgcgctccacttctttgggacatgatttaacatttcttaacatttctcactctataacgctttcagatcacttttcatatgttttttagatgcactttttttttggagactaagccctaagggcaacaatggagatgaccagcgtcttggtttatcaagaggaagttaatccctctcaactgaaactcccatcaaatttggggcgtagtgtgtcgattcagttgtaactattatatgtcattttgggttagcaaactgtatctactaatttctcagacttatgccttttgagctagaaacttgtgtaagaattttttgcactcagtgacatgctggatagtgcgagtagcagattacaatagtgacggatgaacattgtattttactttacatgatggatttttttgatgtgtaaggcttttaaggcatgtaaaaattcttaacttttaaaagatgctaacacgaatataaaattgcaatcattattcttgaatttcaatgtatcttatcataacatgttcactccgtagcaacgtacgggcatttacctagtatatatatatatacgcacgtggtgcagtcgaagttgagggtgagcgggaacggcagcggcgcgccgcactgcgcggggaggtcgcggatggcgtcggcgttgagcggctggtaattggccgccgcctgcttgacgcactcgcacgcctgccgccgctccgccgggccggacggcatggccctgatccgcttcacgccggcgcagcactcggcggccggggccgcctccttgcccgtcacgtagccgacgcaggggcgcaggcttgcgtccacgtccgcgcagttcacgtccgccctaaccgccgccgccgccagcaggaccaacgccactgctgccaccgctgttgttgcggcgccgcccttcttcttcatcatcgccatcgatcgatctgtgtctctctctctcccgaacttgacttgctgctgctggagctcgatcttagcttgttgctgctgcgttcatggagcggctcgagcgctggggttttatagggcttgctgggtcggcgaagcggttcagcatcttgttggtgctgatgttgctcgtaatggcagcgctttgagtgatgcattggtacgccaaaactggcagatggatagggtcccttttttttggccataccgtgcatgaacgccacggctagctgccgttgcaaccgtttaatgcttcgctt

SEQ ID NO: 13933 - DNA, 5163 bp, Zea Mays
gaagaaacagcttgcgtacgtataacaaggagtcctttattattattcttattatcttagtgtaaatattattattattaggggcgtttacagcgtagcaagttcactcttgcaagcaagggacttttacaagagcatgtagctagttagttcatttggagtgtgaacatgtcttatttgcacacttgcttttttcccctctctttattttctccatcttcaggatggctattattagctcctttgcatgcgttcatggaattctgcgtcagaaaaccaaaacggaaaatagcattattggtcagtgtaatatacatgatatatatatgctacggtggagttattaggatgatatatctctactactacttatgttagtagtgtaggcgtccacacaccctctcggcgcatggttctgcctctgcagccgcgacacccgcgcgtgccttcgcctccgccgccgcgatggccgtgcctctgcccccgcctcctccgccctcgcgacgctgcgccctcccccgcgatgcctgcgccttcgtccccgtgatgctcgcgcctacccccgcctcctctgcccccgcgacaccgcgcgcgcagcctcctccccgcgatgcccgcccaagctcccaaatgccggcccccgtctcctccaccgcgactcccctcgctctcccgagactcccagatgctggcccccgtatcctcggccctgatgccgccgcgattcccagatgccggcccccgtatcctcggccccgcgctcgctctcctgagctccgacgggctcccgccctagcccctgacaccatgttgtgcccaaccctaaacctagccaccacgccgtcaacaacgccaccttccttcctcgccaccacaccttctttagatggaaggcgcgactggtggcatcttcctgatctcggagcacgtctaatcctcgctccaaatgctgctccgcccccaatccgtgcggcatcttcagatggaagccgggacaatgccccatccccctctcccgagccccgacgactgacattccagggatgtcgctctgcgatcctcacctcctcgtcgttggcggtcgcgcgacctcctgaccgtcgtctccgcccgcgagatccccccgactcgcccacctctccgtccacagccgcctccatcacgcacctccacgccgacgagaaggctcgcccacctctcagtccacgactgcctacgacgcgtcttctgaataaagatctctcgaagcacccggtggatgggttctctgctgggctggtcgacgacagcaatgtcttcgagtggcaggtcaccatcatcggaccgcctgacaccctatagattggttgttggacctgtttggtgttcttcatgatgggaagaagtcgtacccgaccattctggcatgtatgttggtagtttctctcgagaacttggtttgcaagttgtgaacaatgttgatgatgcagagtttatattagcccatggtactgaagtctttggttcaccttctagcaatcctcttcccaaaagtctcgagaagcttgagcaggttctaatgcttggcctagaaaagggacttccaatggtgctgcctaatccagaattccagattatgtcactgtcgaagcttgagatcttcgtgtcatgtctggtatgttttttttgaacacgctggacatgtgtgtatccttatagagtagagagataaaatgagaaacaatcccatacaaagcaacttctccaccttacctaggagataagataaagttgaagcaaaacaccaaagttaatcatctaatatacatgtaaacaatgaaccgaccttactgaaaacactcgcactggaccctctctgcgaccaaaaaaatagctcctagagtttttagggactagaggctcaactcatctttgtagaagtgttgtgctgatggaagtgatggggttgcaccataaaaaatgttcctgtaattccataagtacttatacaatagggtttggaggctcgtcggcaaccggacaggaaaacagcaaggcggaagggcattgctcgatcgctggtccgatgagtggcactgtcagggagcgtgacaggggcgacaaatctagacctccacgtcggtaagatgttgtggcaaaatgtcagtgagctcacattttgaggagctgagggtcaatgtcagcgagctcactgttgaggagctgagggtccctgagtacctgcagttcaaggaacaacttatggaagaagggtatgaattcttatattcaccaatgaagatgatccttttggtactattacaggagcaacaacaataataatcaatggcacctaaacattttcttatcctctaagttcatgtatttcatgtttactaatcattcctattttagctttaaggttgaggctgggagaacttaccatcggacagttctagagatacttgaccaattggaaaaagtatgtatgttcctaacttttctatttgagtatatttatatatattgggttgcttgttggaactaattttttgcgctccgaacttctgaaaatctttgccatatccatttgatgattatgttctgattaagtgatggtgtctaagcaccaaaaatgaaagcaccctgactcccgcaactgaaaattgatatcaaggtctttctgtttgatcttgttcactgagaatatgatgtacccattcacattctttgctttcccatatatttttctagctttcaataggatccttgtgaacccaatccactatcatttctgcttaagttgtctccctaaaatgaaagaagtatagacattgacttaggaagcatgacgaggtaaaatgaaaattaaacaaatcctgactatagcacacattcacgccaaagaccttaaattgcttcatgttttagcccatttcccagtgtgtgaatggtgttgttgatcctgaaataaaattgttggttttctgtgctgtttttcttcacaaattctggacagtaggtatgattcatttttatcactgaatatattagaattcttatcttttcagtgtgcaaaatcatgttctcctattgatagaagcatttatttagatttggcttacattgatggatgaatatgatttatatgaagttcctggtatctatcggcttcatggtatatctctactactcttaagaagataccagataataacaaggcaaatagatggttactgtggcagtcaaaagtttgaagccagatgcgcttcaaggtcatagagaatgggtggcagaagttgactttctgggacagttgcatcataaacaccttattaagctgattggatattgtattgaggatgatcaaaggttacttgtatatgaatttcatggcacggggaagtcttgaaaatcatcttttcagaaggactcttcccctaccttggtccaacaggatgaagattgctctaggtgccgcgaaaggactagccttcctccatggaggtcccaaacctgttatttacaaggattttaagacattgaatgttcttcttgatgtggagtacaacgcaaaactatctgatttcggtttagcaaaagctggtcatcagggtgaaaaaactcatgtatctactcgggttgttggcacctatggttatgttgcaccagagtatgtaatgacaggtatcagggataaacttttgacttcagtagctacctatagcagaaattatgtaccttgtttatctgttgcatgttggttctttacactgttttctgagcttgtagttattctcgtgttcactccatattggatagtaaattggcttaacatttttgtccgaagacataaaactaaggtgccattacaaatgttcttctttcaagtgaaactgtgtttttcgtttttacatgcagtaaaggttgtaaggctgtagacttatataatgaatcttgcgctccacttctttgggacatgatttaacatttcttaacatttctcactctataacgctttcagatcacttttcatatgttttttagatgcactttttttttggagactaagccctaagggcaacaatggagatgaccagcgtcttggtttatcaagaggaagttaatccctctcaactgaaactcccatcaaatttggggcgtagtgtgtcgattcagttgtaactattatatgtcattttgggttagcaaactgtatctactaatttctcagacttatgccttttgagctagaaacttgtgtaagaattttttgcactcagtgacatgctggatagtgcgagtagcagattacaatagtgacggatgaacattgtattttactttacatgatggatttttttgatgtgtaaggcttttaaggcatgtaaaaattcttaacttttaaaagatgctaacacgaatataaaattgcaatcattattcttgaatttcaatgtatcttatcataacatgttcactccgtagcaacgtacgggcatttacctagtatatatatatatacgcacgtggtgcagtcgaagttgagggtgagcgggaacggcagcggcgcgccgcactgcgcggggaggtcgcggatggcgtcggcgttgagcggctggtaattggccgccgcctgcttgacgcactcgcacgcctgccgccgctccgccgggccggacggcatggccctgatccgcttcacgccggcgcagcactcggcggccggggccgcctccttgcccgtcacgtagccgacgcaggggcgcaggcttgcgtccacgtccgcgcagttcacgtccgccctaaccgccgccgccgccagcaggaccaacgccactgctgccaccgctgttgttgcggcgccgcccttcttcttcatcatcgccatcgatcgatctgtgtctctctctctcccgaacttgacttgctgctgctggagctcgatcttagcttgttgctgctgcgttcatggagcggctcgagcgctggggttttatagggcttgctgggtcggcgaagcggttcagcatcttgttggtgctgatgttgctcgtaatggcagcgctttgagtgatgcattggtacgccaaaactggcagatggatagggtcccttttttttggccataccgtgcatgaacgccacggctagctgccgttgcaaccgtttaatgcttcgctt

SEQ ID NO: 13934 - DNA, 3391 bp, Zea Mays
ataacaaggagtcctttattattattcttattatcttagtgtaaatattattattattaggggcgtttacagcgtagcaagttcactcttgcaagcaagggacttttacaagagcatgtagctagttagttcatttggagtgtgaacatgtcttatttgcacacttgcttttttcccctctctttattttctccatcttcaggatggctattattagctcctttgcatgcgttcatggaattctgcgtcagaaaaccaaaacggaaaatagcattattggtcagtgtaatatacatgatatatatatgctacggtggagttattaggatgatatatctctactactacttatgttagtagtgtaggcgtccacacaccctctcggcgcatggttctgcctctgcagccgcgacacccgcgcgtgccttcgcctccgccgccgcgatggccgtgcctctgcccccgcctcctccgccctcgcgacgctgcgccctcccccgcgatgcctgcgccttcgtccccgtgatgctcgcgcctacccccgcctcctctgcccccgcgacaccgcgcgcgcagcctcctccccgcgatgcccgcccaagctcccaaatgccggcccccgtctcctccaccgcgactcccctcgctctcccgagactcccagatgctggcccccgtatcctcggccctgatgccgccgcgattcccagatgccggcccccgtatcctcggccccgcgctcgctctcctgagctccgacgggctcccgccctagcccctgacaccatgttgtgcccaaccctaaacctagccaccacgccgtcaacaacgccaccttccttcctcgccaccacaccttctttagatggaaggcgcgactggtggcatcttcctgatctcggagcacgtctaatcctcgctccaaatgctgctccgcccccaatccgtgcggcatcttcagatggaagccgggacaatgccccatccccctctcccgagccccgacgactgacattccagggatgtcgctctgcgatcctcacctcctcgtcgttggcggtcgcgcgacctcctgaccgtcgtctccgcccgcgagatccccccgactcgcccacctctccgtccacagccgcctccatcacgcacctccacgccgacgagaaggctcgcccacctctcagtccacgactgcctacgacgcgtcttctgaataaagatctctcgaagcacccggtggatgggttctctgctgggctggtcgacgacagcaatgtcttcgagtggcaggtcaccatcatcggaccgcctgacaccctatatagaacaattcaacatattcagatcagggtcatggatatgttctcggtcaagagtctttatctctactcggattggttgttggacctgtttggtgttcttcatgatgggaagaagtcgtacccgaccattctggcatttgtgaacaatgttgatgatgcagagtttatattagcccatggtactgaagtctttggttcaccttctagcaatcctcttcccaaaagtctcgagaagcttgagcaggttctaatgcttggcctagaaaagggacttccaatggtgctgcctaatccagaattccagattatgtcactgtcgaagcttgagatcttcgtgtcatgtctgggtttggaggctcgtcggcaaccggacaggaaaacagcaaggcggaagggcattgctcgatcgctggtccgatgagtggcactgtcagggagcgtgacaggggcgacaaatctagacctccacgtcggtaagatgttgtggcaaaatgtcagtgagctcacattttgaggagctgagggtcaatgtcagcgagctcactgttgaggagctgagggtccctgagtacctgcagttcaaggaacaacttatggaagaaggctttaaggttgaggctgggagaacttaccatcggacagttctagagatacttgaccaattggaaaaatgtgcaaaatcatgttctcctattgatagaagcatttatttagatttggcttacattgatggatgaatatgatttatatgaagttcctggtatctatcggcttcatggtatatctctactactcttaagaagataccaggtatgttcctttcctttcttttattttcttagccccatctttatcatgttttcaccattacagagtttgcctaccgcccccgttcgcccgcaagcaaactctagccgaggaagacgcggtttctcacctctgcgccctcgccagtcccacgagccccgccttccctagcctctcaatgcctccagattctctaccccttgccccccagtcgttgtttccgcccgcgccgctgacccatgacctcgcatgcggggctagggtttccacatgcgatggaagtagcggtgatgactttgctgttgtttgcatctgcctcgacttcctcggtccggtcttgccatctaccagcgctgcctaggtttgcctctcctgtcctgcagtgctgaagttccgcgtgtgctggttggtgtgtgttacgcgtcttggaacgagagggcaacttcgatgcggggctttgattggctgttttgtttgtggtgggggtagttgggtttgcgacattttttaggaaaccgattggtttcgtttcagcttgttttcagagaagggatagtggatttgtcaacactagactggattccataaaaatttgatagaatcagtgctttcagctttgagctagactacacatttttctgtgaggttgcaccatttttccctagataacttctatgttgaaatggtttagttctgaagctgtcattgttagataataacaaggcaaatagatggttactgtggcagtcaaaagtttgaagccagatgcgcttcaaggtcatagagaatgggtggcagaagttgactttctgggacagttgcatcataaacaccttattaagctgattggatattgtattgaggatgatcaaaggttacttgtatatgaatttcatggcacggggaagtcttgaaaatcatcttttcagaagtaagcaatcacctaacagagttaatgctttaagttgagtagatttagtggctttattaataatttgtttccccacttaggcctaaccagtttttttcttcactaagtcttctttcattttttgagcaaccttggatttttttggttctctatcctctgtgacatcagagataattacattctaacttgatttgattatggtaatgtagacctgaacattttaacctgcccttattaagtttgatctgttccagttacacctgttcagatcttcttagttaaatactagatgaatttcgcacacacaaaaaagttgcaatagtactgtagtgag

SEQ ID NO: 13935 - DNA, 3811 bp, Zea Mays
ataacaaggagtcctttattattattcttattatcttagtgtaaatattattattattaggggcgtttacagcgtagcaagttcactcttgcaagcaagggacttttacaagagcatgtagctagttagttcatttggagtgtgaacatgtcttatttgcacacttgcttttttcccctctctttattttctccatcttcaggatggctattattagctcctttgcatgcgttcatggaattctgcgtcagaaaaccaaaacggaaaatagcattattggtcagtgtaatatacatgatatatatatgctacggtggagttattaggatgatatatctctactactacttatgttagtagtgtaggcgtccacacaccctctcggcgcatggttctgcctctgcagccgcgacacccgcgcgtgccttcgcctccgccgccgcgatggccgtgcctctgcccccgcctcctccgccctcgcgacgctgcgccctcccccgcgatgcctgcgccttcgtccccgtgatgctcgcgcctacccccgcctcctctgcccccgcgacaccgcgcgcgcagcctcctccccgcgatgcccgcccaagctcccaaatgccggcccccgtctcctccaccgcgactcccctcgctctcccgagactcccagatgctggcccccgtatcctcggccctgatgccgccgcgattcccagatgccggcccccgtatcctcggccccgcgctcgctctcctgagctccgacgggctcccgccctagcccctgacaccatgttgtgcccaaccctaaacctagccaccacgccgtcaacaacgccaccttccttcctcgccaccacaccttctttagatggaaggcgcgactggtggcatcttcctgatctcggagcacgtctaatcctcgctccaaatgctgctccgcccccaatccgtgcggcatcttcagatggaagccgggacaatgccccatccccctctcccgagccccgacgactgacattccagggatgtcgctctgcgatcctcacctcctcgtcgttggcggtcgcgcgacctcctgaccgtcgtctccgcccgcgagatccccccgactcgcccacctctccgtccacagccgcctccatcacgcacctccacgccgacgagaaggctcgcccacctctcagtccacgactgcctacgacgcgtcttctgaataaagatctctcgaagcacccggtggatgggttctctgctgggctggtcgacgacagcaatgtcttcgagtggcaggtcaccatcatcggaccgcctgacaccctatatagaacaattcaacatattcagatcagggtcatggatatgttctcggtcaagagtctttatctctactcggattggttgttggacctgtttggtgttcttcatgatgggaagaagtcgtacccgaccattctggcatttgtgaacaatgttgatgatgcagagtttatattagcccatggtactgaagtctttggttcaccttctagcaatcctcttcccaaaagtctcgagaagcttgagcaggttctaatgcttggcctagaaaagggacttccaatggtgctgcctaatccagaattccagattatgtcactgtcgaagcttgagatcttcgtgtcatgtctggagctgagggtcaatgtcagcgagctcactgttgaggagctgagggtccctgagtacctgcagttcaaggaacaacttatggaagaaggctttaaggttgaggctgggagaacttaccatcggacagttctagagatacttgaccaattggaaaaagtatgtatgttcctaacttttctatttgagtatatttatatatattgggttgcttgttggaactaattttttgcgctccgaacttctgaaaatctttgccatatccatttgatgattatgttctgattaagtgatggtgtctaagcaccaaaaatgaaagcaccctgactcccgcaactgaaaattgatatcaaggtctttctgtttgatcttgttcactgagaatatgatgtacccattcacattctttgctttcccatatatttttctagctttcaataggatccttgtgaacccaatccactatcatttctgcttaagttgtctccctaaaatgaaagaagtatagacattgacttaggaagcatgacgaggtaaaatgaaaattaaacaaatcctgactatagcacacattcacgccaaagaccttaaattgcttcatgttttagcccatttcccagtgtgtgaatggtgttgttgatcctgaaataaaattgttggttttctgtgctgtttttcttcacaaattctggacagtaggtatgattcatttttatcactgaatatattagaattcttatcttttcagtgtgcaaaatcatgttctcctattgatagaagcatttatttagatttggcttacattgatggatgaatatgatttatatgaagttcctggtatctatcggcttcatggtatatctctactactcttaagaagataccaggtatgttcctttcctttcttttattttcttagccccatctttatcatgttttcaccattacagagtttgcctaccgcccccgttcgcccgcaagcaaactctagccgaggaagacgcggtttctcacctctgcgccctcgccagtcccacgagccccgccttccctagcctctcaatgcctccagattctctaccccttgccccccagtcgttgtttccgcccgcgccgctgacccatgacctcgcatgcggggctagggtttccacatgcgatggaagtagcggtgatgactttgctgttgtttgcatctgcctcgacttcctcggtccggtcttgccatctaccagcgctgcctaggtttgcctctcctgtcctgcagtgctgaagttccgcgtgtgctggttggtgtgtgttacgcgtcttggaacgagagggcaacttcgatgcggggctttgattggctgttttgtttgtggtgggggtagttgggtttgcgacattttttaggaaaccgattggtttcgtttcagcttgttttcagagaagggatagtggatttgtcaacactagactggattccataaaaatttgatagaatcagtgctttcagctttgagctagactacacatttttctgtgaggttgcaccatttttccctagataacttctatgttgaaatggtttagttctgaagctgtcattgttagataataacaaggcaaatagatggttactgtggcagtcaaaagtttgaagccagatgcgcttcaaggtcatagagaatgggtggcagaagttgactttctgggacagttgcatcataaacaccttattaagctgattggatattgtattgaggatgatcaaaggttacttgtatatgaatttcatggcacggggaagtcttgaaaatcatcttttcagaagtaagcaatcacctaacagagttaatgctttaagttgagtagatttagtggctttattaataatttgtttccccacttaggcctaaccagtttttttcttcactaagtcttctttcattttttgagcaaccttggatttttttggttctctatcctctgtgacatcagagataattacattctaacttgatttgattatggtaatgtagacctgaacattttaacctgcccttattaagtttgatctgttccagttacacctgttcagatcttcttagttaaatactagatgaatttcgcacacacaaaaaagttgcaatagtactgtagtgag

SEQ ID NO: 13936 - DNA, 3222 bp, Zea Mays
ataacaaggagtcctttattattattcttattatcttagtgtaaatattattattattaggggcgtttacagcgtagcaagttcactcttgcaagcaagggacttttacaagagcatgtagctagttagttcatttggagtgtgaacatgtcttatttgcacacttgcttttttcccctctctttattttctccatcttcaggatggctattattagctcctttgcatgcgttcatggaattctgcgtcagaaaaccaaaacggaaaatagcattattggtcagtgtaatatacatgatatatatatgctacggtggagttattaggatgatatatctctactactacttatgttagtagtgtaggcgtccacacaccctctcggcgcatggttctgcctctgcagccgcgacacccgcgcgtgccttcgcctccgccgccgcgatggccgtgcctctgcccccgcctcctccgccctcgcgacgctgcgccctcccccgcgatgcctgcgccttcgtccccgtgatgctcgcgcctacccccgcctcctctgcccccgcgacaccgcgcgcgcagcctcctccccgcgatgcccgcccaagctcccaaatgccggcccccgtctcctccaccgcgactcccctcgctctcccgagactcccagatgctggcccccgtatcctcggccctgatgccgccgcgattcccagatgccggcccccgtatcctcggccccgcgctcgctctcctgagctccgacgggctcccgccctagcccctgacaccatgttgtgcccaaccctaaacctagccaccacgccgtcaacaacgccaccttccttcctcgccaccacaccttctttagatggaaggcgcgactggtggcatcttcctgatctcggagcacgtctaatcctcgctccaaatgctgctccgcccccaatccgtgcggcatcttcagatggaagccgggacaatgccccatccccctctcccgagccccgacgactgacattccagggatgtcgctctgcgatcctcacctcctcgtcgttggcggtcgcgcgacctcctgaccgtcgtctccgcccgcgagatccccccgactcgcccacctctccgtccacagccgcctccatcacgcacctccacgccgacgagaaggctcgcccacctctcagtccacgactgcctacgacgcgtcttctgaataaagatctctcgaagcacccggtggatgggttctctgctgggctggtcgacgacagcaatgtcttcgagtggcaggtcaccatcatcggaccgcctgacaccctatatagaacaattcaacatattcagatcagggtcatggatatgttctcggtcaagagtctttatctctactcggattggttgttggacctgtttggtgttcttcatgatgggaagaagtcgtacccgaccattctggcatttgtgaacaatgttgatgatgcagagtttatattagcccatggtactgaagtctttggttcaccttctagcaatcctcttcccaaaagtctcgagaagcttgagcaggttctaatgcttggcctagaaaagggacttccaatggtgctgcctaatccagaattccagattatgtcactgtcgaagcttgagatcttcgtgtcatgtctggagctgagggtcaatgtcagcgagctcactgttgaggagctgagggtccctgagtacctgcagttcaaggaacaacttatggaagaaggctttaaggttgaggctgggagaacttaccatcggacagttctagagatacttgaccaattggaaaaatgtgcaaaatcatgttctcctattgatagaagcatttatttagatttggcttacattgatggatgaatatgatttatatgaagttcctggtatctatcggcttcatggtatatctctactactcttaagaagataccaggtatgttcctttcctttcttttattttcttagccccatctttatcatgttttcaccattacagagtttgcctaccgcccccgttcgcccgcaagcaaactctagccgaggaagacgcggtttctcacctctgcgccctcgccagtcccacgagccccgccttccctagcctctcaatgcctccagattctctaccccttgccccccagtcgttgtttccgcccgcgccgctgacccatgacctcgcatgcggggctagggtttccacatgcgatggaagtagcggtgatgactttgctgttgtttgcatctgcctcgacttcctcggtccggtcttgccatctaccagcgctgcctaggtttgcctctcctgtcctgcagtgctgaagttccgcgtgtgctggttggtgtgtgttacgcgtcttggaacgagagggcaacttcgatgcggggctttgattggctgttttgtttgtggtgggggtagttgggtttgcgacattttttaggaaaccgattggtttcgtttcagcttgttttcagagaagggatagtggatttgtcaacactagactggattccataaaaatttgatagaatcagtgctttcagctttgagctagactacacatttttctgtgaggttgcaccatttttccctagataacttctatgttgaaatggtttagttctgaagctgtcattgttagataataacaaggcaaatagatggttactgtggcagtcaaaagtttgaagccagatgcgcttcaaggtcatagagaatgggtggcagaagttgactttctgggacagttgcatcataaacaccttattaagctgattggatattgtattgaggatgatcaaaggttacttgtatatgaatttcatggcacggggaagtcttgaaaatcatcttttcagaagtaagcaatcacctaacagagttaatgctttaagttgagtagatttagtggctttattaataatttgtttccccacttaggcctaaccagtttttttcttcactaagtcttctttcattttttgagcaaccttggatttttttggttctctatcctctgtgacatcagagataattacattctaacttgatttgattatggtaatgtagacctgaacattttaacctgcccttattaagtttgatctgttccagttacacctgttcagatcttcttagttaaatactagatgaatttcgcacacacaaaaaagttgcaatagtactgtagtgag

SEQ ID NO: 13937 - DNA, 5369 bp, Zea Mays
ataacaaggagtcctttattattattcttattatcttagtgtaaatattattattattaggggcgtttacagcgtagcaagttcactcttgcaagcaagggacttttacaagagcatgtagctagttagttcatttggagtgtgaacatgtcttatttgcacacttgcttttttcccctctctttattttctccatcttcaggatggctattattagctcctttgcatgcgttcatggaattctgcgtcagaaaaccaaaacggaaaatagcattattggtcagtgtaatatacatgatatatatatgctacggtggagttattaggatgatatatctctactactacttatgttagtagtgtaggcgtccacacaccctctcggcgcatggttctgcctctgcagccgcgacacccgcgcgtgccttcgcctccgccgccgcgatggccgtgcctctgcccccgcctcctccgccctcgcgacgctgcgccctcccccgcgatgcctgcgccttcgtccccgtgatgctcgcgcctacccccgcctcctctgcccccgcgacaccgcgcgcgcagcctcctccccgcgatgcccgcccaagctcccaaatgccggcccccgtctcctccaccgcgactcccctcgctctcccgagactcccagatgctggcccccgtatcctcggccctgatgccgccgcgattcccagatgccggcccccgtatcctcggccccgcgctcgctctcctgagctccgacgggctcccgccctagcccctgacaccatgttgtgcccaaccctaaacctagccaccacgccgtcaacaacgccaccttccttcctcgccaccacaccttctttagatggaaggcgcgactggtggcatcttcctgatctcggagcacgtctaatcctcgctccaaatgctgctccgcccccaatccgtgcggcatcttcagatggaagccgggacaatgccccatccccctctcccgagccccgacgactgacattccagggatgtcgctctgcgatcctcacctcctcgtcgttggcggtcgcgcgacctcctgaccgtcgtctccgcccgcgagatccccccgactcgcccacctctccgtccacagccgcctccatcacgcacctccacgccgacgagaaggctcgcccacctctcagtccacgactgcctacgacgcgtcttctgaataaagatctctcgaagcacccggtggatgggttctctgctgggctggtcgacgacagcaatgtcttcgagtggcaggtcaccatcatcggaccgcctgacaccctatagattggttgttggacctgtttggtgttcttcatgatgggaagaagtcgtacccgaccattctggcatgtatgttggtagtttctctcgagaacttggtttgcaagttgtgaacaatgttgatgatgcagagtttatattagcccatggtactgaagtctttggttcaccttctagcaatcctcttcccaaaagtctcgagaagcttgagcaggttctaatgcttggcctagaaaagggacttccaatggtgctgcctaatccagaattccagattatgtcactgtcgaagcttgagatcttcgtgtcatgtctgggtttggaggctcgtcggcaaccggacaggaaaacagcaaggcggaagggcattgctcgatcgctggtccgatgagtggcactgtcagggagcgtgacaggggcgacaaatctagacctccacgtcggtaagatgttgtggcaaaatgtcagtgagctcacattttgaggagctgagggtcaatgtcagcgagctcactgttgaggagctgagggtccctgagtacctgcagttcaaggaacaacttatggaagaaggctttaaggttgaggctgggagaacttaccatcggacagttctagagatacttgaccaattggaaaaagtatgtatgttcctaacttttctatttgagtatatttatatatattgggttgcttgttggaactaattttttgcgctccgaacttctgaaaatctttgccatatccatttgatgattatgttctgattaagtgatggtgtctaagcaccaaaaatgaaagcaccctgactcccgcaactgaaaattgatatcaaggtctttctgtttgatcttgttcactgagaatatgatgtacccattcacattctttgctttcccatatatttttctagctttcaataggatccttgtgaacccaatccactatcatttctgcttaagttgtctccctaaaatgaaagaagtatagacattgacttaggaagcatgacgaggtaaaatgaaaattaaacaaatcctgactatagcacacattcacgccaaagaccttaaattgcttcatgttttagcccatttcccagtgtgtgaatggtgttgttgatcctgaaataaaattgttggttttctgtgctgtttttcttcacaaattctggacagtaggtatgattcatttttatcactgaatatattagaattcttatcttttcagtgtgcaaaatcatgttctcctattgatagaagcatttatttagatttggcttacattgatggatgaatatgatttatatgaagttcctggtatctatcggcttcatggtatatctctactactcttaagaagataccaggtatgttcctttcctttcttttattttcttagccccatctttatcatgttttcaccattacagagtttgcctaccgcccccgttcgcccgcaagcaaactctagccgaggaagacgcggtttctcacctctgcgccctcgccagtcccacgagccccgccttccctagcctctcaatgcctccagattctctaccccttgccccccagtcgttgtttccgcccgcgccgctgacccatgacctcgcatgcggggctagggtttccacatgcgatggaagtagcggtgatgactttgctgttgtttgcatctgcctcgacttcctcggtccggtcttgccatctaccagcgctgcctaggtttgcctctcctgtcctgcagtgctgaagttccgcgtgtgctggttggtgtgtgttacgcgtcttggaacgagagggcaacttcgatgcggggctttgattggctgttttgtttgtggtgggggtagttgggtttgcgacattttttaggaaaccgattggtttcgtttcagcttgttttcagagaagggatagtggatttgtcaacactagactggattccataaaaatttgatagaatcagtgctttcagctttgagctagactacacatttttctgtgaggttgcaccatttttccctagataacttctatgttgaaatggtttagttctgaagctgtcattgttagataataacaaggcaaatagatggttactgtggcagtcaaaagtttgaagccagatgcgcttcaaggtcatagagaatgggtggcagaagttgactttctgggacagttgcatcataaacaccttattaagctgattggatattgtattgaggatgatcaaaggttacttgtatatgaatttcatggcacggggaagtcttgaaaatcatcttttcagaaggactcttcccctaccttggtccaacaggatgaagattgctctaggtgccgcgaaaggactagccttcctccatggaggtcccaaacctgttatttacaaggattttaagacattgaatgttcttcttgatgtggagtacaacgcaaaactatctgatttcggtttagcaaaagctggtcatcagggtgaaaaaactcatgtatctactcgggttgttggcacctatggttatgttgcaccagagtatgtaatgacaggtatcagggataaacttttgacttcagtagctacctatagcagaaattatgtaccttgtttatctgttgcatgttggttctttacactgttttctgagcttgtagttattctcgtgttcactccatattggatagtaaattggcttaacatttttgtccgaagacataaaactaaggtgccattacaaatgttcttctttcaagtgaaactgtgtttttcgtttttacatgcagtaaaggttgtaaggctgtagacttatataatgaatcttgcgctccacttctttgggacatgatttaacatttcttaacatttctcactctataacgctttcagatcacttttcatatgttttttagatgcactttttttttggagactaagccctaagggcaacaatggagatgaccagcgtcttggtttatcaagaggaagttaatccctctcaactgaaactcccatcaaatttggggcgtagtgtgtcgattcagttgtaactattatatgtcattttgggttagcaaactgtatctactaatttctcagacttatgccttttgagctagaaacttgtgtaagaattttttgcactcagtgacatgctggatagtgcgagtagcagattacaatagtgacggatgaacattgtattttactttacatgatggatttttttgatgtgtaaggcttttaaggcatgtaaaaattcttaacttttaaaagatgctaacacgaatataaaattgcaatcattattcttgaatttcaatgtatcttatcataacatgttcactccgtagcaacgtacgggcatttacctagtatatatatatatacgcacgtggtgcagtcgaagttgagggtgagcgggaacggcagcggcgcgccgcactgcgcggggaggtcgcggatggcgtcggcgttgagcggctggtaattggccgccgcctgcttgacgcactcgcacgcctgccgccgctccgccgggccggacggcatggccctgatccgcttcacgccggcgcagcactcggcggccggggccgcctccttgcccgtcacgtagccgacgcaggggcgcaggcttgcgtccacgtccgcgcagttcacgtccgccctaaccgccgccgccgccagcaggaccaacgccactgctgccaccgctgttgttgcggcgccgcccttcttcttcatcatcgccatcgatcgatctgtgtctctctctctcccgaacttgacttgctgctgctggagctcgatcttagcttgttgctgctgcgttcatggagcggctcgagcgctggggttttatagggcttgctgggtcggcgaagcggttcagcatcttgttggtgctgatgttgctcgtaatggcagcgctttgagtgatgcattggtacgccaaaactggcagatggatagggtcccttttttttggccataccgtgcatgaacgccacggctagctgccgttgcaaccgtttaatgcttcgctt

SEQ ID NO: 13938 - DNA, 4585 bp, Zea Mays
ataacaaggagtcctttattattattcttattatcttagtgtaaatattattattattaggggcgtttacagcgtagcaagttcactcttgcaagcaagggacttttacaagagcatgtagctagttagttcatttggagtgtgaacatgtcttatttgcacacttgcttttttcccctctctttattttctccatcttcaggatggctattattagctcctttgcatgcgttcatggaattctgcgtcagaaaaccaaaacggaaaatagcattattggtcagtgtaatatacatgatatatatatgctacggtggagttattaggatgatatatctctactactacttatgttagtagtgtaggcgtccacacaccctctcggcgcatggttctgcctctgcagccgcgacacccgcgcgtgccttcgcctccgccgccgcgatggccgtgcctctgcccccgcctcctccgccctcgcgacgctgcgccctcccccgcgatgcctgcgccttcgtccccgtgatgctcgcgcctacccccgcctcctctgcccccgcgacaccgcgcgcgcagcctcctccccgcgatgcccgcccaagctcccaaatgccggcccccgtctcctccaccgcgactcccctcgctctcccgagactcccagatgctggcccccgtatcctcggccctgatgccgccgcgattcccagatgccggcccccgtatcctcggccccgcgctcgctctcctgagctccgacgggctcccgccctagcccctgacaccatgttgtgcccaaccctaaacctagccaccacgccgtcaacaacgccaccttccttcctcgccaccacaccttctttagatggaaggcgcgactggtggcatcttcctgatctcggagcacgtctaatcctcgctccaaatgctgctccgcccccaatccgtgcggcatcttcagatggaagccgggacaatgccccatccccctctcccgagccccgacgactgacattccagggatgtcgctctgcgatcctcacctcctcgtcgttggcggtcgcgcgacctcctgaccgtcgtctccgcccgcgagatccccccgactcgcccacctctccgtccacagccgcctccatcacgcacctccacgccgacgagaaggctcgcccacctctcagtccacgactgcctacgacgcgtcttctgaataaagatctctcgaagcacccggtggatgggttctctgctgggctggtcgacgacagcaatgtcttcgagtggcaggtcaccatcatcggaccgcctgacaccctatagattggttgttggacctgtttggtgttcttcatgatgggaagaagtcgtacccgaccattctggcatgtatgttggtagtttctctcgaggtttgtttcctgtcacttctgcttagcatcagaatggatttagtgtaatcggtttttcattttttcatactatagaacttggtttgcaagttgtgaacaatgttgatgatgcagagtttatattagcccatggtactgaagtctttggttcaccttctagcaatcctcttcccaaaagtctcgagaagcttgagcaggttctaatgcttggcctagaaaagggacttccaatggtgctgcctaatccagaattccagattatgtcactgtcgaagcttgagatcttcgtgtcatgtctggtatgttttttttgaacacgctggacatgtgtgtatccttatagagtagagagataaaatgagaaacaatcccatacaaagcaacttctccaccttacctaggagataagataaagttgaagcaaaacaccaaagttaatcatctaatatacatgtaaacaatgaaccgaccttactgaaaacactcgcactggaccctctctgcgaccaaaaaaatagctcctagagtttttagggactagaggctcaactcatctttgtagaagtgttgtgctgatggaagtgatggggttgcaccataaaaaatgttcctgtaattccataagtacttatacaatagggtttggaggctcgtcggcaaccggacaggaaaacagcaaggcggaagggcattgctcgatcgctggtccgatgagtggcactgtcagggagcgtgacaggggcgacaaatctagacctccacgtcggtaagatgttgtggcaaaatgtcagtgagctcacattttgaggagctgagggtcaatgtcagcgagctcactgttgaggagctgagggtccctgagtacctgcagttcaaggaacaacttatggaagaagggtatgaattcttatattcaccaatgaagatgatccttttggtactattacaggagcaacaacaataataatcaatggcacctaaacattttcttatcctctaagttcatgtatttcatgtttactaatcattcctattttagctttaaggttgaggctgggagaacttaccatcggacagttctagagatacttgaccaattggaaaaaatttggcttacattgatggatgaatatgatttatatgaagttcctggtatctatcggcttcatggtatatctctactactcttaagaagataccagataataacaaggcaaatagatggttactgtggcagtcaaaagtttgaagccagatgcgcttcaaggtcatagagaatgggtggcagaagttgactttctgggacagttgcatcataaacaccttattaagctgattggatattgtattgaggatgatcaaaggttacttgtatatgaatttcatggcacggggaagtcttgaaaatcatcttttcagaaggactcttcccctaccttggtccaacaggatgaagattgctctaggtgccgcgaaaggactagccttcctccatggaggtcccaaacctgttatttacaaggattttaagacattgaatgttcttcttgatgtggagtacaacgcaaaactatctgatttcggtttagcaaaagctggtcatcagggtgaaaaaactcatgtatctactcgggttgttggcacctatggttatgttgcaccagagtatgtaatgacaggtatcagggataaacttttgacttcagtagctacctatagcagaaattatgtaccttgtttatctgttgcatgttggttctttacactgttttctgagcttgtagttattctcgtgttcactccatattggatagtaaattggcttaacatttttgtccgaagacataaaactaaggtgccattacaaatgttcttctttcaagtgaaactgtgtttttcgtttttacatgcagtaaaggttgtaaggctgtagacttatataatgaatcttgcgctccacttctttgggacatgatttaacatttcttaacatttctcactctataacgctttcagatcacttttcatatgttttttagatgcactttttttttggagactaagccctaagggcaacaatggagatgaccagcgtcttggtttatcaagaggaagttaatccctctcaactgaaactcccatcaaatttggggcgtagtgtgtcgattcagttgtaactattatatgtcattttgggttagcaaactgtatctactaatttctcagacttatgccttttgagctagaaacttgtgtaagaattttttgcactcagtgacatgctggatagtgcgagtagcagattacaatagtgacggatgaacattgtattttactttacatgatggatttttttgatgtgtaaggcttttaaggcatgtaaaaattcttaacttttaaaagatgctaacacgaatataaaattgcaatcattattcttgaatttcaatgtatcttatcataacatgttcactccgtagcaacgtacgggcatttacctagtatatatatatatacgcacgtggtgcagtcgaagttgagggtgagcgggaacggcagcggcgcgccgcactgcgcggggaggtcgcggatggcgtcggcgttgagcggctggtaattggccgccgcctgcttgacgcactcgcacgcctgccgccgctccgccgggccggacggcatggccctgatccgcttcacgccggcgcagcactcggcggccggggccgcctccttgcccgtcacgtagccgacgcaggggcgcaggcttgcgtccacgtccgcgcagttcacgtccgccctaaccgccgccgccgccagcaggaccaacgccactgctgccaccgctgttgttgcggcgccgcccttcttcttcatcatcgccatcgatcgatctgtgtctctctctctcccgaacttgacttgctgctgctggagctcgatcttagcttgttgctgctgcgttcatggagcggctcgagcgctggggttttatagggcttgctgggtcggcgaagcggttcagcatcttgttggtgctgatgttgctcgtaatggcagcgctttgagtgatgcattggtacgccaaaactggcagatggatagggtcccttttttttggccataccgtgcatgaacgccacggctagctgccgttgcaaccgtttaatgcttcgctt

SEQ ID NO: 13939 - DNA, 4840 bp, Zea Mays
ataacaaggagtcctttattattattcttattatcttagtgtaaatattattattattaggggcgtttacagcgtagcaagttcactcttgcaagcaagggacttttacaagagcatgtagctagttagttcatttggagtgtgaacatgtcttatttgcacacttgcttttttcccctctctttattttctccatcttcaggatggctattattagctcctttgcatgcgttcatggaattctgcgtcagaaaaccaaaacggaaaatagcattattggtcagtgtaatatacatgatatatatatgctacggtggagttattaggatgatatatctctactactacttatgttagtagtgtaggcgtccacacaccctctcggcgcatggttctgcctctgcagccgcgacacccgcgcgtgccttcgcctccgccgccgcgatggccgtgcctctgcccccgcctcctccgccctcgcgacgctgcgccctcccccgcgatgcctgcgccttcgtccccgtgatgctcgcgcctacccccgcctcctctgcccccgcgacaccgcgcgcgcagcctcctccccgcgatgcccgcccaagctcccaaatgccggcccccgtctcctccaccgcgactcccctcgctctcccgagactcccagatgctggcccccgtatcctcggccctgatgccgccgcgattcccagatgccggcccccgtatcctcggccccgcgctcgctctcctgagctccgacgggctcccgccctagcccctgacaccatgttgtgcccaaccctaaacctagccaccacgccgtcaacaacgccaccttccttcctcgccaccacaccttctttagatggaaggcgcgactggtggcatcttcctgatctcggagcacgtctaatcctcgctccaaatgctgctccgcccccaatccgtgcggcatcttcagatggaagccgggacaatgccccatccccctctcccgagccccgacgactgacattccagggatgtcgctctgcgatcctcacctcctcgtcgttggcggtcgcgcgacctcctgaccgtcgtctccgcccgcgagatccccccgactcgcccacctctccgtccacagccgcctccatcacgcacctccacgccgacgagaaggctcgcccacctctcagtccacgactgcctacgacgcgtcttctgaataaagatctctcgaagcacccggtggatgggttctctgctgggctggtcgacgacagcaatgtcttcgagtggcaggtcaccatcatcggaccgcctgacaccctatagattggttgttggacctgtttggtgttcttcatgatgggaagaagtcgtacccgaccattctggcatgtatgttggtagtttctctcgagagtttatattagcccatggtactgaagtctttggttcaccttctagcaatcctcttcccaaaagtctcgagaagcttgagcaggttctaatgcttggcctagaaaagggacttccaatggtgctgcctaatccagaattccagattatgtcactgtcgaagcttgagatcttcgtgtcatgtctgggtttggaggctcgtcggcaaccggacaggaaaacagcaaggcggaagggcattgctcgatcgctggtccgatgagtggcactgtcagggagcgtgacaggggcgacaaatctagacctccacgtcggtaagatgttgtggcaaaatgtcagtgagctcacattttgaggagctgagggtcaatgtcagcgagctcactgttgaggagctgagggtccctgagtacctgcagttcaaggaacaacttatggaagaagggtatgaattcttatattcaccaatgaagatgatccttttggtactattacaggagcaacaacaataataatcaatggcacctaaacattttcttatcctctaagttcatgtatttcatgtttactaatcattcctattttagctttaaggttgaggctgggagaacttaccatcggacagttctagagatacttgaccaattggaaaaaatttggcttacattgatggatgaatatgatttatatgaagttcctggtatctatcggcttcatggtatatctctactactcttaagaagataccaggtatgttcctttcctttcttttattttcttagccccatctttatcatgttttcaccattacagagtttgcctaccgcccccgttcgcccgcaagcaaactctagccgaggaagacgcggtttctcacctctgcgccctcgccagtcccacgagccccgccttccctagcctctcaatgcctccagattctctaccccttgccccccagtcgttgtttccgcccgcgccgctgacccatgacctcgcatgcggggctagggtttccacatgcgatggaagtagcggtgatgactttgctgttgtttgcatctgcctcgacttcctcggtccggtcttgccatctaccagcgctgcctaggtttgcctctcctgtcctgcagtgctgaagttccgcgtgtgctggttggtgtgtgttacgcgtcttggaacgagagggcaacttcgatgcggggctttgattggctgttttgtttgtggtgggggtagttgggtttgcgacattttttaggaaaccgattggtttcgtttcagcttgttttcagagaagggatagtggatttgtcaacactagactggattccataaaaatttgatagaatcagtgctttcagctttgagctagactacacatttttctgtgaggttgcaccatttttccctagataacttctatgttgaaatggtttagttctgaagctgtcattgttagataataacaaggcaaatagatggttactgtggcagtcaaaagtttgaagccagatgcgcttcaaggtcatagagaatgggtggcagaagttgactttctgggacagttgcatcataaacaccttattaagctgattggatattgtattgaggatgatcaaaggttacttgtatatgaatttcatggcacggggaagtcttgaaaatcatcttttcagaaggactcttcccctaccttggtccaacaggatgaagattgctctaggtgccgcgaaaggactagccttcctccatggaggtcccaaacctgttatttacaaggattttaagacattgaatgttcttcttgatgtggagtacaacgcaaaactatctgatttcggtttagcaaaagctggtcatcagggtgaaaaaactcatgtatctactcgggttgttggcacctatggttatgttgcaccagagtatgtaatgacaggtatcagggataaacttttgacttcagtagctacctatagcagaaattatgtaccttgtttatctgttgcatgttggttctttacactgttttctgagcttgtagttattctcgtgttcactccatattggatagtaaattggcttaacatttttgtccgaagacataaaactaaggtgccattacaaatgttcttctttcaagtgaaactgtgtttttcgtttttacatgcagtaaaggttgtaaggctgtagacttatataatgaatcttgcgctccacttctttgggacatgatttaacatttcttaacatttctcactctataacgctttcagatcacttttcatatgttttttagatgcactttttttttggagactaagccctaagggcaacaatggagatgaccagcgtcttggtttatcaagaggaagttaatccctctcaactgaaactcccatcaaatttggggcgtagtgtgtcgattcagttgtaactattatatgtcattttgggttagcaaactgtatctactaatttctcagacttatgccttttgagctagaaacttgtgtaagaattttttgcactcagtgacatgctggatagtgcgagtagcagattacaatagtgacggatgaacattgtattttactttacatgatggatttttttgatgtgtaaggcttttaaggcatgtaaaaattcttaacttttaaaagatgctaacacgaatataaaattgcaatcattattcttgaatttcaatgtatcttatcataacatgttcactccgtagcaacgtacgggcatttacctagtatatatatatatacgcacgtggtgcagtcgaagttgagggtgagcgggaacggcagcggcgcgccgcactgcgcggggaggtcgcggatggcgtcggcgttgagcggctggtaattggccgccgcctgcttgacgcactcgcacgcctgccgccgctccgccgggccggacggcatggccctgatccgcttcacgccggcgcagcactcggcggccggggccgcctccttgcccgtcacgtagccgacgcaggggcgcaggcttgcgtccacgtccgcgcagttcacgtccgccctaaccgccgccgccgccagcaggaccaacgccactgctgccaccgctgttgttgcggcgccgcccttcttcttcatcatcgccatcgatcgatctgtgtctctctctctcccgaacttgacttgctgctgctggagctcgatcttagcttgttgctgctgcgttcatggagcggctcgagcgctggggttttatagggcttgctgggtcggcgaagcggttcagcatcttgttggtgctgatgttgctcgtaatggcagcgctttgagtgatgcattggtacgccaaaactggcagatggatagggtcccttttttttggccataccgtgcatgaacgccacggctagctgccgttgcaaccgtttaatgcttcgctt

SEQ ID NO: 13940 - DNA, 5926 bp, Zea Mays
ataacaaggagtcctttattattattcttattatcttagtgtaaatattattattattaggggcgtttacagcgtagcaagttcactcttgcaagcaagggacttttacaagagcatgtagctagttagttcatttggagtgtgaacatgtcttatttgcacacttgcttttttcccctctctttattttctccatcttcaggatggctattattagctcctttgcatgcgttcatggaattctgcgtcagaaaaccaaaacggaaaatagcattattggtcagtgtaatatacatgatatatatatgctacggtggagttattaggatgatatatctctactactacttatgttagtagtgtaggcgtccacacaccctctcggcgcatggttctgcctctgcagccgcgacacccgcgcgtgccttcgcctccgccgccgcgatggccgtgcctctgcccccgcctcctccgccctcgcgacgctgcgccctcccccgcgatgcctgcgccttcgtccccgtgatgctcgcgcctacccccgcctcctctgcccccgcgacaccgcgcgcgcagcctcctccccgcgatgcccgcccaagctcccaaatgccggcccccgtctcctccaccgcgactcccctcgctctcccgagactcccagatgctggcccccgtatcctcggccctgatgccgccgcgattcccagatgccggcccccgtatcctcggccccgcgctcgctctcctgagctccgacgggctcccgccctagcccctgacaccatgttgtgcccaaccctaaacctagccaccacgccgtcaacaacgccaccttccttcctcgccaccacaccttctttagatggaaggcgcgactggtggcatcttcctgatctcggagcacgtctaatcctcgctccaaatgctgctccgcccccaatccgtgcggcatcttcagatggaagccgggacaatgccccatccccctctcccgagccccgacgactgacattccagggatgtcgctctgcgatcctcacctcctcgtcgttggcggtcgcgcgacctcctgaccgtcgtctccgcccgcgagatccccccgactcgcccacctctccgtccacagccgcctccatcacgcacctccacgccgacgagaaggctcgcccacctctcagtccacgactgcctacgacgcgtcttctgaataaagatctctcgaagcacccggtggatgggttctctgctgggctggtcgacgacagcaatgtcttcgagtggcaggtcaccatcatcggaccgcctgacaccctatagattggttgttggacctgtttggtgttcttcatgatgggaagaagtcgtacccgaccattctggcatgtatgttggtagtttctctcgaggtttgtttcctgtcacttctgcttagcatcagaatggatttagtgtaatcggtttttcattttttcatactatagaacttggtttgcaagttgtgaacaatgttgatgatgcagagtttatattagcccatggtactgaagtctttggttcaccttctagcaatcctcttcccaaaagtctcgagaagcttgagcaggttctaatgcttggcctagaaaagggacttccaatggtgctgcctaatccagaattccagattatgtcactgtcgaagcttgagatcttcgtgtcatgtctggtatgttttttttgaacacgctggacatgtgtgtatccttatagagtagagagataaaatgagaaacaatcccatacaaagcaacttctccaccttacctaggagataagataaagttgaagcaaaacaccaaagttaatcatctaatatacatgtaaacaatgaaccgaccttactgaaaacactcgcactggaccctctctgcgaccaaaaaaatagctcctagagtttttagggactagaggctcaactcatctttgtagaagtgttgtgctgatggaagtgatggggttgcaccataaaaaatgttcctgtaattccataagtacttatacaatagggtttggaggctcgtcggcaaccggacaggaaaacagcaaggcggaagggcattgctcgatcgctggtccgatgagtggcactgtcagggagcgtgacaggggcgacaaatctagacctccacgtcggtaagatgttgtggcaaaatgtcagtgagctcacattttgaggagctgagggtcaatgtcagcgagctcactgttgaggagctgagggtccctgagtacctgcagttcaaggaacaacttatggaagaagggtatgaattcttatattcaccaatgaagatgatccttttggtactattacaggagcaacaacaataataatcaatggcacctaaacattttcttatcctctaagttcatgtatttcatgtttactaatcattcctattttagctttaaggttgaggctgggagaacttaccatcggacagttctagagatacttgaccaattggaaaaagtatgtatgttcctaacttttctatttgagtatatttatatatattgggttgcttgttggaactaattttttgcgctccgaacttctgaaaatctttgccatatccatttgatgattatgttctgattaagtgatggtgtctaagcaccaaaaatgaaagcaccctgactcccgcaactgaaaattgatatcaaggtctttctgtttgatcttgttcactgagaatatgatgtacccattcacattctttgctttcccatatatttttctagctttcaataggatccttgtgaacccaatccactatcatttctgcttaagttgtctccctaaaatgaaagaagtatagacattgacttaggaagcatgacgaggtaaaatgaaaattaaacaaatcctgactatagcacacattcacgccaaagaccttaaattgcttcatgttttagcccatttcccagtgtgtgaatggtgttgttgatcctgaaataaaattgttggttttctgtgctgtttttcttcacaaattctggacagtaggtatgattcatttttatcactgaatatattagaattcttatcttttcagtgtgcaaaatcatgttctcctattgatagaagcatttatttagatttggcttacattgatggatgaatatgatttatatgaagttcctggtatctatcggcttcatggtatatctctactactcttaagaagataccaggtatgttcctttcctttcttttattttcttagccccatctttatcatgttttcaccattacagagtttgcctaccgcccccgttcgcccgcaagcaaactctagccgaggaagacgcggtttctcacctctgcgccctcgccagtcccacgagccccgccttccctagcctctcaatgcctccagattctctaccccttgccccccagtcgttgtttccgcccgcgccgctgacccatgacctcgcatgcggggctagggtttccacatgcgatggaagtagcggtgatgactttgctgttgtttgcatctgcctcgacttcctcggtccggtcttgccatctaccagcgctgcctaggtttgcctctcctgtcctgcagtgctgaagttccgcgtgtgctggttggtgtgtgttacgcgtcttggaacgagagggcaacttcgatgcggggctttgattggctgttttgtttgtggtgggggtagttgggtttgcgacattttttaggaaaccgattggtttcgtttcagcttgttttcagagaagggatagtggatttgtcaacactagactggattccataaaaatttgatagaatcagtgctttcagctttgagctagactacacatttttctgtgaggttgcaccatttttccctagataacttctatgttgaaatggtttagttctgaagctgtcattgttagataataacaaggcaaatagatggttactgtggcagtcaaaagtttgaagccagatgcgcttcaaggtcatagagaatgggtggcagaagttgactttctgggacagttgcatcataaacaccttattaagctgattggatattgtattgaggatgatcaaaggttacttgtatatgaatttcatggcacggggaagtcttgaaaatcatcttttcagaaggactcttcccctaccttggtccaacaggatgaagattgctctaggtgccgcgaaaggactagccttcctccatggaggtcccaaacctgttatttacaaggattttaagacattgaatgttcttcttgatgtggagtacaacgcaaaactatctgatttcggtttagcaaaagctggtcatcagggtgaaaaaactcatgtatctactcgggttgttggcacctatggttatgttgcaccagagtatgtaatgacaggtatcagggataaacttttgacttcagtagctacctatagcagaaattatgtaccttgtttatctgttgcatgttggttctttacactgttttctgagcttgtagttattctcgtgttcactccatattggatagtaaattggcttaacatttttgtccgaagacataaaactaaggtgccattacaaatgttcttctttcaagtgaaactgtgtttttcgtttttacatgcagtaaaggttgtaaggctgtagacttatataatgaatcttgcgctccacttctttgggacatgatttaacatttcttaacatttctcactctataacgctttcagatcacttttcatatgttttttagatgcactttttttttggagactaagccctaagggcaacaatggagatgaccagcgtcttggtttatcaagaggaagttaatccctctcaactgaaactcccatcaaatttggggcgtagtgtgtcgattcagttgtaactattatatgtcattttgggttagcaaactgtatctactaatttctcagacttatgccttttgagctagaaacttgtgtaagaattttttgcactcagtgacatgctggatagtgcgagtagcagattacaatagtgacggatgaacattgtattttactttacatgatggatttttttgatgtgtaaggcttttaaggcatgtaaaaattcttaacttttaaaagatgctaacacgaatataaaattgcaatcattattcttgaatttcaatgtatcttatcataacatgttcactccgtagcaacgtacgggcatttacctagtatatatatatatacgcacgtggtgcagtcgaagttgagggtgagcgggaacggcagcggcgcgccgcactgcgcggggaggtcgcggatggcgtcggcgttgagcggctggtaattggccgccgcctgcttgacgcactcgcacgcctgccgccgctccgccgggccggacggcatggccctgatccgcttcacgccggcgcagcactcggcggccggggccgcctccttgcccgtcacgtagccgacgcaggggcgcaggcttgcgtccacgtccgcgcagttcacgtccgccctaaccgccgccgccgccagcaggaccaacgccactgctgccaccgctgttgttgcggcgccgcccttcttcttcatcatcgccatcgatcgatctgtgtctctctctctcccgaacttgacttgctgctgctggagctcgatcttagcttgttgctgctgcgttcatggagcggctcgagcgctggggttttatagggcttgctgggtcggcgaagcggttcagcatcttgttggtgctgatgttgctcgtaatggcagcgctttgagtgatgcattggtacgccaaaactggcagatggatagggtcccttttttttggccataccgtgcatgaacgccacggctagctgccgttgcaaccgtttaatgcttcgctt

SEQ ID NO: 13941 - DNA, 3986 bp, Zea Mays
ataacaaggagtcctttattattattcttattatcttagtgtaaatattattattattaggggcgtttacagcgtagcaagttcactcttgcaagcaagggacttttacaagagcatgtagctagttagttcatttggagtgtgaacatgtcttatttgcacacttgcttttttcccctctctttattttctccatcttcaggatggctattattagctcctttgcatgcgttcatggaattctgcgtcagaaaaccaaaacggaaaatagcattattggtcagtgtaatatacatgatatatatatgctacggtggagttattaggatgatatatctctactactacttatgttagtagtgtaggcgtccacacaccctctcggcgcatggttctgcctctgcagccgcgacacccgcgcgtgccttcgcctccgccgccgcgatggccgtgcctctgcccccgcctcctccgccctcgcgacgctgcgccctcccccgcgatgcctgcgccttcgtccccgtgatgctcgcgcctacccccgcctcctctgcccccgcgacaccgcgcgcgcagcctcctccccgcgatgcccgcccaagctcccaaatgccggcccccgtctcctccaccgcgactcccctcgctctcccgagactcccagatgctggcccccgtatcctcggccctgatgccgccgcgattcccagatgccggcccccgtatcctcggccccgcgctcgctctcctgagctccgacgggctcccgccctagcccctgacaccatgttgtgcccaaccctaaacctagccaccacgccgtcaacaacgccaccttccttcctcgccaccacaccttctttagatggaaggcgcgactggtggcatcttcctgatctcggagcacgtctaatcctcgctccaaatgctgctccgcccccaatccgtgcggcatcttcagatggaagccgggacaatgccccatccccctctcccgagccccgacgactgacattccagggatgtcgctctgcgatcctcacctcctcgtcgttggcggtcgcgcgacctcctgaccgtcgtctccgcccgcgagatccccccgactcgcccacctctccgtccacagccgcctccatcacgcacctccacgccgacgagaaggctcgcccacctctcagtccacgactgcctacgacgcgtcttctgaataaagatctctcgaagcacccggtggatgggttctctgctgggctggtcgacgacagcaatgtcttcgagtggcaggtcaccatcatcggaccgcctgacaccctatagattggttgttggacctgtttggtgttcttcatgatgggaagaagtcgtacccgaccattctggcatgtatgttggtagtttctctcgagcaatcctcttcccaaaagtctcgagaagcttgagcaggttctaatgcttggcctagaaaagggacttccaatggtgctgcctaatccagaattccagattatgtcactgtcgaagcttgagatcttcgtgtcatgtctgggtttggaggctcgtcggcaaccggacaggaaaacagcaaggcggaagggcattgctcgatcgctggtccgatgagtggcactgtcagggagcgtgacaggggcgacaaatctagacctccacgtcggtaagatgttgtggcaaaatgtcagtgagctcacattttgaggagctgagggtcaatgtcagcgagctcactgttgaggagctgagggtccctgagtacctgcagttcaaggaacaacttatggaagaaggctttaaggttgaggctgggagaacttaccatcggacagttctagagatacttgaccaattggaaaaatgtgcaaaatcatgttctcctattgatagaagcatttatttagatttggcttacattgatggatgaatatgatttatatgaagttcctggtatctatcggcttcatggtatatctctactactcttaagaagataccagataataacaaggcaaatagatggttactgtggcagtcaaaagtttgaagccagatgcgcttcaaggtcatagagaatgggtggcagaagttgactttctgggacagttgcatcataaacaccttattaagctgattggatattgtattgaggatgatcaaaggttacttgtatatgaatttcatggcacggggaagtcttgaaaatcatcttttcagaaggactcttcccctaccttggtccaacaggatgaagattgctctaggtgccgcgaaaggactagccttcctccatggaggtcccaaacctgttatttacaaggattttaagacattgaatgttcttcttgatgtggagtacaacgcaaaactatctgatttcggtttagcaaaagctggtcatcagggtgaaaaaactcatgtatctactcgggttgttggcacctatggttatgttgcaccagagtatgtaatgacaggtatcagggataaacttttgacttcagtagctacctatagcagaaattatgtaccttgtttatctgttgcatgttggttctttacactgttttctgagcttgtagttattctcgtgttcactccatattggatagtaaattggcttaacatttttgtccgaagacataaaactaaggtgccattacaaatgttcttctttcaagtgaaactgtgtttttcgtttttacatgcagtaaaggttgtaaggctgtagacttatataatgaatcttgcgctccacttctttgggacatgatttaacatttcttaacatttctcactctataacgctttcagatcacttttcatatgttttttagatgcactttttttttggagactaagccctaagggcaacaatggagatgaccagcgtcttggtttatcaagaggaagttaatccctctcaactgaaactcccatcaaatttggggcgtagtgtgtcgattcagttgtaactattatatgtcattttgggttagcaaactgtatctactaatttctcagacttatgccttttgagctagaaacttgtgtaagaattttttgcactcagtgacatgctggatagtgcgagtagcagattacaatagtgacggatgaacattgtattttactttacatgatggatttttttgatgtgtaaggcttttaaggcatgtaaaaattcttaacttttaaaagatgctaacacgaatataaaattgcaatcattattcttgaatttcaatgtatcttatcataacatgttcactccgtagcaacgtacgggcatttacctagtatatatatatatacgcacgtggtgcagtcgaagttgagggtgagcgggaacggcagcggcgcgccgcactgcgcggggaggtcgcggatggcgtcggcgttgagcggctggtaattggccgccgcctgcttgacgcactcgcacgcctgccgccgctccgccgggccggacggcatggccctgatccgcttcacgccggcgcagcactcggcggccggggccgcctccttgcccgtcacgtagccgacgcaggggcgcaggcttgcgtccacgtccgcgcagttcacgtccgccctaaccgccgccgccgccagcaggaccaacgccactgctgccaccgctgttgttgcggcgccgcccttcttcttcatcatcgccatcgatcgatctgtgtctctctctctcccgaacttgacttgctgctgctggagctcgatcttagcttgttgctgctgcgttcatggagcggctcgagcgctggggttttatagggcttgctgggtcggcgaagcggttcagcatcttgttggtgctgatgttgctcgtaatggcagcgctttgagtgatgcattggtacgccaaaactggcagatggatagggtcccttttttttggccataccgtgcatgaacgccacggctagctgccgttgcaaccgtttaatgcttcgctt

SEQ ID NO: 13942 - DNA, 5369 bp, Zea Mays
ataacaaggagtcctttattattattcttattatcttagtgtaaatattattattattaggggcgtttacagcgtagcaagttcactcttgcaagcaagggacttttacaagagcatgtagctagttagttcatttggagtgtgaacatgtcttatttgcacacttgcttttttcccctctctttattttctccatcttcaggatggctattattagctcctttgcatgcgttcatggaattctgcgtcagaaaaccaaaacggaaaatagcattattggtcagtgtaatatacatgatatatatatgctacggtggagttattaggatgatatatctctactactacttatgttagtagtgtaggcgtccacacaccctctcggcgcatggttctgcctctgcagccgcgacacccgcgcgtgccttcgcctccgccgccgcgatggccgtgcctctgcccccgcctcctccgccctcgcgacgctgcgccctcccccgcgatgcctgcgccttcgtccccgtgatgctcgcgcctacccccgcctcctctgcccccgcgacaccgcgcgcgcagcctcctccccgcgatgcccgcccaagctcccaaatgccggcccccgtctcctccaccgcgactcccctcgctctcccgagactcccagatgctggcccccgtatcctcggccctgatgccgccgcgattcccagatgccggcccccgtatcctcggccccgcgctcgctctcctgagctccgacgggctcccgccctagcccctgacaccatgttgtgcccaaccctaaacctagccaccacgccgtcaacaacgccaccttccttcctcgccaccacaccttctttagatggaaggcgcgactggtggcatcttcctgatctcggagcacgtctaatcctcgctccaaatgctgctccgcccccaatccgtgcggcatcttcagatggaagccgggacaatgccccatccccctctcccgagccccgacgactgacattccagggatgtcgctctgcgatcctcacctcctcgtcgttggcggtcgcgcgacctcctgaccgtcgtctccgcccgcgagatccccccgactcgcccacctctccgtccacagccgcctccatcacgcacctccacgccgacgagaaggctcgcccacctctcagtccacgactgcctacgacgcgtcttctgaataaagatctctcgaagcacccggtggatgggttctctgctgggctggtcgacgacagcaatgtcttcgagtggcaggtcaccatcatcggaccgcctgacaccctatagattggttgttggacctgtttggtgttcttcatgatgggaagaagtcgtacccgaccattctggcatgtatgttggtagtttctctcgaggtttgtttcctgtcacttctgcttagcatcagaatggatttagtgtaatcggtttttcattttttcatactatagaacttggtttgcaagttgtgaacaatgttgatgatgcagagtttatattagcccatggtactgaagtctttggttcaccttctagcaatcctcttcccaaaagtctcgagaagcttgagcaggttctaatgcttggcctagaaaagggacttccaatggtgctgcctaatccagaattccagattatgtcactgtcgaagcttgagatcttcgtgtcatgtctggtatgttttttttgaacacgctggacatgtgtgtatccttatagagtagagagataaaatgagaaacaatcccatacaaagcaacttctccaccttacctaggagataagataaagttgaagcaaaacaccaaagttaatcatctaatatacatgtaaacaatgaaccgaccttactgaaaacactcgcactggaccctctctgcgaccaaaaaaatagctcctagagtttttagggactagaggctcaactcatctttgtagaagtgttgtgctgatggaagtgatggggttgcaccataaaaaatgttcctgtaattccataagtacttatacaatagggtttggaggctcgtcggcaaccggacaggaaaacagcaaggcggaagggcattgctcgatcgctggtccgatgagtggcactgtcagggagcgtgacaggggcgacaaatctagacctccacgtcggtaagatgttgtggcaaaatgtcagtgagctcacattttgaggagctgagggtcaatgtcagcgagctcactgttgaggagctgagggtccctgagtacctgcagttcaaggaacaacttatggaagaagggtatgaattcttatattcaccaatgaagatgatccttttggtactattacaggagcaacaacaataataatcaatggcacctaaacattttcttatcctctaagttcatgtatttcatgtttactaatcattcctattttagctttaaggttgaggctgggagaacttaccatcggacagttctagagatacttgaccaattggaaaaaatttggcttacattgatggatgaatatgatttatatgaagttcctggtatctatcggcttcatggtatatctctactactcttaagaagataccaggtatgttcctttcctttcttttattttcttagccccatctttatcatgttttcaccattacagagtttgcctaccgcccccgttcgcccgcaagcaaactctagccgaggaagacgcggtttctcacctctgcgccctcgccagtcccacgagccccgccttccctagcctctcaatgcctccagattctctaccccttgccccccagtcgttgtttccgcccgcgccgctgacccatgacctcgcatgcggggctagggtttccacatgcgatggaagtagcggtgatgactttgctgttgtttgcatctgcctcgacttcctcggtccggtcttgccatctaccagcgctgcctaggtttgcctctcctgtcctgcagtgctgaagttccgcgtgtgctggttggtgtgtgttacgcgtcttggaacgagagggcaacttcgatgcggggctttgattggctgttttgtttgtggtgggggtagttgggtttgcgacattttttaggaaaccgattggtttcgtttcagcttgttttcagagaagggatagtggatttgtcaacactagactggattccataaaaatttgatagaatcagtgctttcagctttgagctagactacacatttttctgtgaggttgcaccatttttccctagataacttctatgttgaaatggtttagttctgaagctgtcattgttagataataacaaggcaaatagatggttactgtggcagtcaaaagtttgaagccagatgcgcttcaaggtcatagagaatgggtggtaagtattgtatgtcatttttatttttgaatggagtgttggaggtatggtttttaaaaataatcacatttccaggcagaagttgactttctgggacagttgcatcataaacaccttattaagctgattggatattgtattgaggatgatcaaaggttacttgtatatgaatttcatggcacggggaagtcttgaaaatcatcttttcagaaggactcttcccctaccttggtccaacaggatgaagattgctctaggtgccgcgaaaggactagccttcctccatggaggtcccaaacctgttatttacaaggattttaagacattgaatgttcttcttgatgtggagtacaacgcaaaactatctgatttcggtttagcaaaagctggtcatcagggtgaaaaaactcatgtatctactcgggttgttggcacctatggttatgttgcaccagagtatgtaatgacaggtatcagggataaacttttgacttcagtagctacctatagcagaaattatgtaccttgtttatctgttgcatgttggttctttacactgttttctgagcttgtagttattctcgtgttcactccatattggatagtaaattggcttaacatttttgtccgaagacataaaactaaggtgccattacaaatgttcttctttcaagtgaaactgtgtttttcgtttttacatgcagtaaaggttgtaaggctgtagacttatataatgaatcttgcgctccacttctttgggacatgatttaacatttcttaacatttctcactctataacgctttcagatcacttttcatatgttttttagatgcactttttttttggagactaagccctaagggcaacaatggagatgaccagcgtcttggtttatcaagaggaagttaatccctctcaactgaaactcccatcaaatttggggcgtagtgtgtcgattcagttgtaactattatatgtcattttgggttagcaaactgtatctactaatttctcagacttatgccttttgagctagaaacttgtgtaagaattttttgcactcagtgacatgctggatagtgcgagtagcagattacaatagtgacggatgaacattgtattttactttacatgatggatttttttgatgtgtaaggcttttaaggcatgtaaaaattcttaacttttaaaagatgctaacacgaatataaaattgcaatcattattcttgaatttcaatgtatcttatcataacatgttcactccgtagcaacgtacgggcatttacctagtatatatatatatacgcacgtggtgcagtcgaagttgagggtgagcgggaacggcagcggcgcgccgcactgcgcggggaggtcgcggatggcgtcggcgttgagcggctggtaattggccgccgcctgcttgacgcactcgcacgcctgccgccgctccgccgggccggacggcatggccctgatccgcttcacgccggcgcagcactcggcggccggggccgcctccttgcccgtcacgtagccgacgcaggggcgcaggcttgcgtccacgtccgcgcagttcacgtccgccctaaccgccgccgccgccagcaggaccaacgccactgctgccaccgctgttgttgcggcgccgcccttcttcttcatcatcgccatcgatcgatctgtgtctctctctctcccgaacttgacttgctgctgctggagctcgatcttagcttgttgctgctgcgttcatggagcggctcgagcgctggggttttatagggcttgctgggtcggcgaagcggttcagcatcttgttggtgctgatgttgctcgtaatggcagcgctttgagtgatgcattggtacgccaaaactggcagatggatagggtcccttttttttggccataccgtgcatgaacgccacggctagctgccgttgcaaccgtttaatgcttcgctt

SEQ ID NO: 13943 - DNA, 4855 bp, Zea Mays
ataacaaggagtcctttattattattcttattatcttagtgtaaatattattattattaggggcgtttacagcgtagcaagttcactcttgcaagcaagggacttttacaagagcatgtagctagttagttcatttggagtgtgaacatgtcttatttgcacacttgcttttttcccctctctttattttctccatcttcaggatggctattattagctcctttgcatgcgttcatggaattctgcgtcagaaaaccaaaacggaaaatagcattattggtcagtgtaatatacatgatatatatatgctacggtggagttattaggatgatatatctctactactacttatgttagtagtgtaggcgtccacacaccctctcggcgcatggttctgcctctgcagccgcgacacccgcgcgtgccttcgcctccgccgccgcgatggccgtgcctctgcccccgcctcctccgccctcgcgacgctgcgccctcccccgcgatgcctgcgccttcgtccccgtgatgctcgcgcctacccccgcctcctctgcccccgcgacaccgcgcgcgcagcctcctccccgcgatgcccgcccaagctcccaaatgccggcccccgtctcctccaccgcgactcccctcgctctcccgagactcccagatgctggcccccgtatcctcggccctgatgccgccgcgattcccagatgccggcccccgtatcctcggccccgcgctcgctctcctgagctccgacgggctcccgccctagcccctgacaccatgttgtgcccaaccctaaacctagccaccacgccgtcaacaacgccaccttccttcctcgccaccacaccttctttagatggaaggcgcgactggtggcatcttcctgatctcggagcacgtctaatcctcgctccaaatgctgctccgcccccaatccgtgcggcatcttcagatggaagccgggacaatgccccatccccctctcccgagccccgacgactgacattccagggatgtcgctctgcgatcctcacctcctcgtcgttggcggtcgcgcgacctcctgaccgtcgtctccgcccgcgagatccccccgactcgcccacctctccgtccacagccgcctccatcacgcacctccacgccgacgagaaggctcgcccacctctcagtccacgactgcctacgacgcgtcttctgaataaagatctctcgaagcacccggtggatgggttctctgctgggctggtcgacgacagcaatgtcttcgagtggcaggtcaccatcatcggaccgcctgacaccctatagattggttgttggacctgtttggtgttcttcatgatgggaagaagtcgtacccgaccattctggcatgtatgttggtagtttctctcgaggtttgtttcctgtcacttctgcttagcatcagaatggatttagtgtaatcggtttttcattttttcatactatagaacttggtttgcaagttgtgaacaatgttgatgatgcagagtttatattagcccatggtactgaagtctttggttcaccttctagcaatcctcttcccaaaagtctcgagaagcttgagcaggttctaatgcttggcctagaaaagggacttccaatggtgctgcctaatccagaattccagattatgtcactgtcgaagcttgagatcttcgtgtcatgtctgggtttggaggctcgtcggcaaccggacaggaaaacagcaaggcggaagggcattgctcgatcgctggtccgatgagtggcactgtcagggagcgtgacaggggcgacaaatctagacctccacgtcggtaagatgttgtggcaaaatgtcagtgagctcacattttgaggagctgagggtcaatgtcagcgagctcactgttgaggagctgagggtccctgagtacctgcagttcaaggaacaacttatggaagaaggctttaaggttgaggctgggagaacttaccatcggacagttctagagatacttgaccaattggaaaaatgtgcaaaatcatgttctcctattgatagaagcatttatttagatttggcttacattgatggatgaatatgatttatatgaagttcctggtatctatcggcttcatggtatatctctactactcttaagaagataccaggtatgttcctttcctttcttttattttcttagccccatctttatcatgttttcaccattacagagtttgcctaccgcccccgttcgcccgcaagcaaactctagccgaggaagacgcggtttctcacctctgcgccctcgccagtcccacgagccccgccttccctagcctctcaatgcctccagattctctaccccttgccccccagtcgttgtttccgcccgcgccgctgacccatgacctcgcatgcggggctagggtttccacatgcgatggaagtagcggtgatgactttgctgttgtttgcatctgcctcgacttcctcggtccggtcttgccatctaccagcgctgcctaggtttgcctctcctgtcctgcagtgctgaagttccgcgtgtgctggttggtgtgtgttacgcgtcttggaacgagagggcaacttcgatgcggggctttgattggctgttttgtttgtggtgggggtagttgggtttgcgacattttttaggaaaccgattggtttcgtttcagcttgttttcagagaagggatagtggatttgtcaacactagactggattccataaaaatttgatagaatcagtgctttcagctttgagctagactacacatttttctgtgaggttgcaccatttttccctagataacttctatgttgaaatggtttagttctgaagctgtcattgttagataataacaaggcaaatagatggttactgtggcagtcaaaagtttgaagccagatgcgcttcaaggtcatagagaatgggtggcagaagttgactttctgggacagttgcatcataaacaccttattaagctgattggatattgtattgaggatgatcaaaggttacttgtatatgaatttcatggcacggggaagtcttgaaaatcatcttttcagaaggactcttcccctaccttggtccaacaggatgaagattgctctaggtgccgcgaaaggactagccttcctccatggaggtcccaaacctgttatttacaaggattttaagacattgaatgttcttcttgatgtggagtacaacgcaaaactatctgatttcggtttagcaaaagctggtcatcagggtgaaaaaactcatgtatctactcgggttgttggcacctatggttatgttgcaccagagtatgtaatgacaggtatcagggataaacttttgacttcagtagctacctatagcagaaattatgtaccttgtttatctgttgcatgttggttctttacactgttttctgagcttgtagttattctcgtgttcactccatattggatagtaaattggcttaacatttttgtccgaagacataaaactaaggtgccattacaaatgttcttctttcaagtgaaactgtgtttttcgtttttacatgcagtaaaggttgtaaggctgtagacttatataatgaatcttgcgctccacttctttgggacatgatttaacatttcttaacatttctcactctataacgctttcagatcacttttcatatgttttttagatgcactttttttttggagactaagccctaagggcaacaatggagatgaccagcgtcttggtttatcaagaggaagttaatccctctcaactgaaactcccatcaaatttggggcgtagtgtgtcgattcagttgtaactattatatgtcattttgggttagcaaactgtatctactaatttctcagacttatgccttttgagctagaaacttgtgtaagaattttttgcactcagtgacatgctggatagtgcgagtagcagattacaatagtgacggatgaacattgtattttactttacatgatggatttttttgatgtgtaaggcttttaaggcatgtaaaaattcttaacttttaaaagatgctaacacgaatataaaattgcaatcattattcttgaatttcaatgtatcttatcataacatgttcactccgtagcaacgtacgggcatttacctagtatatatatatatacgcacgtggtgcagtcgaagttgagggtgagcgggaacggcagcggcgcgccgcactgcgcggggaggtcgcggatggcgtcggcgttgagcggctggtaattggccgccgcctgcttgacgcactcgcacgcctgccgccgctccgccgggccggacggcatggccctgatccgcttcacgccggcgcagcactcggcggccggggccgcctccttgcccgtcacgtagccgacgcaggggcgcaggcttgcgtccacgtccgcgcagttcacgtccgccctaaccgccgccgccgccagcaggaccaacgccactgctgccaccgctgttgttgcggcgccgcccttcttcttcatcatcgccatcgatcgatctgtgtctctctctctcccgaacttgacttgctgctgctggagctcgatcttagcttgttgctgctgcgttcatggagcggctcgagcgctggggttttatagggcttgctgggtcggcgaagcggttcagcatcttgttggtgctgatgttgctcgtaatggcagcgctttgagtgatgcattggtacgccaaaactggcagatggatagggtcccttttttttggccataccgtgcatgaacgccacggctagctgccgttgcaaccgtttaatgcttcgctt

SEQ ID NO: 13944 - DNA, 4763 bp, Zea Mays
ataacaaggagtcctttattattattcttattatcttagtgtaaatattattattattaggggcgtttacagcgtagcaagttcactcttgcaagcaagggacttttacaagagcatgtagctagttagttcatttggagtgtgaacatgtcttatttgcacacttgcttttttcccctctctttattttctccatcttcaggatggctattattagctcctttgcatgcgttcatggaattctgcgtcagaaaaccaaaacggaaaatagcattattggtcagtgtaatatacatgatatatatatgctacggtggagttattaggatgatatatctctactactacttatgttagtagtgtaggcgtccacacaccctctcggcgcatggttctgcctctgcagccgcgacacccgcgcgtgccttcgcctccgccgccgcgatggccgtgcctctgcccccgcctcctccgccctcgcgacgctgcgccctcccccgcgatgcctgcgccttcgtccccgtgatgctcgcgcctacccccgcctcctctgcccccgcgacaccgcgcgcgcagcctcctccccgcgatgcccgcccaagctcccaaatgccggcccccgtctcctccaccgcgactcccctcgctctcccgagactcccagatgctggcccccgtatcctcggccctgatgccgccgcgattcccagatgccggcccccgtatcctcggccccgcgctcgctctcctgagctccgacgggctcccgccctagcccctgacaccatgttgtgcccaaccctaaacctagccaccacgccgtcaacaacgccaccttccttcctcgccaccacaccttctttagatggaaggcgcgactggtggcatcttcctgatctcggagcacgtctaatcctcgctccaaatgctgctccgcccccaatccgtgcggcatcttcagatggaagccgggacaatgccccatccccctctcccgagccccgacgactgacattccagggatgtcgctctgcgatcctcacctcctcgtcgttggcggtcgcgcgacctcctgaccgtcgtctccgcccgcgagatccccccgactcgcccacctctccgtccacagccgcctccatcacgcacctccacgccgacgagaaggctcgcccacctctcagtccacgactgcctacgacgcgtcttctgaataaagatctctcgaagcacccggtggatgggttctctgctgggctggtcgacgacagcaatgtcttcgagtggcaggtcaccatcatcggaccgcctgacaccctatagattggttgttggacctgtttggtgttcttcatgatgggaagaagtcgtacccgaccattctggcatgtatgttggtagtttctctcgaggtttgtttcctgtcacttctgcttagcatcagaatggatttagtgtaatcggtttttcattttttcatactatagaacttggtttgcaagttgtgaacaatgttgatgatgcagagtttatattagcccatggtactgaagtctttggttcaccttctagcaatcctcttcccaaaagtctcgagaagcttgagcaggttctaatgcttggcctagaaaagggacttccaatggtgctgcctaatccagaattccagattatgtcactgtcgaagcttgagatcttcgtgtcatgtctgggtttggaggctcgtcggcaaccggacaggaaaacagcaaggcggaagggcattgctcgatcgctggtccgatgagtggcactgtcagggagcgtgacaggggcgacaaatctagacctccacgtcggtaagatgttgtggcaaaatgtcagtgagctcacattttgaggagctgagggtcaatgtcagcgagctcactgttgaggagctgagggtccctgagtacctgcagttcaaggaacaacttatggaagaagggtatgaattcttatattcaccaatgaagatgatccttttggtactattacaggagcaacaacaataataatcaatggcacctaaacattttcttatcctctaagttcatgtatttcatgtttactaatcattcctattttagctttaaggttgaggctgggagaacttaccatcggacagttctagagatacttgaccaattggaaaaatgtgcaaaatcatgttctcctattgatagaagcatttatttagatttggcttacattgatggatgaatatgatttatatgaagttcctggtatctatcggcttcatggtatatctctactactcttaagaagataccaggtatgttcctttcctttcttttattttcttagccccatctttatcatgttttcaccattacagagtttgcctaccgcccccgttcgcccgcaagcaaactctagccgaggaagacgcggtttctcacctctgcgccctcgccagtcccacgagccccgccttccctagcctctcaatgcctccagattctctaccccttgccccccagtcgttgtttccgcccgcgccgctgacccatgacctcgcatgcggggctagggtttccacatgcgatggaagtagcggtgatgactttgctgttgtttgcatctgcctcgacttcctcggtccggtcttgccatctaccagcgctgcctaggtttgcctctcctgtcctgcagtgctgaagttccgcgtgtgctggttggtgtgtgttacgcgtcttggaacgagagggcaacttcgatgcggggctttgattggctgttttgtttgtggtgggggtagttgggtttgcgacattttttaggaaaccgattggtttcgtttcagcttgttttcagagaagggatagtggatttgtcaacactagactggattccataaaaatttgatagaatcagtgctttcagctttgagctagactacacatttttctgtgaggttgcaccatttttccctagataacttctatgttgaaatggtttagttctgaagctgtcattgttagataataacaaggcaaatagatggttactgtggcagtcaaaagtttgaagccagatgcgcttcaaggtcatagagaatgggtggcagaagttgactttctgggacagttgcatcataaacaccttattaagctgattggatattgtattgaggatgatcaaaggttacttgtatatgaatttcatggcacggggaagtcttgaaaatcatcttttcagaaggactcttcccctaccttggtccaacaggatgaagattgctctaggtgccgcgaaaggactagccttcctccatggaggtcccaaacctgttatttacaaggattttaagacattgaatgttcttcttgatgtggagtacaacgcaaaactatctgatttcggtttagcaaaagctggtcatcagggtgaaaaaactcatgtatctactcgggttgttggcacctatggttatgttgcaccagagtatgtaatgacagtaaaggttgtaaggctgtagacttatataatgaatcttgcgctccacttctttgggacatgatttaacatttcttaacatttctcactctataacgctttcagatcacttttcatatgttttttagatgcactttttttttggagactaagccctaagggcaacaatggagatgaccagcgtcttggtttatcaagaggaagttaatccctctcaactgaaactcccatcaaatttggggcgtagtgtgtcgattcagttgtaactattatatgtcattttgggttagcaaactgtatctactaatttctcagacttatgccttttgagctagaaacttgtgtaagaattttttgcactcagtgacatgctggatagtgcgagtagcagattacaatagtgacggatgaacattgtattttactttacatgatggatttttttgatgtgtaaggcttttaaggcatgtaaaaattcttaacttttaaaagatgctaacacgaatataaaattgcaatcattattcttgaatttcaatgtatcttatcataacatgttcactccgtagcaacgtacgggcatttacctagtatatatatatatacgcacgtggtgcagtcgaagttgagggtgagcgggaacggcagcggcgcgccgcactgcgcggggaggtcgcggatggcgtcggcgttgagcggctggtaattggccgccgcctgcttgacgcactcgcacgcctgccgccgctccgccgggccggacggcatggccctgatccgcttcacgccggcgcagcactcggcggccggggccgcctccttgcccgtcacgtagccgacgcaggggcgcaggcttgcgtccacgtccgcgcagttcacgtccgccctaaccgccgccgccgccagcaggaccaacgccactgctgccaccgctgttgttgcggcgccgcccttcttcttcatcatcgccatcgatcgatctgtgtctctctctctcccgaacttgacttgctgctgctggagctcgatcttagcttgttgctgctgcgttcatggagcggctcgagcgctggggttttatagggcttgctgggtcggcgaagcggttcagcatcttgttggtgctgatgttgctcgtaatggcagcgctttgagtgatgcattggtacgccaaaactggcagatggatagggtcccttttttttggccataccgtgcatgaacgccacggctagctgccgttgcaaccgtttaatgcttcgctt

SEQ ID NO: 13945 - DNA, 4769 bp, Zea Mays
ataacaaggagtcctttattattattcttattatcttagtgtaaatattattattattaggggcgtttacagcgtagcaagttcactcttgcaagcaagggacttttacaagagcatgtagctagttagttcatttggagtgtgaacatgtcttatttgcacacttgcttttttcccctctctttattttctccatcttcaggatggctattattagctcctttgcatgcgttcatggaattctgcgtcagaaaaccaaaacggaaaatagcattattggtcagtgtaatatacatgatatatatatgctacggtggagttattaggatgatatatctctactactacttatgttagtagtgtaggcgtccacacaccctctcggcgcatggttctgcctctgcagccgcgacacccgcgcgtgccttcgcctccgccgccgcgatggccgtgcctctgcccccgcctcctccgccctcgcgacgctgcgccctcccccgcgatgcctgcgccttcgtccccgtgatgctcgcgcctacccccgcctcctctgcccccgcgacaccgcgcgcgcagcctcctccccgcgatgcccgcccaagctcccaaatgccggcccccgtctcctccaccgcgactcccctcgctctcccgagactcccagatgctggcccccgtatcctcggccctgatgccgccgcgattcccagatgccggcccccgtatcctcggccccgcgctcgctctcctgagctccgacgggctcccgccctagcccctgacaccatgttgtgcccaaccctaaacctagccaccacgccgtcaacaacgccaccttccttcctcgccaccacaccttctttagatggaaggcgcgactggtggcatcttcctgatctcggagcacgtctaatcctcgctccaaatgctgctccgcccccaatccgtgcggcatcttcagatggaagccgggacaatgccccatccccctctcccgagccccgacgactgacattccagggatgtcgctctgcgatcctcacctcctcgtcgttggcggtcgcgcgacctcctgaccgtcgtctccgcccgcgagatccccccgactcgcccacctctccgtccacagccgcctccatcacgcacctccacgccgacgagaaggctcgcccacctctcagtccacgactgcctacgacgcgtcttctgaataaagatctctcgaagcacccggtggatgggttctctgctgggctggtcgacgacagcaatgtcttcgagtggcaggtcaccatcatcggaccgcctgacaccctatatagaacaattcaacatattcagatcagggtcatggatatgttctcggtcaagagtctttatctctactcggattggttgttggacctgtttggtgttcttcatgatgggaagaagtcgtacccgaccattctggcatttgtgaacaatgttgatgatgcagagtttatattagcccatggtactgaagtctttggttcaccttctagcaatcctcttcccaaaagtctcgagaagcttgagcaggttctaatgcttggcctagaaaagggacttccaatggtgctgcctaatccagaattccagattatgtcactgtcgaagcttgagatcttcgtgtcatgtctgggtttggaggctcgtcggcaaccggacaggaaaacagcaaggcggaagggcattgctcgatcgctggtccgatgagtggcactgtcagggagcgtgacaggggcgacaaatctagacctccacgtcggtaagatgttgtggcaaaatgtcagtgagctcacattttgaggagctgagggtcaatgtcagcgagctcactgttgaggagctgagggtccctgagtacctgcagttcaaggaacaacttatggaagaaggctttaaggttgaggctgggagaacttaccatcggacagttctagagatacttgaccaattggaaaaaatttggcttacattgatggatgaatatgatttatatgaagttcctggtatctatcggcttcatggtatatctctactactcttaagaagataccaggtatgttcctttcctttcttttattttcttagccccatctttatcatgttttcaccattacagagtttgcctaccgcccccgttcgcccgcaagcaaactctagccgaggaagacgcggtttctcacctctgcgccctcgccagtcccacgagccccgccttccctagcctctcaatgcctccagattctctaccccttgccccccagtcgttgtttccgcccgcgccgctgacccatgacctcgcatgcggggctagggtttccacatgcgatggaagtagcggtgatgactttgctgttgtttgcatctgcctcgacttcctcggtccggtcttgccatctaccagcgctgcctaggtttgcctctcctgtcctgcagtgctgaagttccgcgtgtgctggttggtgtgtgttacgcgtcttggaacgagagggcaacttcgatgcggggctttgattggctgttttgtttgtggtgggggtagttgggtttgcgacattttttaggaaaccgattggtttcgtttcagcttgttttcagagaagggatagtggatttgtcaacactagactggattccataaaaatttgatagaatcagtgctttcagctttgagctagactacacatttttctgtgaggttgcaccatttttccctagataacttctatgttgaaatggtttagttctgaagctgtcattgttagataataacaaggcaaatagatggttactgtggcagtcaaaagtttgaagccagatgcgcttcaaggtcatagagaatgggtggcagaagttgactttctgggacagttgcatcataaacaccttattaagctgattggatattgtattgaggatgatcaaaggttacttgtatatgaatttcatggcacggggaagtcttgaaaatcatcttttcagaaggactcttcccctaccttggtccaacaggatgaagattgctctaggtgccgcgaaaggactagccttcctccatggaggtcccaaacctgttatttacaaggattttaagacattgaatgttcttcttgatgtggagtacaacgcaaaactatctgatttcggtttagcaaaagctggtcatcagggtgaaaaaactcatgtatctactcgggttgttggcacctatggttatgttgcaccagagtatgtaatgacaggtatcagggataaacttttgacttcagtagctacctatagcagaaattatgtaccttgtttatctgttgcatgttggttctttacactgttttctgagcttgtagttattctcgtgttcactccatattggatagtaaattggcttaacatttttgtccgaagacataaaactaaggtgccattacaaatgttcttctttcaagtgaaactgtgtttttcgtttttacatgcagtaaaggttgtaaggctgtagacttatataatgaatcttgcgctccacttctttgggacatgatttaacatttcttaacatttctcactctataacgctttcagatcacttttcatatgttttttagatgcactttttttttggagactaagccctaagggcaacaatggagatgaccagcgtcttggtttatcaagaggaagttaatccctctcaactgaaactcccatcaaatttggggcgtagtgtgtcgattcagttgtaactattatatgtcattttgggttagcaaactgtatctactaatttctcagacttatgccttttgagctagaaacttgtgtaagaattttttgcactcagtgacatgctggatagtgcgagtagcagattacaatagtgacggatgaacattgtattttactttacatgatggatttttttgatgtgtaaggcttttaaggcatgtaaaaattcttaacttttaaaagatgctaacacgaatataaaattgcaatcattattcttgaatttcaatgtatcttatcataacatgttcactccgtagcaacgtacgggcatttacctagtatatatatatatacgcacgtggtgcagtcgaagttgagggtgagcgggaacggcagcggcgcgccgcactgcgcggggaggtcgcggatggcgtcggcgttgagcggctggtaattggccgccgcctgcttgacgcactcgcacgcctgccgccgctccgccgggccggacggcatggccctgatccgcttcacgccggcgcagcactcggcggccggggccgcctccttgcccgtcacgtagccgacgcaggggcgcaggcttgcgtccacgtccgcgcagttcacgtccgccctaaccgccgccgccgccagcaggaccaacgccactgctgccaccgctgttgttgcggcgccgcccttcttcttcatcatcgccatcgatcgatctgtgtctctctctctcccgaacttgacttgctgctgctggagctcgatcttagcttgttgctgctgcgttcatggagcggctcgagcgctggggttttatagggcttgctgggtcggcgaagcggttcagcatcttgttggtgctgatgttgctcgtaatggcagcgctttgagtgatgcattggtacgccaaaactggcagatggatagggtcccttttttttggccataccgtgcatgaacgccacggctagctgccgttgcaaccgtttaatgcttcgctt

SEQ ID NO: 13946 - DNA, 4386 bp, Zea Mays
ataacaaggagtcctttattattattcttattatcttagtgtaaatattattattattaggggcgtttacagcgtagcaagttcactcttgcaagcaagggacttttacaagagcatgtagctagttagttcatttggagtgtgaacatgtcttatttgcacacttgcttttttcccctctctttattttctccatcttcaggatggctattattagctcctttgcatgcgttcatggaattctgcgtcagaaaaccaaaacggaaaatagcattattggtcagtgtaatatacatgatatatatatgctacggtggagttattaggatgatatatctctactactacttatgttagtagtgtaggcgtccacacaccctctcggcgcatggttctgcctctgcagccgcgacacccgcgcgtgccttcgcctccgccgccgcgatggccgtgcctctgcccccgcctcctccgccctcgcgacgctgcgccctcccccgcgatgcctgcgccttcgtccccgtgatgctcgcgcctacccccgcctcctctgcccccgcgacaccgcgcgcgcagcctcctccccgcgatgcccgcccaagctcccaaatgccggcccccgtctcctccaccgcgactcccctcgctctcccgagactcccagatgctggcccccgtatcctcggccctgatgccgccgcgattcccagatgccggcccccgtatcctcggccccgcgctcgctctcctgagctccgacgggctcccgccctagcccctgacaccatgttgtgcccaaccctaaacctagccaccacgccgtcaacaacgccaccttccttcctcgccaccacaccttctttagatggaaggcgcgactggtggcatcttcctgatctcggagcacgtctaatcctcgctccaaatgctgctccgcccccaatccgtgcggcatcttcagatggaagccgggacaatgccccatccccctctcccgagccccgacgactgacattccagggatgtcgctctgcgatcctcacctcctcgtcgttggcggtcgcgcgacctcctgaccgtcgtctccgcccgcgagatccccccgactcgcccacctctccgtccacagccgcctccatcacgcacctccacgccgacgagaaggctcgcccacctctcagtccacgactgcctacgacgcgtcttctgaataaagatctctcgaagcacccggtggatgggttctctgctgggctggtcgacgacagcaatgtcttcgagtggcaggtcaccatcatcggaccgcctgacaccctatagattggttgttggacctgtttggtgttcttcatgatgggaagaagtcgtacccgaccattctggcatgtatgttggtagtttctctcgagaacttggtttgcaagttgtgaacaatgttgatgatgcagagtttatattagcccatggtactgaagtctttggttcaccttctagcaatcctcttcccaaaagtctcgagaagcttgagcaggttctaatgcttggcctagaaaagggacttccaatggtgctgcctaatccagaattccagattatgtcactgtcgaagcttgagatcttcgtgtcatgtctgggtttggaggctcgtcggcaaccggacaggaaaacagcaaggcggaagggcattgctcgatcgctggtccgatgagtggcactgtcagggagcgtgacaggggcgacaaatctagacctccacgtcggtaagatgttgtggcaaaatgtcagtgagctcacattttgaggagctgagggtcaatgtcagcgagctcactgttgaggagctgagggtccctgagtacctgcagttcaaggaacaacttatggaagaaggctttaaggttgaggctgggagaacttaccatcggacagttctagagatacttgaccaattggaaaaaatttggcttacattgatggatgaatatgatttatatgaagttcctggtatctatcggcttcatggtatatctctactactcttaagaagataccaggtatgttcctttcctttcttttattttcttagccccatctttatcatgttttcaccattacagagtttgcctaccgcccccgttcgcccgcaagcaaactctagccgaggaagacgcggtttctcacctctgcgccctcgccagtcccacgagccccgccttccctagcctctcaatgcctccagattctctaccccttgccccccagtcgttgtttccgcccgcgccgctgacccatgacctcgcatgcggggctagggtttccacatgcgatggaagtagcggtgatgactttgctgttgtttgcatctgcctcgacttcctcggtccggtcttgccatctaccagcgctgcctagataataacaaggcaaatagatggttactgtggcagtcaaaagtttgaagccagatgcgcttcaaggtcatagagaatgggtggcagaagttgactttctgggacagttgcatcataaacaccttattaagctgattggatattgtattgaggatgatcaaaggttacttgtatatgaatttcatggcacggggaagtcttgaaaatcatcttttcagaaggactcttcccctaccttggtccaacaggatgaagattgctctaggtgccgcgaaaggactagccttcctccatggaggtcccaaacctgttatttacaaggattttaagacattgaatgttcttcttgatgtggagtacaacgcaaaactatctgatttcggtttagcaaaagctggtcatcagggtgaaaaaactcatgtatctactcgggttgttggcacctatggttatgttgcaccagagtatgtaatgacaggtatcagggataaacttttgacttcagtagctacctatagcagaaattatgtaccttgtttatctgttgcatgttggttctttacactgttttctgagcttgtagttattctcgtgttcactccatattggatagtaaattggcttaacatttttgtccgaagacataaaactaaggtgccattacaaatgttcttctttcaagtgaaactgtgtttttcgtttttacatgcagtaaaggttgtaaggctgtagacttatataatgaatcttgcgctccacttctttgggacatgatttaacatttcttaacatttctcactctataacgctttcagatcacttttcatatgttttttagatgcactttttttttggagactaagccctaagggcaacaatggagatgaccagcgtcttggtttatcaagaggaagttaatccctctcaactgaaactcccatcaaatttggggcgtagtgtgtcgattcagttgtaactattatatgtcattttgggttagcaaactgtatctactaatttctcagacttatgccttttgagctagaaacttgtgtaagaattttttgcactcagtgacatgctggatagtgcgagtagcagattacaatagtgacggatgaacattgtattttactttacatgatggatttttttgatgtgtaaggcttttaaggcatgtaaaaattcttaacttttaaaagatgctaacacgaatataaaattgcaatcattattcttgaatttcaatgtatcttatcataacatgttcactccgtagcaacgtacgggcatttacctagtatatatatatatacgcacgtggtgcagtcgaagttgagggtgagcgggaacggcagcggcgcgccgcactgcgcggggaggtcgcggatggcgtcggcgttgagcggctggtaattggccgccgcctgcttgacgcactcgcacgcctgccgccgctccgccgggccggacggcatggccctgatccgcttcacgccggcgcagcactcggcggccggggccgcctccttgcccgtcacgtagccgacgcaggggcgcaggcttgcgtccacgtccgcgcagttcacgtccgccctaaccgccgccgccgccagcaggaccaacgccactgctgccaccgctgttgttgcggcgccgcccttcttcttcatcatcgccatcgatcgatctgtgtctctctctctcccgaacttgacttgctgctgctggagctcgatcttagcttgttgctgctgcgttcatggagcggctcgagcgctggggttttatagggcttgctgggtcggcgaagcggttcagcatcttgttggtgctgatgttgctcgtaatggcagcgctttgagtgatgcattggtacgccaaaactggcagatggatagggtcccttttttttggccataccgtgcatgaacgccacggctagctgccgttgcaaccgtttaatgcttcgctt

SEQ ID NO: 13947 - DNA, 1467 bp, Zea Mays
catcacaccaaacaagagaacatactgtataataatgttctacacggcgtaacgagattgtaggttcgaggaccactaagtttggagttacaattaaagagatacgactttctgaagctctataatgattaaataagtaagatctattatataataattaatataattcatgtgagacaaattactaaatagctaattcaacttcaataaaaaaataacttggtcagaggtcaccttggtcaaagtccaattatgggtgaaaagcattgcatttacttttaattagaaaagtaattctattgggcagtggttacaccattatttcattacttctgaaaacatgaggaattaatgctacttaatatgtaggtacttctaatgcggagctaacacaactagaacagactaaatccgagttagaacgaataagatatgaattttctaatcttttaggaattatttttatactgaaaacaatttctaatttccatttactgattccagtgaatgctttggactacgaccacaatttaataaagatacaagggctaacgtgctaaaaataggacctactttaaaggttccctaacagcgctgggacgacgggttgaaatcgagaaaccctagggtctccatagaaaaataaaccttggttgtgttacacgatgcactgtgggcaatagcccagatcaagtgacgaagaggtatgcatccaaagccattagatctgggatccatggtccaaaatccaatgacgatgcgacccgatctaagccatccgacagccgatcaacagcttggattctatgcgctaaaccagtaaggctaaatctaatccaaccgtccacgcgccgatcgacggtcagaaacccccctcccccaccattgagggccagagcgatggcgcacttgcacgatggtggtgccatcgccgccctatgcccaaaactcatatcccgcccaaaactccgatcaggagggcacaaatcctagaagaggagatcgcgaggctagggaggggtatctcaccgaggatagtagcgtgggcagccctggccgcggggacttgcggtccgcatcaagctatcgtcgacggtgagcaattcttaaggtgctggtgatgaatcccgagcggtgcagcttcgaccatgctccttctagcctggagaagccccaaggaataaccccgagggctcggtcgatggcgaaacgaggctttcacgcgacggatctctgtgctcggtgctctctctctcccttgatttcgcttgcaactcccggcgctacagcttgattccgatgcacggaagggcgaggcgatcttcgcggccacagttttatggacggacacggccttaacagcctccagctgagaattcggggtggcgcaacaacctatgtcgaggcatccggctaggaagagaaacattagctggttgggggcacccgctagagagaaagagggtt

SEQ ID NO: 13948 - DNA, 1231 bp, Zea Mays
gacctgtgggtcctagcgggccggctattgtcctccctgcgttcccccaccaccacggcggcagccactggttggcagcggttgtccttctccggtgtccatggcgccgccgctcgcgacacgcggcctccccctcgcctcccgcggcccgccttcttgcgcggcctcctgctcctcgtgcctgccctcgtatctccagctcggtcgccggccaagccgccggttccgctgctcctcgccacaggtcgatgcagcggcggtgccgccggggaagggcggggagtaccggccctctttcgcggacgacctcctcctcgccttcttccggagcaagatggtgaaggaggttggatgggattctgaaaagcctgggtatgctggactaatggaggtagcaaaccgtctcatggtcaagggaaagagtgctttggagactgagcaggctgctgtccgagtactacagtcactgtttccacctctcttgcttgttctttacaaagctcttttagcgccaattgctaatggccaactagccgctatgatgcttgctagggcgacagcaatttcatgtcaatggttgatgggctcatgctcagttaattcagtcactctgcctgatggaaaatcatggtcaagtgttcgttgagaaatgcaagtacctggaagagagcaagtgccttggcatttgcatcaacacatgcaaactgccaactcagactttcttcaaagatcacatgggtgttgatttgtacatggagccaaattttgaagactatagctgccagttcaacttcggggtgccgcctccacctcttgatactgacaaagccctcaaggaaccgtgcttggacatctgcacaaacgcaaggcggcgtagagagctcggaagaaatagcagcccagatgagctcagttgcccccaagtttgatatgctccctgtaaaagactgcacatcatagattattgcgcgttgggcttgggcatggtgtgccttgcttgcatttgtcagtcttcgtgcaacgatgtcaagtaatttcggtaataccatttctatgttgcagacacacacgttttcgattggatcaacatgactacatgagtaaataactctcagtctgatccatcagatcaacacccaatgaaacatcacagtgatctggatacaagttcactgggtatacaaaggaacatatacatagcaaatctgccattttacagggcaaacttaaa

SEQ ID NO: 13949 - DNA, 2192 bp, Zea Mays
gccggctattgtcctccctgcgttcccccaccaccacggcggcagccactggttggcagcggttgtccttctccggtgtccatggcgccgccgctcgcgacacgcggcctccccctcgcctcccgcggcccgccttcttgcgcggcctcctgctcctcgtgcctgccctcgtatctccagctcggtcgccggccaagccgccggttccgctgctcctcgccacaggtcgatgcagcggcggtgccgccggggaagggcggggagtaccggccctctttcgcggacgacctcctcctcgccttcttccggagcaagatggtgaaggcgagttccactccatccaccgatcccttagttcctccctccagttagatgatgccaaaccgtgttattagtttttttttgaaactttggaaggacccagtttttaataaaattggtttatagaaattgagtccaaatataccgacttaatttatagaaattatattctcagtttcttaaaaaaccgagaaaccgttctttcctagctaaaagataaaaaccggtttcttaaaaactagattgcttttaaacagagccttaaccatgttattagcttcttttccttaaataagagagaaccaaaaaaactttttttgtgtttagtatagagttctagcatggcagataatggaatcttctgaacattaataatccattcatcgctaggttcagttctgcttggtaattttgatcaacagtctgacaaatcctgatgaattgacgccacgtgcataactgaacttgtgctagctattagtttatcgtattactttaatcgagcttggaactttgtatttctacaaaatggccatttagttttgttgaaatctgagctgaatgctctattttttgaagaataatttgttttcagtttatttatttatttatttatttgttgtgtgagcgaggcgaggggtgctttcaatcataaaacaactaagcaggtccgatccaatgtgagattaaatgttatcatagtttccagacagactgcaactccagaaacatagaataatctcactgtcatatttgaatgagaaatgtacacacttgcatacgagctgaaaattttcctggaagtggctacaaaagaaatttcctgtgctttaggacaaggtacaagtacttagaattcagaaagccagccccctgttgacgagtatctgttaagttttaggtcaatatggaatatcacagttttgcataaaagcaagacatgcagtgcaattacattctgttgattctctgaaaggctgtaggaggttggatgggattctgaaaagcctgggtatgctggactaatggaggtagcaaaccgtctcatggtcaagggaaagagtgctttggagactgagcaggctgctgtccgagtactacagtcactgtttccacctctcttgcttgttctttacaaagctcttttagcgccaattgctaatggccaactagccgctatgatgcttgctagggcgacagcaatttcatgtcaatggttgatgggctcatgctcagttaattcagtcactctgcctgatggaaaatcatggtcaagtgttcgttgagaaatgcaagtacctggaagagagcaagtgccttggcatttgcatcaacacatgcaaactgccaactcagactttcttcaaagatcacatgggtgttgatttgtacatggagccaaattttgaagactatagctgccagttcaacttcggggtgccgcctccacctcttgatactgacaaagccctcaaggaaccgtgcttggacatctgcacaaacgcaaggcggcgtagagagctcggaagaaatagcagcccagatgagctcagttgcccccaagtttgatatgctccctgtaaaagactgcacatcatagattattgcgcgttgggcttgggcatggtgtgccttgcttgcatttgtcagtcttcgtgcaacgatgtcaagtaatttcggtaataccatttctatgttgcagacacacacgttttcgattggatcaacatgactacatgagtaaataactctcagtctgatccatcagatcaacacccaatgaaacatcacagtgatctggatacaagttcactgggtatacaaaggaacatatacatagcaaatctgccattttacagggcaaacttaaa

SEQ ID NO: 13950 - DNA, 1217 bp, Zea Mays
attgtcctccctgcgttcccccaccaccacggcggcagccactggttggcagcggttgtccttctccggtgtccatggcgccgccgctcgcgacacgcggcctccccctcgcctcccgcggcccgccttcttgcgcggcctcctgctcctcgtgcctgccctcgtatctccagctcggtcgccggccaagccgccggttccgctgctcctcgccacaggtcgatgcagcggcggtgccgccggggaagggcggggagtaccggccctctttcgcggacgacctcctcctcgccttcttccggagcaagatggtgaaggctgtaggaggttggatgggattctgaaaagcctgggtatgctggactaatggaggtagcaaaccgtctcatggtcaagggaaagagtgctttggagactgagcaggctgctgtccgagtactacagtcactgtttccacctctcttgcttgttctttacaaagctcttttagcgccaattgctaatggccaactagccgctatgatgcttgctagggcgacagcaatttcatgtcaatggttgatgggctcatgctcagttaattcagtcactctgcctgatggaaaatcatggtcaagtggggtgttcgttgagaaatgcaagtacctggaagagagcaagtgccttggcatttgcatcaacacatgcaaactgccaactcagactttcttcaaagatcacatgggtgttgatttgtacatggagccaaattttgaagactatagctgccagttcaacttcggggtgccgcctccacctcttgatactgacaaagccctcaaggaaccgtgcttggacatctgcacaaacgcaaggcggcgtagagagctcggaagaaatagcagcccagatgagctcagttgcccccaagtttgatatgctccctgtaaaagactgcacatcatagattattgcgcgttgggcttgggcatggtgtgccttgcttgcatttgtcagtcttcgtgcaacgatgtcaagtaatttcggtaataccatttctatgttgcagacacacacgttttcgattggatcaacatgactacatgagtaaataactctcagtctgatccatcagatcaacacccaatgaaacatcacagtgatctggatacaagttcactgggtatacaaaggaacatatacatagcaaatctgccattttacagggcaaacttaaa

SEQ ID NO: 13951 - DNA, 2181 bp, Zea Mays
cctccctgcgttcccccaccaccacggcggcagccactggttggcagcggttgtccttctccggtgtccatggcgccgccgctcgcgacacgcggcctccccctcgcctcccgcggcccgccttcttgcgcggcctcctgctcctcgtgcctgccctcgtatctccagctcggtcgccggccaagccgccggttccgctgctcctcgccacaggtcgatgcagcggcggtgccgccggggaagggcggggagtaccggccctctttcgcggacgacctcctcctcgccttcttccggagcaagatggtgaaggcgagttccactccatccaccgatcccttagttcctccctccagttagatgatgccaaaccgtgttattagtttttttttgaaactttggaaggacccagtttttaataaaattggtttatagaaattgagtccaaatataccgacttaatttatagaaattatattctcagtttcttaaaaaaccgagaaaccgttctttcctagctaaaagataaaaaccggtttcttaaaaactagattgcttttaaacagagccttaaccatgttattagcttcttttccttaaataagagagaaccaaaaaaactttttttgtgtttagtatagagttctagcatggcagataatggaatcttctgaacattaataatccattcatcgctaggttcagttctgcttggtaattttgatcaacagtctgacaaatcctgatgaattgacgccacgtgcataactgaacttgtgctagctattagtttatcgtattactttaatcgagcttggaactttgtatttctacaaaatggccatttagttttgttgaaatctgagctgaatgctctattttttgaagaataatttgttttcagtttatttatttatttatttatttgttgtgtgagcgaggcgaggggtgctttcaatcataaaacaactaagcaggtccgatccaatgtgagattaaatgttatcatagtttccagacagactgcaactccagaaacatagaataatctcactgtcatatttgaatgagaaatgtacacacttgcatacgagctgaaaattttcctggaagtggctacaaaagaaatttcctgtgctttaggacaaggtacaagtacttagaattcagaaagccagccccctgttgacgagtatctgttaagttttaggtcaatatggaatatcacagttttgcataaaagcaagacatgcagtgcaattacattctgttgattctctgaaaggctgtaggaggttggatgggattctgaaaagcctgggtatgctggactaatggaggtagcaaaccgtctcatggtcaagggaaagagtgctttggagactgagcaggctgctgtccgagtactacagtcactgtttccacctctcttgcttgttctttacaaagctcttttagcgccaattgctaatggccaactagccgctatgatgcttgggcgacagcaatttcatgtcaatggttgatgggctcatgctcagttaattcagtcactctgcctgatggaaaatcatggtcaagtggggtgttcgttgagaaatgcaagtacctggaagagagcaagtgccttggcatttgcatcaacacatgcaaactgccaactcagactttcttcaaagatcacatgggtgttgatttgtacatggagccaaattttgaagactatagctgccagttcaacttcggggtgccgcctccacctcttgatactgacaaagccctcaaggaaccgtgcttggacatctgcacaaacgcaaggcggcgtagagagctcggaagaaatagcagcccagatgagctcagttgcccccaagtttgatatgctccctgtaaaagactgcacatcatagattattgcgcgttgggcttgggcatggtgtgccttgcttgcatttgtcagtcttcgtgcaacgatgtcaagtaatttcggtaataccatttctatgttgcagacacacacgttttcgattggatcaacatgactacatgagtaaataactctcagtctgatccatcagatcaacacccaatgaaacatcacagtgatctggatacaagttcactgggtatacaaaggaacatatacatagcaaatctgccattttacagggcaaacttaaa

SEQ ID NO: 13952 - DNA, 1208 bp, Zea Mays
cctccctgcgttcccccaccaccacggcggcagccactggttggcagcggttgtccttctccggtgtccatggcgccgccgctcgcgacacgcggcctccccctcgcctcccgcggcccgccttcttgcgcggcctcctgctcctcgtgcctgccctcgtatctccagctcggtcgccggccaagccgccggttccgctgctcctcgccacaggtcgatgcagcggcggtgccgccggggaagggcggggagtaccggccctctttcgcggacgacctcctcctcgccttcttccggagcaagatggtgaaggctgtaggaggttggatgggattctgaaaagcctgggtatgctggactaatggaggtagcaaaccgtctcatggtcaagggaaagagtgctttggagactgagcaggctgctgtccgagtactacagtcactgtttccacctctcttgcttgttctttacaaagctcttttagcgccaattgctaatggccaactagccgctatgatgcttgggcgacagcaatttcatgtcaatggttgatgggctcatgctcagttaattcagtcactctgcctgatggaaaatcatggtcaagtggggtgttcgttgagaaatgcaagtacctggaagagagcaagtgccttggcatttgcatcaacacatgcaaactgccaactcagactttcttcaaagatcacatgggtgttgatttgtacatggagccaaattttgaagactatagctgccagttcaacttcggggtgccgcctccacctcttgatactgacaaagccctcaaggaaccgtgcttggacatctgcacaaacgcaaggcggcgtagagagctcggaagaaatagcagcccagatgagctcagttgcccccaagtttgatatgctccctgtaaaagactgcacatcatagattattgcgcgttgggcttgggcatggtgtgccttgcttgcatttgtcagtcttcgtgcaacgatgtcaagtaatttcggtaataccatttctatgttgcagacacacacgttttcgattggatcaacatgactacatgagtaaataactctcagtctgatccatcagatcaacacccaatgaaacatcacagtgatctggatacaagttcactgggtatacaaaggaacatatacatagcaaatctgccattttacagggcaaacttaaa

SEQ ID NO: 13953 - DNA, 1113 bp, Zea Mays
cctccctgcgttcccccaccaccacggcggcagccactggttggcagcggttgtccttctccggtgtccatggcgccgccgctcgcgacacgcggcctccccctcgcctcccgcggcccgccttcttgcgcggcctcctgctcctcgtgcctgccctcgtatctccagctcggtcgccggccaagccgccggttccgctgctcctcgccacaggtcgatgcagcggcggtgccgccggggaagggcggggagtaccggccctctttcgcggacgacctcctcctcgccttcttccggagcaagatggtgaaggaggttggatgggattctgaaaagcctgggtatgctggactaatggaggtagcaaaccgtctcatggtcaagggaaagagtgctttggagactgagcaggctgctgtccgagtactacagtcactgtttccacctctcttgcttgttctttacaaagctcttttagcgccaattgctaatggccaactagccgctatgatgcttggtgttcgttgagaaatgcaagtacctggaagagagcaagtgccttggcatttgcatcaacacatgcaaactgccaactcagactttcttcaaagatcacatgggtgttgatttgtacatggagccaaattttgaagactatagctgccagttcaacttcggggtgccgcctccacctcttgatactgacaaagccctcaaggaaccgtgcttggacatctgcacaaacgcaaggcggcgtagagagctcggaagaaatagcagcccagatgagctcagttgcccccaagtttgatatgctccctgtaaaagactgcacatcatagattattgcgcgttgggcttgggcatggtgtgccttgcttgcatttgtcagtcttcgtgcaacgatgtcaagtaatttcggtaataccatttctatgttgcagacacacacgttttcgattggatcaacatgactacatgagtaaataactctcagtctgatccatcagatcaacacccaatgaaacatcacagtgatctggatacaagttcactgggtatacaaaggaacatatacatagcaaatctgccattttacagggcaaacttaaa

SEQ ID NO: 13954 - DNA, 2217 bp, Zea Mays
cctccctgcgttcccccaccaccacggcggcagccactggttggcagcggttgtccttctccggtgtccatggcgccgccgctcgcgacacgcggcctccccctcgcctcccgcggcccgccttcttgcgcggcctcctgctcctcgtgcctgccctcgtatctccagctcggtcgccggccaagccgccggttccgctgctcctcgccacaggtcgatgcagcggcggtgccgccggggaagggcggggagtaccggccctctttcgcggacgacctcctcctcgccttcttccggagcaagatggtgaaggcgagttccactccatccaccgatcccttagttcctccctccagttagatgatgccaaaccgtgttattagtttttttttgaaactttggaaggacccagtttttaataaaattggtttatagaaattgagtccaaatataccgacttaatttatagaaattatattctcagtttcttaaaaaaccgagaaaccgttctttcctagctaaaagataaaaaccggtttcttaaaaactagattgcttttaaacagagccttaaccatgttattagcttcttttccttaaataagagagaaccaaaaaaactttttttgtgtttagtatagagttctagcatggcagataatggaatcttctgaacattaataatccattcatcgctaggttcagttctgcttggtaattttgatcaacagtctgacaaatcctgatgaattgacgccacgtgcataactgaacttgtgctagctattagtttatcgtattactttaatcgagcttggaactttgtatttctacaaaatggccatttagttttgttgaaatctgagctgaatgctctattttttgaagaataatttgttttcagtttatttatttatttatttatttgttgtgtgagcgaggcgaggggtgctttcaatcataaaacaactaagcaggtccgatccaatgtgagattaaatgttatcatagtttccagacagactgcaactccagaaacatagaataatctcactgtcatatttgaatgagaaatgtacacacttgcatacgagctgaaaattttcctggaagtggctacaaaagaaatttcctgtgctttaggacaaggtacaagtacttagaattcagaaagccagccccctgttgacgagtatctgttaagttttaggtcaatatggaatatcacagttttgcataaaagcaagacatgcagtgcaattacattctgttgattctctgaaaggctgtaggaggttggatgggattctgaaaagcctgggtatgctggactaatggaggtagcaaaccgtctcatggtcaagggaaagagtgctttggagactgagcaggctgctttttctgtgtctcttttttttacaatctccaggtccgagtactacagtcactgtttccacctctcttgcttgttctttacaaagctcttttagcgccaattgctaatggccaactagccgctatgatgcttgctagggcgacagcaatttcatgtcaatggttgatgggctcatgctcagttaattcagtcactctgcctgatggaaaatcatggtcaagtggggtgttcgttgagaaatgcaagtacctggaagagagcaagtgccttggcatttgcatcaacacatgcaaactgccaactcagactttcttcaaagatcacatgggtgttgatttgtacatggagccaaattttgaagactatagctgccagttcaacttcggggtgccgcctccacctcttgatactgacaaagccctcaaggaaccgtgcttggacatctgcacaaacgcaaggcggcgtagagagctcggaagaaatagcagcccagatgagctcagttgcccccaagtttgatatgctccctgtaaaagactgcacatcatagattattgcgcgttgggcttgggcatggtgtgccttgcttgcatttgtcagtcttcgtgcaacgatgtcaagtaatttcggtaataccatttctatgttgcagacacacacgttttcgattggatcaacatgactacatgagtaaataactctcagtctgatccatcagatcaacacccaatgaaacatcacagtgatctggatacaagttcactgggtatacaaaggaacatatacatagcaaatctgccattttacagggcaaacttaaa

SEQ ID NO: 13955 - DNA, 2285 bp, Zea Mays
cctccctgcgttcccccaccaccacggcggcagccactggttggcagcggttgtccttctccggtgtccatggcgccgccgctcgcgacacgcggcctccccctcgcctcccgcggcccgccttcttgcgcggcctcctgctcctcgtgcctgccctcgtatctccagctcggtcgccggccaagccgccggttccgctgctcctcgccacaggtcgatgcagcggcggtgccgccggggaagggcggggagtaccggccctctttcgcggacgacctcctcctcgccttcttccggagcaagatggtgaaggcgagttccactccatccaccgatcccttagttcctccctccagttagatgatgccaaaccgtgttattagtttttttttgaaactttggaaggacccagtttttaataaaattggtttatagaaattgagtccaaatataccgacttaatttatagaaattatattctcagtttcttaaaaaaccgagaaaccgttctttcctagctaaaagataaaaaccggtttcttaaaaactagattgcttttaaacagagccttaaccatgttattagcttcttttccttaaataagagagaaccaaaaaaactttttttgtgtttagtatagagttctagcatggcagataatggaatcttctgaacattaataatccattcatcgctaggttcagttctgcttggtaattttgatcaacagtctgacaaatcctgatgaattgacgccacgtgcataactgaacttgtgctagctattagtttatcgtattactttaatcgagcttggaactttgtatttctacaaaatggccatttagttttgttgaaatctgagctgaatgctctattttttgaagaataatttgttttcagtttatttatttatttatttatttgttgtgtgagcgaggcgaggggtgctttcaatcataaaacaactaagcaggtccgatccaatgtgagattaaatgttatcatagtttccagacagactgcaactccagaaacatagaataatctcactgtcatatttgaatgagaaatgtacacacttgcatacgagctgaaaattttcctggaagtggctacaaaagaaatttcctgtgctttaggacaaggtacaagtacttagaattcagaaagccagccccctgttgacgagtatctgttaagttttaggtcaatatggaatatcacagttttgcataaaagcaagacatgcagtgcaattacattctgttgattctctgaaaggctgtaggaggttggatgggattctgaaaagcctgggtatgctggactaatggaggtagcaaaccgtctcatggtcaagggaaagagtgctttggagactgagcaggctgctgtatatcacttctcttgtccccctctagtctttgtgcatctgttgtcacggaaacttttatagctaatgagccttagttttctgtgtctcttttttttacaatctccaggtccgagtactacagtcactgtttccacctctcttgcttgttctttacaaagctcttttagcgccaattgctaatggccaactagccgctatgatgcttgggcgacagcaatttcatgtcaatggttgatgggctcatgctcagttaattcagtcactctgcctgatggaaaatcatggtcaagtgttcgttgagaaatgcaagtacctggaagagagcaagtgccttggcatttgcatcaacacatgcaaactgccaactcagactttcttcaaagatcacatgggtgttgatttgtacatggagccaaattttgaagactatagctgccagttcaacttcggggtgccgcctccacctcttgatactgacaaagccctcaaggaaccgtgcttggacatctgcacaaacgcaaggcggcgtagagagctcggaagaaatagcagcccagatgagctcagttgcccccaagtttgatatgctccctgtaaaagactgcacatcatagattattgcgcgttgggcttgggcatggtgtgccttgcttgcatttgtcagtcttcgtgcaacgatgtcaagtaatttcggtaataccatttctatgttgcagacacacacgttttcgattggatcaacatgactacatgagtaaataactctcagtctgatccatcagatcaacacccaatgaaacatcacagtgatctggatacaagttcactgggtatacaaaggaacatatacatagcaaatctgccattttacagggcaaacttaaa

SEQ ID NO: 13956 - DNA, 2171 bp, Zea Mays
cctccctgcgttcccccaccaccacggcggcagccactggttggcagcggttgtccttctccggtgtccatggcgccgccgctcgcgacacgcggcctccccctcgcctcccgcggcccgccttcttgcgcggcctcctgctcctcgtgcctgccctcgtatctccagctcggtcgccggccaagccgccggttccgctgctcctcgccacaggtcgatgcagcggcggtgccgccggggaagggcggggagtaccggccctctttcgcggacgacctcctcctcgccttcttccggagcaagatggtgaaggcgagttccactccatccaccgatcccttagttcctccctccagttagatgatgccaaaccgtgttattagtttttttttgaaactttggaaggacccagtttttaataaaattggtttatagaaattgagtccaaatataccgacttaatttatagaaattatattctcagtttcttaaaaaaccgagaaaccgttctttcctagctaaaagataaaaaccggtttcttaaaaactagattgcttttaaacagagccttaaccatgttattagcttcttttccttaaataagagagaaccaaaaaaactttttttgtgtttagtatagagttctagcatggcagataatggaatcttctgaacattaataatccattcatcgctaggttcagttctgcttggtaattttgatcaacagtctgacaaatcctgatgaattgacgccacgtgcataactgaacttgtgctagctattagtttatcgtattactttaatcgagcttggaactttgtatttctacaaaatggccatttagttttgttgaaatctgagctgaatgctctattttttgaagaataatttgttttcagtttatttatttatttatttatttgttgtgtgagcgaggcgaggggtgctttcaatcataaaacaactaagcaggtccgatccaatgtgagattaaatgttatcatagtttccagacagactgcaactccagaaacatagaataatctcactgtcatatttgaatgagaaatgtacacacttgcatacgagctgaaaattttcctggaagtggctacaaaagaaatttcctgtgctttaggacaaggtacaagtacttagaattcagaaagccagccccctgttgacgagtatctgttaagttttaggtcaatatggaatatcacagttttgcataaaagcaagacatgcagtgcaattacattctgttgattctctgaaaggctgtaggaggttggatgggattctgaaaagcctgggtatgctggactaatggaggtagcaaaccgtctcatggtcaagggaaagagtgctttggagactgagcaggctgctgtccgagtactacagtcactgtttccacctctcttgcttgttctttacaaagctcttttagcgccaattgctaatggccaactagccgctatgatgcttgggcgacagcaatttcatgtcaatggttgatgggctcatgctcagttaattcagtcactctgcctgatggaaaatcatggtgttcgttgagaaatgcaagtacctggaagagagcaagtgccttggcatttgcatcaacacatgcaaactgccaactcagactttcttcaaagatcacatgggtgttgatttgtacatggagccaaattttgaagactatagctgccagttcaacttcggggtgccgcctccacctcttgatactgacaaagccctcaaggaaccgtgcttggacatctgcacaaacgcaaggcggcgtagagagctcggaagaaatagcagcccagatgagctcagttgcccccaagtttgatatgctccctgtaaaagactgcacatcatagattattgcgcgttgggcttgggcatggtgtgccttgcttgcatttgtcagtcttcgtgcaacgatgtcaagtaatttcggtaataccatttctatgttgcagacacacacgttttcgattggatcaacatgactacatgagtaaataactctcagtctgatccatcagatcaacacccaatgaaacatcacagtgatctggatacaagttcactgggtatacaaaggaacatatacatagcaaatctgccattttacagggcaaacttaaa

SEQ ID NO: 13957 - DNA, 1358 bp, Zea Mays
gcagagcaaagcaagcaaaaaggggaaaaactgttccgccgggccgacgacggccggggccggcgatggatcctgcgcgaggagcggaattaaatagcgcgtgacccccgaggcgggcaaatctggatgcttccttccgtttccacctcaacccgtcccaccgctcccagtcccgggacgtacggtgaccccacaccacaccaccacaacccctccgtcctcttcgcggctgcggtgcggccccgggagttccttgattcggcgggcatcgccatgggagggcgtcgctggctagctgtggtaacctgacctcgccgctgcagctctgtaggtagctagtattccagaggtgatttctcctctcctgatcgacagagggcaaatctggttcgtgaccccccagtatcatatcagagagggccacggttttgcttatcaatgtgttaggagttaggaccaagtactggagctatttcgtggttccgatggagtctaagtgtgtgaacgaccaggacaccttgatcgacctggagagtggcaacggcactgcagtgatcaaccatagcaacgacctggagagtggttgcgtgtgtgcgtgcgccaacggatgtccgagggatgacaggaacaaccagcacatggactgctcttcaccggcttcggacgccgttgctagaagtggagacgacaggaagtccgagggggaggagaagctgggcctgggccttctggacagctcgggaggggacaaggcgaagaagaagcggtcgaagaagaagccgccgcggccgccgaggccgctgacgcctacgccgctggacgtctctgaccagaagctcctcaacgagctgagcgagcttgccgtgctgaagcgggcgagggtcgagcggatgaaggccttgaagaagatgaagaacgccaagcaagggttctcgggtggcaatctgtgccccctgatcgtcaccgttatcttctgcgtcgtcattctctggcaaggtttcttctcgggacacgggccggcggtgagcttccatggatcaccggaatcgtcgatcagggggacgcgcagcagtctgatctccatcaggttctacaagaaccattccaacacgaggccaccaccattcagcgagaccactgcagctcccgagtacgtctggatcggggttgtgcctcgccagccccactatgggatccgcctccgaacttgaagcgtatggactatttagaggtcaccaaatccctctcgatgtcaaaaggcacaggatccaacactacgcctttgatgtactcgaagcctcgtagctgatttgcggcatgcaataagggttaccatatataaaactatagatctgaaa

SEQ ID NO: 13958 - DNA, 1067 bp, Zea Mays
aaatctggatgcttccttccgtttccacctcaacccgtcccaccgctcccagtcccgggacgtacggtgaccccacaccacaccaccacaacccctccgtcctcttcgcggctgcggtgcggccccgggagttccttgattcggcgggcatcgccatgggagggcgtcgctggctagctgtggtaacctgacctcgccgctgcagctctgtaggtagctagtattccagaggtgatttctcctctcctgatcgacagagggcaaatctggttcgtgaccccccagtatcatatcagagagggccacggttttgcttatcaatgtgttaggagttaggaccaagtactggagctatttcgtggttccgatggagtctaagtgtgtgaacgaccaggacaccttgatcgacctggagagtggcaacggcactgcagtgatcaaccatagcaacgacctggagagtggttgcgtgtgtgcgtgcgccaacggatgtccgagggatgacaggaacaaccagcacatggactgctcttcaccggcttcggacgccgttgctagaagtggagacgacaggaagtccgagggggaggagaagctgggcctgggccttctggacagctcgggaggggacaaggcgaagaagaagcggtcgaagaagaagccgccgcggccgccgaggccgctgacgcctacgccgctggacgtctctgaccagaagctcctcaacgagctgagcgagcttgccgtgctgaagcgggcgagggtcgagcggatgaaggccttgaagaagatgaagaacgccaagcaagggttctcgggtggcaatctgtgccccctgatcgtcaccgttatcttctgcgtcgtcattctctggcaaggtttcttctcgggacacgggccggcggtgagcttccatggatcaccggaatcgtcgatcagggggacgcgcagcagtctgatctccatcaggttctacaagaaccattccaacacgaggccaccaccattcagcgagaccactgcagctcccgactgatggtcgaatagggcacatctcttcacttagc

SEQ ID NO: 13959 - DNA, 1158 bp, Zea Mays
aaatctggatgcttccttccgtttccacctcaacccgtcccaccgctcccagtcccgggacgtacggtgaccccacaccacaccaccacaacccctccgtcctcttcgcggctgcggtgcggccccgggagttccttgattcggcgggcatcgccatgggagggcgtcgctggctagctgtggtaacctgacctcgccgctgcagctctgtaggtagctagtattccagaggtgatttctcctctcctgatcgacagagggcaaatctggttcgtgaccccccagtatcatatcagagagggccacggttttgcttatcaatgtgttaggagttaggaccaagtactggagctatttcgtggttccgatggagtctaagtgtgtgaacgaccaggacaccttgatcgacctggagagtggcaacggcactgcagtgatcaaccatagcaacgacctggagagtggttgcgtgtgtgcgtgcgccaacggatgtccgagggatgacaggaacaaccagcacatggactgctcttcaccggcttcggacgccgttgctagaagtggagacgacaggaagtccgagggggaggagaagctgggcctgggccttctggacagctcgggaggggacaaggcgaagaagaagcggtcgaagaagaagccgccgcggccgccgaggccgctgacgcctacgccgctggacgtctctgaccagaagctcctcaacgagctgagcgagcttgccgtgctgaagcgggcgagggtcgagcggatgaaggccttgaagaagatgaagaacgccaagcaagggttctcgggtggcaatctgtgccccctgatcgtcaccgttatcttctgcgtcgtcattctctggcaaggtttcttctcgggacacgggccggcggtgagcttccatggatcaccggaatcgtcgatcagggggacgcgcagcagtctgatctccatcaggttctacaagaaccattccaacacgaggccaccaccattcagcgagaccactgcagctcccgatcaccaaatccctctcgatgtcaaaaggcacaggatccaacactacgcctttgatgtactcgaagcctcgtagctgatttgcggcatgcaataagggttaccatatataaaactatagatctgaaa

SEQ ID NO: 13960 - DNA, 1303 bp, Zea Mays
aaatctggatgcttccttccgtttccacctcaacccgtcccaccgctcccagtcccgggacgtacggtgaccccacaccacaccaccacaacccctccgtcctcttcgcggctgcggtgcggccccgggagttccttgattcggcgggcatcgccatgggagggcgtcgctggctagctgtggtaacctgacctcgccgctgcagctctgtaggtagctagtattccagaggtgatttctcctctcctgatcgacagagggcaaatctggttcgtgaccccccagtatcatatcagagagggccacggttttgcttatcaatgtgttaggagttaggaccaagtactggagctatttcgtggttccgatggagtctaagtgtgtgaacgaccaggacaccttgatcgacctggagagtggcaacggcactgcagtgatcaaccatagcaacgacctggagagtggttgcgtgtgtgcgtgcgccaacggatgtccgagggatgacaggaacaaccagcacatggactgctcttcaccggcttcggacgccgttgctagaagtggagacgacaggaagtccgagggggaggagaagctgggcctgggccttctggacagctcgggaggggacaaggcgaagaagaagcggtcgaagaagaagccgccgcggccgccgaggccgctgacgcctacgccgctggacgtctctgaccagaagctcctcaacgagctgagcgagcttgccgtgctgaagcgggcgagggtcgagcggatgaaggccttgaagaagatgaagaacgccaagcaagggttctcgggtggcaatctgtgccccctgatcgtcaccgttatcttctgcgtcgtcattctctggcaaggtttcttctcgggacacgggccggcggtgagcttccatggatcaccggaatcgtcgatcagggggacgcgcagcagtctgatctccatcaggttctacaagaaccattccaacacgaggccaccaccattcagcgagaccactgcagctcccgagcaagcaggagggggggttcttgcacgaagacgatgggtcgatggctgtccaagtccaacaggctgaagatctggctgcttctgctgattggtgcgctctcacaatcgacgtgccttttctggttggaagttaagattctgaattcaaacttggaaactgatatgggtaatggctccaccggtccacccacgcccaacaagggcatctaaaaaaacaaagcatgaaatcagttaagctgtgtttaagcaattaaaacttgtcttgttttcg

SEQ ID NO: 13961 - DNA, 1605 bp, Zea Mays
ggttttcagtggtgccacaagcgaaaagatgttgccagtgcttatcaataaacaatgccagctgcttggcttttgctgaacatttttttgcttacaaataaataaatactagatgagtagagagcaagcggagaacaaggggagcgagacgccgccttgccaagtgtaagcaaccgaggggagaacgagggtgcggccgtggcttgtggcgttcgatcaggataaaaaggtagctagtattccagaggtgatttctcctctcctgatcgacagagggcaaatctggttcgtgaccccccagtatcatatcagagagggccacggttttgcttatcaatgtgttaggagttaggaccaagtactggagctatttcgtggttccgatggagtctaagtgtgtgaacgaccaggacaccttgatcgacctggagagtggcaacggcactgcagtgatcaaccatagcaacgacctggagagtggttgcgtgtgtgcgtgcgccaacggatgtccgagggatgacaggaacaaccagcacatggactgctcttcaccggcttcggacgccgttgctagaagtggagacgacaggaagtccgagggggaggagaagctgggcctgggccttctggacagctcgggaggggacaaggcgaagaagaagcggtcgaagaagaagccgccgcggccgccgaggccgctgacgcctacgccgctggacgtctctgaccagaagctcctcaacgagctgagcgagcttgccgtgctgaagcgggcgagggtcgagcggatgaaggccttgaagaagatgaagaacgccaagcaagggttctcgggtggcaatctgtgccccctgatcgtcaccgttatcttctgcgtcgtcattctctggcaaggtttcttctcgggacacgggccggcggtgagcttccatggatcaccggaatcgtcgatcagggggacgcgcagcagtctgatctccatcaggttctacaagaaccattccaacacgaggccaccaccattcagcgagaccactgcagctcccgataacgtagtagagaccggtccgaggctcaggaatcgtaaccaagcgagaaggctactagctcggtgacccgatgattatggcggcggccacacctcaaatgaaagaagctcgccacattttgaagcgtcgccggcgcttcgcttcgtcctcctcgaggcgccggccccacccccccgctccttggctgctgctccttggctgctgtaaaaaacgagtggactcctagtgtgtcgtgcgctgggtagtgaatctgtgttggccatggctctagcgaagcgtagagagcaacgaaagcaagcgagcgagcaagcaagcaagctgtctgtccgtatgtgtctggcatgttacagtaataaaaggtttgcgcgcaataaatcagagagctgatctgaatctgacccaccccgttgcagtgctgtgctgctgcacttgctcatcgttactgatttgctgaaatgtggcgtgttcttggttgtggccggctgggctgttctgttcatacctgctagaggatggctggaagtttttcatttcaagactttgagctatagatttc

SEQ ID NO: 13962 - DNA, 1016 bp, Zea Mays
aaacaatgccagctgcttggcttttgctgaacatttttttgcttacaaataaataaatactagatgagtagagagcaagcggagaacaaggggagcgagacgccgccttgccaagtgtaagcaaccgaggggagaacgagggtgcggccgtggcttgtggcgttcgatcaggataaaaaggtagctagtattccagaggtgatttctcctctcctgatcgacagagggcaaatctggttcgtgaccccccagtatcatatcagagagggccacggttttgcttatcaatgtgttaggagttaggaccaagtactggagctatttcgtggttccgatggagtctaagtgtgtgaacgaccaggacaccttgatcgacctggagagtggcaacggcactgcagtgatcaaccatagcaacgacctggagagtggttgcgtgtgtgcgtgcgccaacggatgtccgagggatgacaggaacaaccagcacatggactgctcttcaccggcttcggacgccgttgctagaagtggagacgacaggaagtccgagggggaggagaagctgggcctgggccttctggacagctcgggaggggacaaggcgaagaagaagcggtcgaagaagaagccgccgcggccgccgaggccgctgacgcctacgccgctggacgtctctgaccagaagctcctcaacgagctgagcgagcttgccgtgctgaagcgggcgagggtcgagcggatgaaggccttgaagaagatgaagaacgccaagcaagggttctcgggtggcaatctgtgccccctgatcgtcaccgttatcttctgcgtcgtcattctctggcaaggtttcttctcgggacacgggccggcggtgagcttccatggatcaccggaatcgtcgatcagggggacgcgcagcagtctgatctccatcaggttctacaagaaccattccaacacgaggccaccaccattcagcgagaccactgcagctcccgagtacgtctggatcgggg

SEQ ID NO: 13963 - DNA, 835 bp, Zea Mays
tggcactccataccagcgcgcagcatcattcagatatcccaccactactccttgtttctagtataaataaatgtgcatccaagtcactgatgaggagcaacaagctggagtagctagcaactcgagggatgaagactagatgatgataggctttctccttctgtgccactcataaaactgctagctagctagcaccttgttgccaagcaatgcaagatctctctgctgagatcgatctgaatacctaaaatatctatccgaccggtcatcatctcgatctaaagcaggataacaagatggcaaaaacattcgacgtggtttcagcgcacggccatcagctcaaaatggcgaccttcctcttctacgcaaacaaaactatcatcaaagcttcgcacacaagcttgcaggggtcacagtatcatcctagcctatgaaccggtgttatcctaattgagcttttcttttcgtcaaaacatccttgacccctcttccctagaggttggctcttacctccgtttttctggtttctcgtgccagaattaacgttcttgaccttgtaaggccctccttctatgtctacatcctcctcgcacctgatgtttctttctttcttgttacatgcgggatcagtctcatcattgccatgtttgccagactcccgcgtctacctactttctgctccattctatccctcctgagctagttgttgatcccatgtaataataaccatgtttggttgatataaaaaaatgttagttttgtttggtggcgttgaaattatttctaatttatagtaagagtagttcagtttgtgttatctccctatggatgctat

SEQ ID NO: 13964 - DNA, 844 bp, Zea Mays
caagctggagtagctagcaactcgagggatgaagactagatgatgataggctttctccttctgtgccactcataaaactgctagctagctagcaccttgttgccaagcaatgcaagatctctctgctgagatcgatctgaatacctaaaatatctatccgaccggtcatcatctcgatctaaagcagtacttttcttgcctttctgcagatttctgatcccaagcttgttggctaacatggcgaatgatgatgaccctgtggacggcgaaaaccctagatcttttaccgcatcaatgataacaagatggcaaaaacattcgacgtggtttcagcgcacggccatcagctcaaaatggcgaccttcctcttctacgcaaacaaaactatcatcaaagcttcgcacacaagcttgcaggggtcacagtatcatcctagcctatgaaccggtgttatcctaattgagcttttcttttcgtcaaaacatccttgacccctcttccctagaggttggctcttacctccgtttttctggtttctcgtgccagaattaacgttcttgaccttgtaaggccctccttctatgtctacatcctcctcgcacctgatgtttctttctttcttgttacatgcgggatcagtctcatcattgccatgtttgccagactcccgcgtctacctactttctgctccattctatccctcctgagctagttgttgatcccatgtaataataaccatgtttggttgatataaaaaaatgttagttttgtttggtggcgttgaaattatttctaatttatagtaagagtagttcagtttgtgttatctccctatggatgctat

SEQ ID NO: 13965 - DNA, 2218 bp, Zea Mays
cgcatggtgagttcctcaaaagcccaggcctttctgttcttgtgtcgttggaaattccctctttgactgggaacatttttagccttttccttgcaagattgcaaaccaaattccatgttaggttttgttactcccttttactactactgtttttcaagtgtgcgggacaagctcagggagtcccttcctctttccatcccccttttcgatttggggaaaaagagattcgcttgtggatgcaaaaggctgatacacttgcttgagaaaaagcacgcagctcctttcttgggggagcgagctctagtgtggtggttgcacagctggaggcctctctcgtcagggctcagaaagtgggtgctgaattattgggctcgtatctgtagtagtgtttggtggtggttgagttgtaagtacgctctgcttctctccacaagctcgaatcaccagatgaaccgcatgtgtagtagtatgtgacatgtcctcactcacctctttaggcgcgtaatctgtcaattgcatagaccctaatctgagcagcaaggaagcaaccgttctggaaactgagatggtttggcctggacacggggttggagcagcctgatgtcgcaccaagtttatccacggacatgatacagcagtttgtgcccaacatccgttctggtagcttcgccgacattgggcctcggaggtatatggaggacgagcacatccgaatagatgatctttccgcccatctcggctcgatgttggtctgccctctgcctagcgccttctacggggtctttgacggccatggcggcccggacgccgcagcctacatgaagaggcatgcgatgaggttcttgtttgaggaaagcgagttcccacaggcgtcgcaggtggatgaggtgtacctcgagtccgtggagagctgtgtccgcagagccttcctgcaggcggaccttgccctggctgatgatctggacatcagccggtcctctggaaccacggcgctcactgcattagtgtttggaaggcaactggtggtcgcgaacacgggggactgccgcgcggtgttgtgccggaaaggagtggcgatggagatgtcccgcgaccaccgcgcgaaccacgtggaggagcgcgagagggtggccgcgtcgggcgggtacatcgaggacgggtacctgaacggggtgctgtcggtgacgcgggcgctgggcgactgggacatgaaggcgcccggcgcgtcggcgtcggcggcgctgatcgcggagcccgagttccggcgggcgacgctgggtgaggacgacgagttcctcgtcatggggtgcgacgggatctgggacgtgatgacgagccagcacgcggtgagcctggtgcggcgcggcctgcggcagcacgacgaccccgcgcgctgcgcccgggagctggtgatggaggccaagcggctggagacggccgacaacctgacggtcgtcgtggtgtgcttcgcgccggagatggggtcgccgtttacaccgcagcaacagcaggaggaggagctgcccgcgaggcccaggagctgcaagaagggcctgtcgacggaggcgctgtgcagcctgaggagctggctggatacggaccaccggtagagggaggaagagctggggggtgtgtaaatactggagtattatgctgacagcaacactggttgattatgagcgctgggccatctgttgaggattttacgtaggctggttcagcagccagcagttttgtaggtttcgttcttccttttcacccttgttatctagtcgtttgttgtacatacatgtatggatgctgctgatgacatctgtgtgctgcgctccattgccaccaactttctttttaccgagagcccagtgagaagaggatagcggagcaggcacagccactgcatttgaccacagttttcaggcacagcgacactgggaaagatcaatcaatcaactttgtcttgagccgagcaggtagcagatgggagtggactactactagtagtgccattgcggcgacaaaccgggttagacaatattattataggagacagacaggatatgatcggctgcctaatcgacaattattttgatgtttcgatttttatagatacaatgtttttactctacaaatgtctgaataacactcctctctgtcttttttttttgttacggtttagttcaaacatgaattaacggatgacaaatattcaagaacagag

SEQ ID NO: 13966 - DNA, 571 bp, Zea Mays
ctccacgccactaggaggacttatcctgttcttgtcatccacgccgatgccacgaggcatcaagactcatccacgcgaccaaccgaccacgccggagctggacgcatccatgccgccacccgccatcgcctccagcctctaggcgatcaggcagccatccacgccgccgccacccaccatttaccaatttggttgcctgaaggatgaggaagggggctgcatcctcagaggcaatggatttcatatgtgacgcagagtggcaggttgatcaatgtcatgatggccaaggcgcaccctgctggcaaagtgtaccacatgagggccaagcgacaaatggctcaaagccttggtcagatactcagattgctaagttcaaacgtcgatatgagcaagaagaagaggaaagcaaagacagatccccttttattccacctcagaatcttgagcaaagtatgatacttgttccgcctgaaagccccaagacaagtctatggatttgttttgcattccggggacaaagaaataaggaatccgagtaacagtcatgtaaactatgattcagaatttacag

SEQ ID NO: 13967 - DNA, 1560 bp, Zea Mays
aaaacaagtgcgcagaaactgcttagggatcagagaagatggccggactcgacaccttcctcttcacctcggagtccgtgaacgagggacaccctgacaagctctgcgaccaggtctcagatgctgttctggacgcttgccttgctgaggaccctgacagcaaggttgcttgcgagacctgcaccaagaccaacatggtcatggtctttggtgagatcaccaccaaggccaatgtcgactacgagaagattgtcagggagacatgccgcaacattggtttcgtgtcgaacgatgtcgggcttgacgctgaccactgcaaggtgcttgtgaacattgagcagcagtcccctgatattgctcagggtgtgcacggccacttcaccaagcgccccgaggagattggagctggtgaccaggggcacatgtttgggtatgcgactgacgagacccctgagctgatgcccctcagccatgtccttgccaccaagcttggtgctcgtctcacggaggttcgcaagaatggaacctgcccctggctcaggcccgatgggaagacccaggtgacagtggagtaccgcaacgagggtggcgccatggttcccatccgtgtgcacacagtcctcatctctacccagcacgacgagacagtcaccaacgacgagattgctgctgacctgaaggagcacgtcatcaagccagtcatccccgagcagtacctcgacgagaagacaatcttccacctcaacccgtctggccgcttcgtcatcggcggacctcacggcgacgctggcctcactggccggaagatcatcatcgacacctacggtggctggggagcccacggcgggggcgccttctccggcaaggacccgaccaaggtggaccgcagcggggcctacgtcgcgaggcaggctgccaagagcatcgtcgccgccggcctcgcccgccgcgccattgtccaggtctcctacgccatcggcgtgcccgagcccctttcggtgttcgtggacacgtacggcaccggcgcgatccccgacaaggagatcctgaagatcgtgaaggagaacttcgacttcaggcccggcatgatcatcatcaacctcgacctcaagaaaggcggcaacgggcgctacctcaagacggcggcctacgggcactttgggagggacgaccccgacttcacctgggaggtggtgaagcccctcaaggcggagaagccgtcttctgcatgaggcgcctcctctgttttggaagaagcttttggtctggtctggtctggtctggtgtgcctgcgctctatcatgcttttttatggctcctacttgtgattcttgatctgccccttgcttatcatttgtactgtactgtcactgtcctaataagtggtacgtgtgcggggtcgtattgtgtctgcttattcacctactagaggattatttctggttttgctgcttatgtaatgcttttaaaaccatgaaagaagctacaggctcctacagctgctttgagaagtaacggaacctcgtgcattttggagatatgttgcagtgctgtgctgtc

SEQ ID NO: 13968 - DNA, 1845 bp, Zea Mays
cgcgttctgagtttctgaagagacgaccagcgccacacggagaagacggagggccggcagacagtagactcgctgagcagcagcagtatataagctcacggctcacccaccgctgggggccgcacagccagctgctcagctccgtccggcggaactcggaagccctacgctacgcctaccctcgctgtactactagctgccttcctacccgcttcccctctcctcccgacgccgtctccctccctccctccgcctccgccgtcgccgccgggacacgcgaaggtcttgtctttgggtagaacatgtcgtgctttgcgtgctgtggtgatgaagatacccaagtaccagacaccagggctcaatacccaggacaccatccagcgagggccgatgcataccgcccttctgatcaacctcccaagggtcctcagcctgtgaaaatgcaaccaatcgcagtccctgctattcctgtggatgagattagggaggtgaccaagggttttggtgatgaagctttgattggtgagggatcctttggcagagtatacttgggtgttctaagaaatggtaggagtgccgcggtcaaaaagttggattctaacaagcagccagaccaagagttcttggcccaggtgtctatggtgtcaaggctgaagcatgaaaatgttgtcgagttgcttggttactgtgctgatgggacactccgcgtccttgcttatgagttcgctacaatgggttcccttcatgatatgcttcatggaaggaaaggggttaaaggggctcaacccggtccagtcttatcgtggtcgcaacgtgtgaagatagcggttggggcagcgaaaggcctcgagtatcttcatgagaaagcgcagccccatatcatacaccgagacatcaagtctagcaacgtccttcttttcgatgacgatgtagctaagatcgctgactttgatctgtcgaaccaagctcctgacatggcagctcggcttcactcaactagggttctcggaacattcggataccatgcgcctgagtatgcgatgactgggcaactcagctctaagagtgatgtatatagttttggggttgttcttcttgagctgttgactgggaggaaacctgtcgaccatacattgccaaggggacagcagagtcttgtgacctgggctacaccaagacttagcgaagacaaggttagacagtgtgttgactcaagacttggaggggactatcctcctaaagctgttgcgaagtttgcggctgtcgccgccttgtgtgttcaatacgaagcggacttccggccgaacatgagcattgttgtcaaggcgctacaacccctgctgaatgcgcatgcgcgggcgactaaccctggagaacatgctgggtcataagctttgcgtttgcttctctccctcttgttcttgtatgataggtaaggtatatgactcgtcgatgtcgttgttgcggacatgtggctggcagcgtgtaatgtctgtgattattcttcccctgagctgtaaacaagattcttgtatccccacagtatttgattctttctattggtgccgtttttacctatctcaaggcgcaactgctcaagcaatcatccaaacaggccctacaagtcaagttgagcaaattgcgggtaaaaggaatctaatttttttaaattcctctgaacagaatgcctccaggctccggtgaataatcatattcatttgatttgagggtgttcaacaacaccatatatttctaattcaagctgggcttgcgtcatactccgtttcgttttagttgtcgctggatagtgcaaaattgaactatccagcgacaactaaaaagaaa

SEQ ID NO: 13969 - DNA, 1567 bp, Zea Mays
atgacgacccccttccgcccgtccccgccggcgccctctgccaagggcggctgcggcggcgaccgctgcgcctcgggccgcgacgcctggccgctccaccacttccgtcacgagggcgtcttctgcctcctctgctcctcctgcgtcctcctctacagcccgtccgccttctgctccgcctgcctccacctcctctcctcctgccccgccgctgccgccgctcccccgggcgaccctgccgtcgccccgcccgggcccacagcgccctgctccgcctgcggcgtctccttcgcgcacctctcgtgcgtcccggcggagcacccagcgcccttcgtctgcccgccctgcgccgccgctgccgacggcagcgccttctcgttcgcgccagcgcccggccgccgcccgctcgaggagcgcgacgcgcgggtcctcctcgtcgccgcgcgtctcgcgcacgactccgtcagccgcgccgcggccgccgcccgcgaggaggcggagcgccgcgtcgccgaggccgcctcggccaggaagcgcacccgcgagatgctcgacgccgccttccgcgcgctcgaggcggaggccagggacgccaagatgaggccggccgcgcccgcgcccacgcccgcggccgcccagcccccagcccccaagaagaagcccgaggcagcccagcccgcgccccccaagaagaagcacgaggccaatagggacagggacaagatgctcaagctcaacgccatgcagcagcctgcgctggcgttcgcggcggctgcagctgcggcggcggcagccacttcggtgccattgccgactccctcatcaagggaggagaagaagcctgtcgtgaaacaagaagcgcaaggctctgcgcctccaccgagggatgatcaggatcgctttcctctgtttgggaccttgcagtcgtgagattgttggtgctgtaatctgcttcttcctccccctattccattgtgttagcgtgattttgtgcagcgaaacagtctgaggagagactgaggtttgccgtgcagtgatcttgcaaagtgtaaggatcgcatttcagagtctcctcaccgtatatcctactctttggcatgctagctgatcttccatccatcatagctgttctgcatcctgtgttccgatttgttctctcgtatttctagtgaaatgatttccaagatgaagtgcaaccaggttctccagcttccaaactgtcactggtggcttagctagatttaggagacatggacatcagggttttagaacgatgagcatcccaattgctcgtccatcctgttgcactgtggattggatagaccaaatgcttagttgattggaccatagggtcatcaagttgcctgtcacacaaatctccttcacaagtgaatgctaaaataacagaaatgtgtattatgcagatctcccacccatttggtatatgctaaacttgtaagttttgttcgagctcattgctttgttaagataacagagattgatatggtatattggtatccatggaatgcagttgtgtggtcatacagatcttccatttcaatgcgcc

SEQ ID NO: 13970 - DNA, 5346 bp, Zea Mays
accaaatcatgaactcgttgttcattacataaattttggaccatgatctcattaatcattgcgatacttattgattataaaaagaataagcatgttggagataaaacccgcgggtaacccgtgggtacccgctaacccgatggatacgggtttgggcaaaatttcaaacccgtcatgggtacgggttttttaatgggcataaatatttttcacggtacgagtttgggatagcaaaacccgacgggtttgtacccgttgccatctctagttcagtcggcagaccagatccggacggtcagcgtcgacgaagccggtgggctggctgcagtagacagtctccgtcagagtgccatggaggaaggcattcttgacatcgagctgatgaattgcccagtcacgggagagggcgagggagaggacagcgcgaacagtggcgaacttgacggcggggctgaaggtctcgtcgtagaccactccggggcgctgtgtgaagccccgaaggacccaacgggccttgtagcggtcgagggagccatccgaggtcagcttgtggcgaaatagccacttgccggtgaccacgttggtgcctggtgggcacggcaccaggtcccaggtgtggttggccaagagggccgcgtactcctccttcatagcacgacgccaatgtgggtcggcgagggcagtgcgaacggaggagggcaccgaggaagcgtcgggtggagtgctagacgtatcggctgccaggatcagtcggtcgacggggcgaagaacgccagcggcgcgtcgagtcaccatcgggtggacgtgtccggggtcgcggtggatggcgaccgggtggtatacggacggctcggagcggaccgccggaacgtcaagagcggcgggtgtggccggctcgcggcggtgatagacgacggcggggtcggcgaagcgggtcgcgcgtgtcgacgggcccgagtcggggggcgccaaggtagtggcgtggccgcggcggtggtagacgagcgtggggttggcgaagcgagccggggtcgacggggccgcgcgtggcgcaggcggggtcgacgtggccacgcgtggcgcaggcatgatcgacgtggccgcgcatggcgcagaaatgggcgcgagctgtggcgtcgtggctgcacgaggaacaggtaacggcgcaagacggggcgccgggggtggggggaaccgggtcggactcgaggagggagtcaagatcggtgggtggggtggagcctgcaaggggaaacacatcttcgtcgaagacgacgtgacgagagatgatgatgcggtgggaggtgaggtccaggcaccgataccccttgtggtcaggggagtagccgaggaagaggcagcgagtggagcgaggagaaagtttgataggggcagtagcggaaatgttagggtagcaggcacaaccgaacacgcgcaggtggtcgtaggaaggggctgtgtcgtacagggcgaagtgaggtgtagggtggctcaccgccttcgagggaagacggttgaggagatgtgtggcagtatgaagggcctctgcctagtaggtggcagggagagacgcctgaaagagaaggcagcggatcatgttggtggtggtgcgaatcatgcgctcggcccgaccgttctgagcagaggtgtagggacacgagagacgcaactggacgccgtgagtgaggaagaaagagcgggaggcgttgttgtcgaactcacggccattgtcgcactgcagggcacggaccgggcgccggaactgggtggatacccaggcgaagaagtgagtgagggtggtaaacgtgtcggacttcagccgaagggggaaagtccaaaggaaatgggagtagtcatccagaatgactagatagtatttgtagccggagaggctaaggacaggagatgtccagagatcacagtggacaagatcaaaggcctgaacagccctggacgtggaagtggaaaaaggaagacgggagtgacggccgagctgacaagcatgacagaggcgctcagaagagccccgagtatatgatatgtcggagtggccggaaagctgggacatgacgtcaggtccagggtgcccgaggcgacggtgccaaatggcggaggaggtggtggtagtagtaagagcatgtgatgtggtggtagtagtaagtgcaggagaggagactactctggtgtggggagtggagggcaagtgaagagaatagagggggccggagctgtcacagcgagcgagcacagcatgtgtgggaaggtggcgtatggtgaggccccaggggtcgaactccatagagcactggttgtcactagtgaagcgacgaaccgagaggaggggatgagtcagtccgggagcaacaaggacgtcgttaaggcagaatggtcctggaagaaccgatgtacctactgaggtgaccgggagggtggaaccgttgccgacgacgatggaggtaggatgtgaggggtggggtggatgggagtggagtaacgaattagtggtggtggttcggggaggtggaagtggcgaaggtacggtgtgagcggagagggcaagagaaggtgccccgacagaggcactaggaagggagggagatgacacgggctcaaccgctagggaggcgatcgcagcacgtgggaagacaagcggtccaggcacgtgacggcccgcctgagggtggacctcgacgcagtcccgaagaatagggttccagactggatcgaaggacacgaacatgccccggatgagctggccgtcgtggaggaggacacgcacagtcacgagagcggcgggcgaggtaaagctcatggcgaccggtgtgggagggtcgtgtcactgctgggccggggcgcggtcacccggcgcagggaggcgcggactggacagccgggcgcggaacaggaagggcgcgagcaggaagggcgcggctggcggtgggggcgacagcgcctgagctggtcggagctggaggggacctgcagggggcggcggctggggcgcggatcttgccgtccgccgccacaaaccccagattgagatgatgagcgacgcgacggaggtgaagaacagcaggacgaaggacgcgccgacgagccccagcagcgactcgcgatcggagaaggctcggccgaagagggcgacagggcggctctgtcgcgacgctgggcgcgcgcgggtgcagggctcctggcacggggaaggagcgacggggtcgcgcggggctgctcggctcctggcgcgagtgcgaccgtggtcgcgtcctggcggcggccgtccaaggcgcgcctgggcgtgggtccggcggggtgcgcagacggtggctcggccgcagcctgggcgggtcgcggggcagagagcggcgccgggcgcggctgctgctcctggcggcgcgtcgggccgcgagcttggggacgggcggctcggccgcggttgctgcacggggccgaggccagtcggtgcggcggcgcgggctgagcggcgtcgggcgcgcggcgtcgggagtggcggccctggtggggtcgagcgacagtcccgggagcggcgtctcgggcccaacgtcgggggcgcggctacggcagccctggcggcgctcggcggtggggagggagagccggcggctggcggcaggagaggtgtcgtcggttgggggccggcggctgggagggactagagtgggaaaaacctaatctgataccatattggagtgtgaaccctaaccctaacaggggttgggtgatgtattaataggccgagtaaactgggccaggcccattacagaggggaagaccccaaacctattctaacaaagagatacagaaaagaaaaattctgatatacaaaaaagtgaatattatctcataatgttcttttttatcttttaatatacgatggatttgaaattaaaattttatacggtgctagagtagacaatgaagtacatctatatttttaagattttttttgtaacttttgttaattgttttacacgaagtttgtacgaaaacttggcttatatatgatatcttgcaaaaaccattaaaaatacctgttttgagaaggtattactacgccgtaagctgaacagaaggcggaattgatcaagtacgtaagccttatgtaagaggcgctttggtcaaagaggacaggccgaacccgaaggcaacgagcaccagtagattcatacttccgccgccccgccgccgcgatgcagcatcacctatgccgatgcggcggaggcgccctcgccgctctctggcggctccgccacaacacttcctctgtcgtagcgtcgcctcctgcggtctagagcgaccctgcctttctccacggttctactccaccgccgagatgagccagcaactccctacgaacctagtggagatcatggagcagagaatgaagttgatcgagcagaggagcgcgtacctccaagagcaaatcaaccaggaaatcgagggtctcaaatctttggtagcaaatgatcgtgaagagaaagacatgtgtgagatggcagcagaggagcttcttgtggctgtcgaggaggagaaacgattgcagcatgaactgtttagatcgctgcttccaaaggatgaagcagatgaaaaggattgcatattggaggtgcgggcaggaactggaggagaaagaggcttctttgtttgcaatggatatatttagaatgtacgagaaatatgcccagaagaatggatggaaatttgatgtcattgacataatggagtctgctgtgaaagggtacaaggtacaacctttgttagtatttcccagcttttgtttggatatatacacacgtttttttcgctgtagccaaaggtattttcaccatttctcggcacgaacgaacgaaaccagggaacctaggatgccgagccccagctttggatggatggcggcaaggaatgcgcgagacgcgcgccggagcgtaccgcctgaccgagcgagcagcagctggccgcggaaccaaccattgcgggagcccgcagctcctagaaccgcccgcctttgttttgacacacagacaacgagaacaaaaccctacgggcgaagggagaggaagcgggcaccggaacgcagagcgccagcggaggcgcctagcggaccgaaggagaagggacgctcacctgctgctgctgcgcggcggcggcgcggggtggtcgggcggatccgagtccgacgagatccggcggaggcagcgggcgggtgggtggagtcagtgggatgagatggggtaaaacaagttccggttgaggcccagttcggcacgccatggttcaagccaggccggtaattaaaccagcccaggaatgagtgaaacctggtttgcc

SEQ ID NO: 13971 - DNA, 5449 bp, Zea Mays
accaaatcatgaactcgttgttcattacataaattttggaccatgatctcattaatcattgcgatacttattgattataaaaagaataagcatgttggagataaaacccgcgggtaacccgtgggtacccgctaacccgatggatacgggtttgggcaaaatttcaaacccgtcatgggtacgggttttttaatgggcataaatatttttcacggtacgagtttgggatagcaaaacccgacgggtttgtacccgttgccatctctagttcagtcggcagaccagatccggacggtcagcgtcgacgaagccggtgggctggctgcagtagacagtctccgtcagagtgccatggaggaaggcattcttgacatcgagctgatgaattgcccagtcacgggagagggcgagggagaggacagcgcgaacagtggcgaacttgacggcggggctgaaggtctcgtcgtagaccactccggggcgctgtgtgaagccccgaaggacccaacgggccttgtagcggtcgagggagccatccgaggtcagcttgtggcgaaatagccacttgccggtgaccacgttggtgcctggtgggcacggcaccaggtcccaggtgtggttggccaagagggccgcgtactcctccttcatagcacgacgccaatgtgggtcggcgagggcagtgcgaacggaggagggcaccgaggaagcgtcgggtggagtgctagacgtatcggctgccaggatcagtcggtcgacggggcgaagaacgccagcggcgcgtcgagtcaccatcgggtggacgtgtccggggtcgcggtggatggcgaccgggtggtatacggacggctcggagcggaccgccggaacgtcaagagcggcgggtgtggccggctcgcggcggtgatagacgacggcggggtcggcgaagcgggtcgcgcgtgtcgacgggcccgagtcggggggcgccaaggtagtggcgtggccgcggcggtggtagacgagcgtggggttggcgaagcgagccggggtcgacggggccgcgcgtggcgcaggcggggtcgacgtggccacgcgtggcgcaggcatgatcgacgtggccgcgcatggcgcagaaatgggcgcgagctgtggcgtcgtggctgcacgaggaacaggtaacggcgcaagacggggcgccgggggtggggggaaccgggtcggactcgaggagggagtcaagatcggtgggtggggtggagcctgcaaggggaaacacatcttcgtcgaagacgacgtgacgagagatgatgatgcggtgggaggtgaggtccaggcaccgataccccttgtggtcaggggagtagccgaggaagaggcagcgagtggagcgaggagaaagtttgataggggcagtagcggaaatgttagggtagcaggcacaaccgaacacgcgcaggtggtcgtaggaaggggctgtgtcgtacagggcgaagtgaggtgtagggtggctcaccgccttcgagggaagacggttgaggagatgtgtggcagtatgaagggcctctgcctagtaggtggcagggagagacgcctgaaagagaaggcagcggatcatgttggtggtggtgcgaatcatgcgctcggcccgaccgttctgagcagaggtgtagggacacgagagacgcaactggacgccgtgagtgaggaagaaagagcgggaggcgttgttgtcgaactcacggccattgtcgcactgcagggcacggaccgggcgccggaactgggtggatacccaggcgaagaagtgagtgagggtggtaaacgtgtcggacttcagccgaagggggaaagtccaaaggaaatgggagtagtcatccagaatgactagatagtatttgtagccggagaggctaaggacaggagatgtccagagatcacagtggacaagatcaaaggcctgaacagccctggacgtggaagtggaaaaaggaagacgggagtgacggccgagctgacaagcatgacagaggcgctcagaagagccccgagtatatgatatgtcggagtggccggaaagctgggacatgacgtcaggtccagggtgcccgaggcgacggtgccaaatggcggaggaggtggtggtagtagtaagagcatgtgatgtggtggtagtagtaagtgcaggagaggagactactctggtgtggggagtggagggcaagtgaagagaatagagggggccggagctgtcacagcgagcgagcacagcatgtgtgggaaggtggcgtatggtgaggccccaggggtcgaactccatagagcactggttgtcactagtgaagcgacgaaccgagaggaggggatgagtcagtccgggagcaacaaggacgtcgttaaggcagaatggtcctggaagaaccgatgtacctactgaggtgaccgggagggtggaaccgttgccgacgacgatggaggtaggatgtgaggggtggggtggatgggagtggagtaacgaattagtggtggtggttcggggaggtggaagtggcgaaggtacggtgtgagcggagagggcaagagaaggtgccccgacagaggcactaggaagggagggagatgacacgggctcaaccgctagggaggcgatcgcagcacgtgggaagacaagcggtccaggcacgtgacggcccgcctgagggtggacctcgacgcagtcccgaagaatagggttccagactggatcgaaggacacgaacatgccccggatgagctggccgtcgtggaggaggacacgcacagtcacgagagcggcgggcgaggtaaagctcatggcgaccggtgtgggagggtcgtgtcactgctgggccggggcgcggtcacccggcgcagggaggcgcggactggacagccgggcgcggaacaggaagggcgcgagcaggaagggcgcggctggcggtgggggcgacagcgcctgagctggtcggagctggaggggacctgcagggggcggcggctggggcgcggatcttgccgtccgccgccacaaaccccagattgagatgatgagcgacgcgacggaggtgaagaacagcaggacgaaggacgcgccgacgagccccagcagcgactcgcgatcggagaaggctcggccgaagagggcgacagggcggctctgtcgcgacgctgggcgcgcgcgggtgcagggctcctggcacggggaaggagcgacggggtcgcgcggggctgctcggctcctggcgcgagtgcgaccgtggtcgcgtcctggcggcggccgtccaaggcgcgcctgggcgtgggtccggcggggtgcgcagacggtggctcggccgcagcctgggcgggtcgcggggcagagagcggcgccgggcgcggctgctgctcctggcggcgcgtcgggccgcgagcttggggacgggcggctcggccgcggttgctgcacggggccgaggccagtcggtgcggcggcgcgggctgagcggcgtcgggcgcgcggcgtcgggagtggcggccctggtggggtcgagcgacagtcccgggagcggcgtctcgggcccaacgtcgggggcgcggctacggcagccctggcggcgctcggcggtggggagggagagccggcggctggcggcaggagaggtgtcgtcggttgggggccggcggctgggagggactagagtgggaaaaacctaatctgataccatattggagtgtgaaccctaaccctaacaggggttgggtgatgtattaataggccgagtaaactgggccaggcccattacagaggggaagaccccaaacctattctaacaaagagatacagaaaagaaaaattctgatatacaaaaaagtgaatattatctcataatgttcttttttatcttttaatatacgatggatttgaaattaaaattttatacggtgctagagtagacaatgaagtacatctatatttttaagattttttttgtaacttttgttaattgttttacacgaagtttgtacgaaaacttggcttatatatgatatcttgcaaaaaccattaaaaatacctgttttgagaaggtattactacgccgtaagctgaacagaaggcggaattgatcaagtacgtaagccttatgtaagaggcgctttggtcaaagaggacaggccgaacccgaaggcaacgagcaccagtagattcatacttccgccgccccgccgccgcgatgcagcatcacctatgccgatgcggcggaggcgccctcgccgctctctggcggctccgccacaacacttcctctgtcgtagcgtcgcctcctgcggtctagagcgaccctgcctttctccacggttctactccaccgccgagatgagccagcaactccctacgaacctagtggagatcatggagcagagaatgaagttgatcgagcagaggagcgcgtacctccaagagcaaatcaaccagacagccagccgcctcgccggaagagtactcgagggctaacaaggagttccacaagctggagagcaccatggaattgatcaaagacctgagatcgaaacaggaggaaatcgagggtctcaaatctttggtagcaaatgatcgtgaagagaaagacatgtgtgagatggcagcagaggagcttcttgtggctgtcgaggaggagaaacgattgcagcatgaactgtttagatcgctgcttccaaaggatgaagcagatgaaaaggattgcatattggaggtgcgggcaggaactggaggagaaagaggcttctttgtttgcaatggatatatttagaatgtacgagaaatatgcccagaagaatggatggaaatttgatgtcattgacataatggagtctgctgtgaaagggtacaaggtacaacctttgttagtatttcccagcttttgtttggatatatacacacgtttttttcgctgtagccaaaggtattttcaccatttctcggcacgaacgaacgaaaccagggaacctaggatgccgagccccagctttggatggatggcggcaaggaatgcgcgagacgcgcgccggagcgtaccgcctgaccgagcgagcagcagctggccgcggaaccaaccattgcgggagcccgcagctcctagaaccgcccgcctttgttttgacacacagacaacgagaacaaaaccctacgggcgaagggagaggaagcgggcaccggaacgcagagcgccagcggaggcgcctagcggaccgaaggagaagggacgctcacctgctgctgctgcgcggcggcggcgcggggtggtcgggcggatccgagtccgacgagatccggcggaggcagcgggcgggtgggtggagtcagtgggatgagatggggtaaaacaagttccggttgaggcccagttcggcacgccatggttcaagccaggccggtaattaaaccagcccaggaatgagtgaaacctggtttgcc

SEQ ID NO: 13972 - DNA, 1509 bp, Zea Mays
attaagacgagcacccgcggtcgagattggcatctcctacctgcctaccataccaccacgtagcagtagcaccactcatcactaaccaagtacatacctttgatggatgcgtcagagacgacagagctatcttaaccacaagctacttggttccaaactataaattgatgacatgtgccatacgtgacggagttctcgtgcggcggcttcgtggtggggctcatctccgtgcacacgatcgcggacggcctgggcgcggggcagttcatcaacacggtggcggcgtacgcgcggggcgccacgtccgccacgcccaaacccgtgtgggcgcgcgacgtgatcccggacccgcccaagatgccggcgccgccgccgcgcctggacctgctggacctgcgctacttcacggcggacctgagcccggaccacatcggcaaggtgaaggcgcggtacctggagtcgacggggcagcgctgctcggcgttcgacgtgtgcgtggcgcgcacgtggcaggcccgcgtgcgcgcgctgcggctccccgacccggccgcgcccgtgcacgtctgcttcttcgccaacacccgccacctgcttccggcggcggccacggccgggttctacggcaactgcttctacacggtgaaggcgacgcgggcgagcggggaggtggcggcggccgacgtggtggacgtggtgcgcgccatccgcgacgccaaggcgaggctgggcgccgacttcgcgcgctgggcggcgggcggcttcgaccgcgacccctacgagctcaccttcacctacgactcgctcttcgtctccgactggacgcgcctcggcttcctcgaggcggactacggctggggcaccccgacacacgtcctgcccttctcctaccacccgttcatggccgtcgccgtcatcggcgccccgcctaagcccaagcccggcgcccgcatcatgaccatgtgcgtccaggagcagcacctgcccgagttccaggagcagatgatgagccagcaggccgcctaggctagctccttcctgatcatcccatcaccatgttcatctatatcgtcatcgtcatcatgcatgcgcgtgcacgtttggaatatttgttaatcaatcaataacggtgaggtgaggttgctattatatgaagtagtagtaacacctcaacaacaacaacccaatgcaatgggaactcgcgtgtaatttgctccttcttcttcaaatataattccgcctcaattgtatgtatgtattacgtctgtctgtctgtaaaaactaaagctttttgtttctttacatacacggcgcctgtagcaagcaattcacagacgaccatgaacgaaaggaagctccttgatttgacactgagtagacaggcagagagagagagagaaagagtagttggcaggatttgactcatgatcgtgtctgccgagctaacgaaacggagagcacgatactaaaatggacgctagtaacgaagatagctagcctataaaatatata

SEQ ID NO: 13973 - DNA, 1599 bp, Zea Mays
cgcaccagctgcttcccccctatatatatctatataaaaaaagaaagaaaaaaaatcggacaaacgtgtggcgtcggcagccgggcaggtaggaaaaggtatcagcgtcgccaatctccatggagctcacaggcgccgcgctccggcgatacgcgctgccgtcggcgtccccggtggccgcgagggtggggaggaggaggcgaccagccagggtggcctgcgtcgggggcggggggttcgcggaggaggggcacctcagatactacgaggcggccccgcggaggaaggcggtggaggccgtggcgagggacctgggaaagctccgggccatggggctcgtcgcgggggacgcagccaaggagaaggacgccacggatcttctgctgcaggagctgagccagatgaaggatgcggaatacaagataaacaaggtggagaaagaacagaatgctgctatgaaagcactgaagaagcaggagaagcgcaccaagaagactgccatcatgatgatgaagtgtgaagaagatgagtcatctgagtcgagcgagagcgattgtgaggacgaggcaaccatgaatgtcgagcagggcttggtgatctcaacagcggttcccgaggttgttgcatcaagcatctcagctgtccccgcgatggagtgtgataaggctgcagtgaaggccatgaagaaaatggagaaggaacaaatgaaggccatgaagaagatggagaaggaacagaagaaggctgctaagaaggccatgaagatggagaaggaagcaaagaagatggcaatggctacactgaatggctgcagggatgaagacgattcctcatgctcatcagagtcgagtgaaagtgaatgcgagggccaagttatgaggatgagccgctgcgttacaatcaccgcaccggaaatgccacctccaagcacgggtcttccaatcatagttcctcaaattccagaacctttggcaccacagccgtctcaatctcaaccttcagagccagcaaccgcagtgcaagccaccagagtcagcagcgttgcagtaactgagacatccacaaccagcagaattgaggtctgcatggggggcaaatgcaagaagtcaggcgcggttgctcttctgcaggagttcgagaagactgtgggcaccggaggtgcggtcgtcggctgcaagtgcctggggaagtgcggcctaggtcccaacgtgcggctgaggagcggtgcctctgcggaaggttctgcaaaggggaacccactctgcatcggtgtaggctttgaagatgttggcaccatcgtggctggtctctttggaggcgctgatctgggcatgacacccacctagacctggtggtactacctcgacctagtcgtacttcaagaaatcaagagcacaacttgtaatcacagatgttgcattgaacaaatgtatagtgcagctacggccttgctagtgctactgctaagtttatgtactctctgtctatatagaacacgtatggtaatcttgtttctggtatgtgatccatattggtcagtgattgttttcatggttttcagatttgagcatctgtggcaatatagggatggttaatgct

SEQ ID NO: 13974 - DNA, 1530 bp, Zea Mays
cgcaccagctgcttcccccctatatatatctatataaaaaaagaaagaaaaaaaatcggacaaacgtgtggcgtcggcagccgggcaggtaggaaaaggtatcagcgtcgccaatctccatggagctcacaggcgccgcgctccggcgatacgcgctgccgtcggcgtccccggtggccgcgagggtggggaggaggaggcgaccagccagggtggcctgcgtcgggggcggggggttcgcggaggaggggcacctcagatactacgaggcggccccgcggaggaaggcggtggaggccgtggcgagggacctgggaaagctccgggccatggggctcgtcgcgggggacgcagccaaggagaaggtcctctcggacgccacggatcttctgctgcaggagctgagccagatgaaggatgcggaatacaagataaacaaggtggagaaagaacagaatgctgctatgaaagcactgaagaagcaggagaagcgcaccaagaagactgccatcatgatgatgaagtgtgaagaagatgagtcatctgagtcgagcgagagcgattgtgaggacgaggcaaccatgaatgtcgagcagggcttggtgatctcaacagcggttcccgaggttgttgcatcaagcatctcagctgtccccgcgatggagtgtgataaggctgcagtgaaggccatgaagatggagaaggaagcaaagaagatggcaatggctacactgaatggctgcagggatgaagacgattcctcatgctcatcagagtcgagtgaaagtgaatgcgagggccaagttatgaggatgagccgctgcgttacaatcaccgcaccggaaatgccacctccaagcacgggtcttccaatcatagttcctcaaattccagaacctttggcaccacagccgtctcaatctcaaccttcagagccagcaaccgcagtgcaagccaccagagtcagcagcgttgcagtaactgagacatccacaaccagcagaattgaggtctgcatggggggcaaatgcaagaagtcaggcgcggttgctcttctgcaggagttcgagaagactgtgggcaccggaggtgcggtcgtcggctgcaagtgcctggggaagtgcggcctaggtcccaacgtgcggctgaggagcggtgcctctgcggaaggttctgcaaaggggaacccactctgcatcggtgtaggctttgaagatgttggcaccatcgtggctggtctctttggaggcgctgatctgggcatgacacccacctagacctggtggtactacctcgacctagtcgtacttcaagaaatcaagagcacaacttgtaatcacagatgttgcattgaacaaatgtatagtgcagctacggccttgctagtgctactgctaagtttatgtactctctgtctatatagaacacgtatggtaatcttgtttctggtatgtgatccatattggtcagtgattgttttcatggttttcagatttgagcatctgtggcaatatagggatggttaatgct

SEQ ID NO: 13975 - DNA, 1952 bp, Zea Mays
gtggacgatgccaatcccagtgtttgtgtttgtcgcctagacgcctcaaggccctctttccccctctccgccttgactcactcacttggccactcttcttcctcctcatcaaaccgctctccagcacttgttcggaagaaaaagaaggatcatggggcgcgggcgcggccacctcctgctgctgcacgcgtcccctcacggcgctggcgccggcgccggcggcctgctgagggtcgggctcagcaggcgcggcggcgggctcgaccagcgcgcgctggcggcggccaaggccgcgaggcagcaggaggcaagccgtctcggggcctccggcggcggcgacgtccctctcgtcgactacctcaacacccagtactacggggtcgtcggcatcggcacgccgccgcagaacttcaccgtcatcttcgacaccggcagctccaacctctgggtcccctcctccagatgctacttctcgattgcctgctacctgcaccacagatacaagtcggccaagtctagcacgtacaaggcggacggcgagacctgcaagatcacctacggctccggctcgatcgccgggttcttcagcgacgacgacgtgctggtcggggacctgaccgtcaaaaaccagaagttcatcgagacaacgcgcgaaagcagcataacgttcataatcggcaagttcgacggcatcctcggtctcggataccccgagatctccgtcggcaaggctcctccgatctggcagagcatgcaggagcaggagctgctggcggaggacgtcttctccttctggctgaaccggagcccggacgcggcggcggccggcggcgagctcgtcttcggcggcgtcgaccctgcgcacttcagcgggaaccacacctacgtccccgtctcccgcaagggatactggcagttcgacatgggggaccttctcatcgacggccactccaccggtttctgcgccaaggggtgcgctgccatcgtcgactccgggacttccttgctcgctggcccaacggccataattgcccaggtgaacgaagcgatcggggcagacgggatcatcagcacggagtgcaaggaagttgtgagccagtacggagagatgatcctcgacatgctcatcgcacagacggatccacagagggtgtgcagccaggttggtctgtgcgtgttcgatggcgctcgatctgtcagcgaggggattgaatctgtcgtcgggaaagaaaacctgggctcagatgtcatgtgctcggcctgtcagatggctgtcgtgtggatagagaaccagctccgcgaaaacaagaccaaggagctcatactgcagtacgctaaccagctgtgtgagcgtctgccgagccccaacggagagtcaacagtcagctgccaggagatctccaagatgcccagccttgcgttcaccatcgcaaacaagaccttcaccctaacaccccagcagtacattgtgaagctggagcaaggaggccaaaccgtctgcatcagtgggttcatggcgtatgacgtgccaccgccgcgtggtcctctctggattcttggggacgtcttcatgggagcttaccacacggtgttcgacttcggcaacgacaggattggcttcgcggaatctgcatgagtgtggagagcactctcatctttataaagacgataccctatgtattagggatgtgtagtttactgtctatccactacatgccaacagtacgctgcaaataaatcggtggccaaaattgctgaaaccagaaacgtgaacagtactgctttctttgtttctggagaagagcaaatggatgcttcaagacatgcatgtccgatgtgtattgagaaatagagcgacgagtgctgctcgatcgtcttgaaatttgtttgttcatggtagcacagcttatcacttataaaataatttgtggatcgccttttataggaccaaa

SEQ ID NO: 13976 - DNA, 1753 bp, Zea Mays
ggacgatgccaatcccagtgtttgtgtttgtcgcctagacgcctcaaggccctctttccccctctccgccttgactcactcacttggccactcttcttcctcctcatcaaaccgctctccagcacttgttcggaagaaaaagaaggtagaacacgctaacaagacaacaagtactacggggtcgtcggcatcggcacgccgccgcagaacttcaccgtcatcttcgacaccggcagctccaacctctgggtcccctcctccagatgctacttctcgattgcctgctacctgcaccacagatacaagtcggccaagtctagcacgtacaaggcggacggcgagacctgcaagatcacctacggctccggctcgatcgccgggttcttcagcgacgacgacgtgctggtcggggacctgaccgtcaaaaaccagaagttcatcgagacaacgcgcgaaagcagcataacgttcataatcggcaagttcgacggcatcctcggtctcggataccccgagatctccgtcggcaaggctcctccgatctggcagagcatgcaggagcaggagctgctggcggaggacgtcttctccttctggctgaaccggagcccggacgcggcggcggccggcggcgagctcgtcttcggcggcgtcgaccctgcgcacttcagcgggaaccacacctacgtccccgtctcccgcaagggatactggcagttcgacatgggggaccttctcatcgacggccactccaccggtttctgcgccaaggggtgcgctgccatcgtcgactccgggacttccttgctcgctggcccaacggccataattgcccaggtgaacgaagcgatcggggcagacgggatcatcagcacggagtgcaaggaagttgtgagccagtacggagagatgatcctcgacatgctcatcgcacagacggatccacagagggtgtgcagccaggttggtctgtgcgtgttcgatggcgctcgatctgtcagcgaggggattgaatctgtcgtcgggaaagaaaacctgggctcagatgtcatgtgctcggcctgtcagatggctgtcgtgtggatagagaaccagctccgcgaaaacaagaccaaggagctcatactgcagtacgctaaccagctgtgtgagcgtctgccgagccccaacggagagtcaacagtcagctgccaggagatctccaagatgcccagccttgcgttcaccatcgcaaacaagaccttcaccctaacaccccagcagtacattgtgaagctggagcaaggaggccaaaccgtctgcatcagtgggttcatggcgtatgacgtgccaccgccgcgtggtcctctctggattcttggggacgtcttcatgggagcttaccacacggtgttcgacttcggcaacgacaggattggcttcgcggaatctgcatgagtgtggagagcactctcatctttataaagacgataccctatgtattagggatgtgtagtttactgtctatccactacatgccaacagtacgctgcaaataaatcggtggccaaaattgctgaaaccagaaacgtgaacagtactgctttctttgtttctggagaagagcaaatggatgcttcaagacatgcatgtccgatgtgtattgagaaatagagcgacgagtgctgctcgatcgtcttgaaatttgtttgttcatggtagcacagcttatcacttataaaataatttgtggatcgccttttataggaccaaa

SEQ ID NO: 13977 - DNA, 757 bp, Zea Mays
ctcccgccttcgtcctccgtctaaccacagtgtacttctctatttcatcccaaatacgcacagcgcgactccaagaagaagaagaagaacatcttattagcatctatccgtcgcgtcgctgcaagcagagctagcggattgcatcgtcatgggttcttgggtgcgcaccatcacgtcgcccttcaggaagatgctcaacccacagcgcgacggcaagacgaagacgccgcgccaccaccaccaccaccaatctccttctccttcttcgtcagccatggagcagagcggcgagatggacaggtcgcagctctacggcgaggtgatggcgtgcacgtacgaggacgtgcaggtcatgtggaccatgctcgacaaggccaggacctgcgccgccgccgccgcctcgtgaccgcgcgccatagatgaccttcacatgaaacctttatttttttttacagtagttggttttgtatagcatgtttccagccgtctgatgaatccccgctgctgccacagacgcgcgcgcgacacacggagtgcgtgtgtgagctatcttggagagatttagtgactgtgccaacattaatttagcatgtgtttacttaatcttgaggccatcatcttctgtttcctctttggtgtcagagatgcatgcatgtgtactcatcatccgatacatgccagggtttatatatgttatttctggagatctgaactgcctctgcatatatatatagttctgcactagcttttattggtt

SEQ ID NO: 13978 - DNA, 387 bp, Zea Mays
ctgcaatcaataatagtaagcacaattaacgaatacattctactaaaattacacatctgagttgtatgcaggaactcaactcttgtatccaacttcaaatattcctcataattattctgtagattagaaaagtttgactcatttatcagtacaagtggtaccatcgttaccatatacatgtataaagttacatgctcggatgctccacacgtattttacttttttctagcctcgcatgtgtagttgcatttatgcagggagtggcaatagtgttcagaagtactttatgatttcccaatcaaggtcctgacatatattgtcaaagactcaaactatatgaatagaaggaaataggacgaagtggaattaccagcagacaataggagg

SEQ ID NO: 13979 - DNA, 657 bp, Zea Mays
atgtcgtctgatccagaggaccacatcaccgcagtgcacaatagatgcacgaggacgccagtgaggggcagtcgtcgacatgggcagcgcccgccgctcggaggatgcagaggacgcggttggaagaacgtagggacgcagcgctgggccagaggagcacatcgccgcagtgcccgacagatgcacgggacaccggcgcggggctgtcgtcgacctaggcagcgcccgccgctcggaggatgtaggaggacgcgagcgggggctggaagaacgcagggacaaagagccgggttggaggagcacatcgccacagtgcccgacggatacacggggacgccggcatgggtggtcgtcgacctgggcagcgcccgccgctcggaggatgcaggaggacgcgggtgggggccagaagaacgcaaggacgcagagcccgacggatgccgcaaggacacacggcgcggggtggctggcgactgtatgcacgcgcggagcgccgcgtctggcggcaacagggaggagggctcgagcagttctatcgaaattgctggggttcgacgaaggatgcaagaatggggaacaattggaaatattggtggtcccacgtgtaaggaagtgaacattgacggaaacggcgtggaaggacagctaccatgttag

SEQ ID NO: 13980 - DNA, 50 bp, Zea Mays
gtcgacttgtgcagttcatatttatcggatttggtggagaagaagcacag

SEQ ID NO: 13981 - DNA, 2562 bp, Zea Mays
ccaagcgcgtgcgctgccgttgccgtcgcgcgccccacctcccgtcccctccgcagcgctccgcttcttggagacccatccagcatctaccatcactggcccgtccgtaacggcgacacctcctcgtcctcggctcctgcttctacggcggtaggtaggtgccgcgtcggcgcgtcgccttccttcaactgcgcctgcccgcaccgcatctcttctccttgctccatctccctactgctccagctcctatcctcttggctccgcccgtccgcggtccgcgtgtgtgcgctccatccttctccaccacctgtcgccgggccaaccgcaccgccctctgatgactgggccgggcgaggagctggccgagctgctgtgggaccgtggcccggcgctgcggagggcgccgccgccgttccagcccttcacctgcagcgccgccggcagcagcaggtcgcaggagctgaagcggcatgcctcggacaccaccaaggcgtcagcgttcgtgaccgccgtctccgtcccgctgggcacgcacgacgccggctccgggctcgggctcgccggcctccccgtccacgacgacgacgacgccgtgccgtggttgcattgccccgtcgccgacgacggcgacggcgacacggcgccgctgccgccggagttctgcgccggcctcctgtccgagtactcggaggtggccgcgccggcgccggccttccacgccgcggccacgccgccggccgaggccgcggccaacaagctggccccgccgagcgccgccggcggaggggagggcgtcttgaacttcaccttcttctcgcggcccctccagcgaccgcaggcggcggcggcgcccgccgccgcggccgcgagcaaccccgtcgagtccacggtcgtccaggcggcagcgaaccggctgcggagcacgccgctgttctccgagcagaggatggcgtggctgcagccacccaaggcgccgcgcaccacagcggcagcggcggcgccacctcctcctccgctggcgcctctgctcccagatagccgccatggggagacggtcggcacggtagctcaacctcagccccggtcgcaaccagaagcaagacctccggatgcggcggcggtgacgacctcttcggtctgctccggcaacggtggtcggagccagctcaagaggagccgccacctggccgcggactgctcggtcagtccggacgaggacctggacgacgagcccggcgcgacgaggaggtcggcggcgcggagcgccaagcgctgccgcaccgccgaggtgcacaacctgtcggagaggaggagacgggaccggatcaacgagaagatgcgcgccctgcaggagctcattcccaactgcaacaaggtcgacaagtcgtcgatgctggaggaggcgatcgagtacctgaagacgctgcagctgcaagtgcagatgatgtcgatggggaccgggctgtgcatgccaccggcggcgatgctgctgccagcgatgcagcagcagctcctgcaccaccaccccatggcgcacttcccccatctcggcatgggcctgggcttcggcatgggcgcggcggcggggttcgacatgctcccgttcccgtgcgtcgcggccggcgcccacttcccgtgcccgccgggggccatgttcggcgtgccggggcaggcgatgccctcgctgccggcggcgttcgctcacatgtacggcgctggcagtggcgccgggccggctgggcagacggaagctgctgatgcggctgctcctgcacggccaggagaggcagagcagggtgatcagcaggtgcagcacgcgaagcagacgtgatggcgaaggcgacgaggcggctgccccccgaacattcccgtttggttttatggtgattatgagaatctacccatcaaaatctgctaagagagagccaaacaaacaggatattacaccttggattctgtgcattatctcacaatcaaggttcaagttgattttcttggttaatgtgtagaatccaaaaatcggaaccaaacggcacagagtcctttcttttggttgctctggtgttaggtgagatgataagagatgcgcgcgcatgcatgaagtgttttttacccagctagccggctagcctgctataccttgcctcgtaaactgtaggagaatgtagaggaacgcttgttttcacccatgagactggtctttgatgtttcatgagcagaaaacgccgtcccctgcacggaagctggccatcaagattcaagaattgacatggtggtgtttggttaagtatttataatttgataggtaactgataacactaaactatgtttgtataagtccaatcgtaatgaaatattccctccgtttcgttttagttgtcgctgaatagtgcaaaattgaactatccagcgacaactaaaaagaaacgggggagtatcacgctaagaactagtatctgacattggtctactcaaacttgttgccgctggtacttagtgtaaattattattgttgccatttatattagggaaatttggatccataccattaaaagatcacca

SEQ ID NO: 13982 - DNA, 565 bp, Zea Mays
cgacaagcgcatccgacgccctgggcccccaccgccgcacgccgcgcgggcaacgcaccaccgccacgccgcgccgcagcaaaagcgaagccagcgggaatgcacgatcgccgccgccgcggcgcctacttccctgccccgcgtcgctgcggccgtcgccgactcggcttgaggaagcggttgcttgccaatgccaggtcttcaactgaggagcagctgtggaggatgatttctgtatcaacttaatgtatctatgtaactcacctctgcaaaatttctcttgactaatgtactgggaacgagctagtcaatgggcgtattattggtgggatctttttttgctaggagtgttttttatccatgattccatgcatgattaggattgtaatagcatggcacccttcttgtgccccatgtgacggcggatactcgtcgccagttaaagaaacgcggcacggaccaaaaaggccctgattggtgaatttttctagtcttgtttccagctgatcattttgtcctttgattccccatgcaacggatcccatccgtcctggagccttgcgtt

SEQ ID NO: 13983 - DNA, 991 bp, Zea Mays
aaaatctccatccattgggtaaacgggtatgggtttgggaagcaataatccgaacctgattacccataagtatttcatacgtgtacacctgtcgtgtttgtatgaatgagttgaggccgagccgaccactaagcccagcacgacagcgcaccaggccccaggtgctagcccaacaaggcaactagcagactagtaaaaaacaaaactctaaaataaccagtcatatgctacaccttgcccaaacgacggtgacaaccatggattctcaggtgccaacaactcagatggtgaccaaggaagcaattgaaggatggattgtgttggtcactggagttcatgaagaagctcaagaagatgacctccaaaatgctttccaagaatttgggcaggtcaaaaacctgcatttgaatttggaccgtcgtaccggatttgtcaaggggtacgctttgattgaatatgagaagtttgaagaagctcaggctgcaataaaagaactggatggagctgagctttatgaacaaaaaatgagtgttgattgggcctttagcagtggccctgctaagcgcagatttactcggaaaagatcaccaccaagggctcgttcaaggaccccacccaggagaaggcactgatgtttccccagcaagtcatgaattactatgcgtgatgtagtgaaaaaagtctggggatttcaattctcaaatgttagcctggtgtatgtgtatccggctttgagttgatggacacatggagttacttagccgcttaccattacgtttggcatgccagttggagactattgtaagcgatgattttttttttttttgaggtctgccaagtggcggtgttggatttttatgttcgtgtgtgccttcactttgttatcgccattctgacgagtgatgctttgggttttgatgttcgcgtgtctcaccttgcttgattgagcagctagcgattgacaagctccaaagtgctcatttagcccttg

SEQ ID NO: 13984 - DNA, 605 bp, Zea Mays
atttggggcaaaaactcctttacatatatgtatgaccttgcaaatgactaagggtacgctttgattgaatatgagaagtttgaagaagctcaggctgcaataaaagaactggatggagctgagctttatgaacaaaaaatgagtgttgattgggcctttagcagtggccctgctaagcgcagatttactcggaaaagatcaccaccaagggctcgttcaaggaccccacccaggagaaggcactgatgtttccccagcaagtcatgaattactatgcgtgatgtagtgaaaaaagtctggggatttcaattctcaaatgttagcctggtgtatgtgtatccggctttgagttgatggacacatggagttacttagccgcttaccattacgtttggcatgccagttggagactattgtaagcgatgattttttttttttttgaggtctgccaagtggcggtgttggatttttatgttcgtgtgtgccttcactttgttatcgccattctgacgagtgatgctttgggttttgatgttcgcgtgtctcaccttgcttgattgagcagctagcgattgacaagctccaaagtgctcatttagcccttg

SEQ ID NO: 13985 - DNA, 4595 bp, Zea Mays
ctttgaggcgcctaagacttccaaagtaaacacttcacgagcactactccttgctgtctccggcaacaagactttgagttgtaatgtattttttcgtttgggtgcagaggaaacacgaacagagaatagattcaactgtgcttgcaaagaaaacaagaccaaaggatagattcaacagtgcttttgctttattggtttacgttagaggagaagaacgtaccaaaacgttctccccctacccaaccacccccaaacccgtagaattcaaaataaaaccttacaccttgtactagaaagaaaccatggcgactctgcattccatggtgaccctgctgctgctgccgctgcttctactcacagctcggccggcgtcttcctcctcctccatcgacaggtacgaaaaacaccatgaccgtgaagcactgctggcactcaaagaggctctgataggcagctcgggactactaagctcatggaacagcagcagctccgacgtgtgccgttgggccggcgtgacatgcagccgccggcacgcgggcagggtggttgctctgagcctgcgccagagaaacctgggaggcagcatctcccctgccatcggcaacctcaccttcctcaggtcgctcgatctcttcgacaacatgctgtcaggggagataccgcgcactatgacacggctgcgtcgcctgagcttccttgagctggcgtacaactatcttgctggcgagatccctgaaggcttggccaactgctccaacctcgcgtacctgagcgtagaggtcaatcagcttcatggcgggatccctagcggtctgggcttgctgtctcggctacaagtcctgtatgtcggcgagaacagtctgacagggcatgtaccgccatcgctcggcaatctctcggcgctgcagaggctggcactgtatcagaacaagctggaaggagccatcccagagggcctttcccgtctgaggtatctccggtacatccaggcggcgaggaacagcctctccggcacgattccgcctcgcttcttcaacatatcctctctccagtacttcggtttcagctcaaacaggctgcatggtagactgccaccagacgcaggcaggcacctgccggacctccaagtgctccttcttggtggcatcgggaacaacttttctggaacactcccggcttccctctccaatgccactaaactacaagagcttggtcttgctcacaacagcttcgaaggaaaggtgccgcctgagatagggaagctctgcccagagagcgttcaattggggggtaacaagctgcaagctgaggacgatgcggactgggagttccttagacatttcaccaactgcacccgtctagcggttctagatgtcggtggcaacgcccttggaggagtgcttccacgcttcgtagctaacttctctgggccggtgaatactctgatcatggagaagaaccggatgtctggatcaatccctctgggtgtcggaagcctcgttcaccttgaagacctggaattcgggggaaacaacctgcgtggtgttatacctgaggatattggaaggcttcggaacctcaagtttttcacgctggaggagaatctcctgtcaggaggtatacctacctccttcggcaacctcacgcagctgctcagccttttcctgtcgaacaataggctcaatggctccatccctgagaaccttgggagcttgcgcaggttaacgtccatggcattgtccttcaacaggctcaccggtgcgatccccggagcattattcagcctcccgtcgctagctgattcattgctgctttctcataactacctttctggcgtacttcctccacaaatcggtagcctcaagcatgcgacaacattggatctgtcaacaaacaacttatctggagaagtaccaggagcgcttggagactgtgcaagtctagtatacttgtatctggatggcaatagcttcactgggagcatccctccatcgattggtaatctgaagggcttgagcacgctgaatttcacaaggaacggtctgtccggtagcatccctcaggagttgagccagattcatgggctgcaaaggctttgcctagctcacaacaacctgtctggagccattccacagctcctccagaactcgagcgctcttgtagagctggatctctcctacaaccatctgggcagcgaggtgcccacacacggggtgttcgctaacatgagtgggttttctgcaactggaaatgatgggctttgtggtggcgttgcagagctgaaattgcctccgtgtgaggtcaagccacacagccaccggaagcggttgcgactgaagatttttcttccagccattggcatcgctatatgtttatctcttctattggttgcgctccttctgttcaaagggagaaaagggtcggacaggatcagtgctacgcgaaaccatttgttggagaacaagtatccgagagtttcatacctccagctctttgaagcgacggatggttttgcccctgctaatctgataggagctggaaaatatggatctgtttacaaaggaagactgtctatcacaggtgttggggattctgtagtggctgtcaaagtgttcactcttcagcatcctggttcttccagaagctttttggctgaatgtgaggcgctacggcaagtgaaacataggaacttgatcaatattatcacctgttgctccagtatagaccctagagggaatgacttccaagctctagtgttcgacttcatgcccaggtacagcttggacaggtggctgcatccaagaagcgatgaggagacacacaagttgagtctaacccaactgttggacattgcgactgatgtagcagatgcgctagactatcttcacaacagtagccgtccaacagtgatccactgtgatttgaagcctagcaacatcctccttggtagcgactggactgcttatgttgctgactttgggcttgcaaagctgatcagtgaatccatggaccaaccaaatttgaatattgggactgaaagcactattgggatacgaggaaccactggatacgtccctccagaatatggagcaggtggtcaagcatcagttgctggtgatgcctacagctttggggtcactctgcttgagatgttcaccgggaaagcaccaactgatgacatgttcatagaaggcttgaccctgcacttgtttgctgaggcagggttacctgacagggtatcagaaatcattgacccagaacttttcaatgcggagctgtatgaccatgatcctgagatgctcagttgcttagcttctgtgatacgagttggtgtctcatgttcaaaggacaacccgtcagaaagaatgaacatggaacatgctgctgctcagctacacagaatcaaggagtacattgaagaaatcccttaggccatgttcgtttgatcccaaaaccataaggattgagggggattgaaagggattggggaggattttgacttgtaggggatttaatccccctcaatccctatggattggcacaaaacgaacaaggccttagggtttaaatgggtataacttgatgtcctttatttatttttccaatgcagagcacttctaacaacatcattaccattgaggtggcccttttgaatgttatcctggcattcagatgggctttgtgcaaatatctgtatcaccacatcaatggaataagaatagagcattgtcaggtttacctacttgttcgtaagcttttattatgcatgtgcaatcttcgtggttcctgaatgctcaattattataagctgtccaaaaataacttccaagatatatacaaatttcacgtcatctcattttcatctccagttgttttccccttatgcatgggttcaacttcactttccacggaagacattctgactaagtgctgttgtactgcatgtttgtgtcagcccagactgcagaaagccatgcaaaacagattaggtgattgtaagatgtagaattgtagatacaacctaggatctctgacaattctactgacaaatggctgtcagaactttatcaagttcaacttaagagattaaaatgtgaacatgtgtggttatgattagaagtatcttttagtcacatgtgatattgtgatgcctctacaaaccaaggaaaacaaaaacagatgagacataatggacaaaccatcagtccccaggtttctgatacactgtgctttcacgaacccaatccgagtgcatgatcaggtttacaaaaaaaaatcattcatgaatctagtggtcagtctatcaaattgttccatcatcttagaataacacctaataacaaagctaaataacttgtcatgctgggaaagtataagctactgcaagcttttatgcacaatttgtgcccatggcccacaatgaggataatcacgcaaaaaaaaatacaagttgctaactgatgatgtactccctctgtctgtttgacttttttagatacattgttttttatatacatctagacataatgtatatctaagtgcatagcaaaagccacaagtctagaaaaatcaaaacatattataatttcgaacag

SEQ ID NO: 13986 - DNA, 1534 bp, Zea Mays
cagcccgcagcctccgtgatcacgtggcagtgaaaggcttggcttgtttgcagcagcctccctccatggctccagctggtgatcggagcgccgccgcccggaaccccacaaaataaaacagctcgtcggtgccccaccccacccaccatctcctcctcaccggctttatatatgcacgcgccgcgcaccccggcgccagctacccatgccatgtcacacgacacggcatcgcacgtccaccaccaccccgccgcagcagaagaccccggcggcagcgagtgccggttctgcgagatgacgcggcagcaccatcctcagtgcgcgcggcggctgccgaagcgcatcatcctggtgcggcacggcgagagccaggggaacctggacatgtcggcctacaccaccacgcccgactaccgcatcccgctgacagcgctgggagtcgagcaggcgcgcgccgcggggcaccgcatccgcgacgtggtggcggctggcggcggcaactggaaggtctacttctacgtgtccccctacgcgcgcacccgggccacgctgcgcgaggtgggccgcgccttcccgcgggaccgcgtcatcggcgcccgcgaggagtgccgcgtccgggagcaggacttcggcaacttccaggtggaggagcgcatgcgcgccgtcaaggagacgcgccagcgcttcggccgcttcttcttcagattccccgagggcgagtccgccgccgacgtcttcgaccgcgtcgccagcttcctggagtcgctgtggcgggacatcgacatggggcggctggaccaggaccccagctgcgagaccaacctggtgatcgtctcccacggcctcacctcgcgggtgttcctcatgaagtggttcaagtggacggtggcccagttcgaccgcctcaacaacttcgacaactgcgagttcagggtcatgcagctgggccccggcggggagtactccctcctcgtgcaccacaccaaggaggagctgcagcagtggggcatgtcgccggagatgatcgccgaccagcagtggcgagccacagccagccgccgcaactgggccgaggagttctcctccttcgtcgacaccttcttccaggaccccaacgactcgtcggacgaggaacaagaagcacaagacaaggagacgaacctgctgctggacctggagtaactacaactattcatccgcccacaccctgtttatttctttctttcaatgcctctttgaaattgtttccattggatttggatgacgctttctgttgctgctagtaggggggaagagcagagcagggaggtatggtgtattcatcagtcattgctgatctctttcttcctcagcagagtcattgctagctggaaaactgacaaagctcgcagtgcttggctgtctttaacagttaactagtagaataaagatgacttttttttaatttgcggctttcttcattaattatttatataatcaagatcctttcatacttcatacagcacagggtacgttggcattctaataacaacat

SEQ ID NO: 13987 - DNA, 1542 bp, Zea Mays
tctcaattggagttgacaaaacttgcagcaatatttttcttcttggtggcggcggcgggcgcagcctccctccatggctccagctggtgatcggagcgccgccgcccggaaccccacaaaataaaacagctcgtcggtgccccaccccacccaccatctcctcctcaccggctttatatatgcacgcgccgcgcaccccggcgccagctacccatgccatgtcacacgacacggcatcgcacgtccaccaccaccccgccgcagcagaagaccccggcggcagcgagtgccggttctgcgagatgacgcggcagcaccatcctcagtgcgcgcggcggctgccgaagcgcatcatcctggtgcggcacggcgagagccaggggaacctggacatgtcggcctacaccaccacgcccgactaccgcatcccgctgacagcgctgggagtcgagcaggcgcgcgccgcggggcaccgcatccgcgacgtggtggcggctggcggcggcaactggaaggtctacttctacgtgtccccctacgcgcgcacccgggccacgctgcgcgaggtgggccgcgccttcccgcgggaccgcgtcatcggcgcccgcgaggagtgccgcgtccgggagcaggacttcggcaacttccaggtggaggagcgcatgcgcgccgtcaaggagacgcgccagcgcttcggccgcttcttcttcagattccccgagggcgagtccgccgccgacgtcttcgaccgcgtcgccagcttcctggagtcgctgtggcgggacatcgacatggggcggctggaccaggaccccagctgcgagaccaacctggtgatcgtctcccacggcctcacctcgcgggtgttcctcatgaagtggttcaagtggacggtggcccagttcgaccgcctcaacaacttcgacaactgcgagttcagggtcatgcagctgggccccggcggggagtactccctcctcgtgcaccacaccaaggaggagctgcagcagtggggcatgtcgccggagatgatcgccgaccagcagtggcgagccacagccagccgccgcaactgggccgaggagttctcctccttcgtcgacaccttcttccaggaccccaacgactcgtcggacgaggaacaagaagcacaagacaaggagacgaacctgctgctggacctggagtaactacaactattcatccgcccacaccctgtttatttctttctttcaatgcctctttgaaattgtttccattggatttggatgacgctttctgttgctgctagtaggggggaagagcagagcagggaggtatggtgtattcatcagtcattgctgatctctttcttcctcagcagagtcattgctagctggaaaactgacaaagctcgcagtgcttggctgtctttaacagttaactagtagaataaagatgacttttttttaatttgcggctttcttcattaattatttatataatcaagatcctttcatacttcatacagcacagggtacgttggcattctaataacaacat

SEQ ID NO: 13988 - DNA, 1507 bp, Zea Mays
atttttcttcttggtggcggcggcgggcgcctccctccatggctccagctggtgatcggagcgccgccgcccggaaccccacaaaataaaacagctcgtcggtgccccaccccacccaccatctcctcctcaccggctttatatatgcacgcgccgcgcaccccggcgccagctacccatgccatgtcacacgacacggcatcgcacgtccaccaccaccccgccgcagcagaagaccccggcggcagcgagtgccggttctgcgagatgacgcggcagcaccatcctcagtgcgcgcggcggctgccgaagcgcatcatcctggtgcggcacggcgagagccaggggaacctggacatgtcggcctacaccaccacgcccgactaccgcatcccgctgacagcgctgggagtcgagcaggcgcgcgccgcggggcaccgcatccgcgacgtggtggcggctggcggcggcaactggaaggtctacttctacgtgtccccctacgcgcgcacccgggccacgctgcgcgaggtgggccgcgccttcccgcgggaccgcgtcatcggcgcccgcgaggagtgccgcgtccgggagcaggacttcggcaacttccaggtggaggagcgcatgcgcgccgtcaaggagacgcgccagcgcttcggccgcttcttcttcagattccccgagggcgagtccgccgccgacgtcttcgaccgcgtcgccagcttcctggagtcgctgtggcgggacatcgacatggggcggctggaccaggaccccagctgcgagaccaacctggtgatcgtctcccacggcctcacctcgcgggtgttcctcatgaagtggttcaagtggacggtggcccagttcgaccgcctcaacaacttcgacaactgcgagttcagggtcatgcagctgggccccggcggggagtactccctcctcgtgcaccacaccaaggaggagctgcagcagtggggcatgtcgccggagatgatcgccgaccagcagtggcgagccacagccagccgccgcaactgggccgaggagttctcctccttcgtcgacaccttcttccaggaccccaacgactcgtcggacgaggaacaagaagcacaagacaaggagacgaacctgctgctggacctggagtaactacaactattcatccgcccacaccctgtttatttctttctttcaatgcctctttgaaattgtttccattggatttggatgacgctttctgttgctgctagtaggggggaagagcagagcagggaggtatggtgtattcatcagtcattgctgatctctttcttcctcagcagagtcattgctagctggaaaactgacaaagctcgcagtgcttggctgtctttaacagttaactagtagaataaagatgacttttttttaatttgcggctttcttcattaattatttatataatcaagatcctttcatacttcatacagcacagggtacgttggcattctaataacaacat

SEQ ID NO: 13989 - DNA, 1544 bp, Zea Mays
ccgccagcgacgctcccttcctctcccaagttcgtgttcttgttgacgtgtatattttgcatcaatttcaaattacctccctatcttagttaaaactagatttgagcggttttcttaaaaaaattgttgataaaatatttggttttagaatttgagaagtgaaataaaaccgcgataataatcatttaggtctacatacactcagtccgtaccagtgcccttcccaaaacatcaaacaaaagagaaaccgccgcctccgcgtcctcctcccttgcgcgctcagagcagaagcccacccagccgccgatggctaacgcggcggcgcagaacagtaccgagcagctgctccacctgaagctcgcgttcctcgctggagagcctccctcctgcgtgctcacgctcgctaggtagaaagatgtcgagactctacttatacaacaattatttttaaaaagattatatctgaggttgaattatcttcaaatgttgtgattgatgaactttatgaggagtttgctcaacgtatgttgtccgaagcaaaattttcatttttagacaagacaagtcatatttataaagaaatatcttttctatctcctacatatgatcatattttcccaaagcgagtaagtgttgtggcccgactatcatgttcttctaatatgcttgaaggtgatacagggtgttcaatttggccatcaagtttattcttgtctgaatttgttctttcataccctaaaattttctccacaaagtgttgcttcgagctaggttccggtgtcggtctggtgggcatttgtcttaatcatgttggtgcctctaaggttattcttactgatggtgacccatgtacactcagaaacatgaaggaaaatatggaactgaataacttatgcattgagcaggaagattctagagcgctaaaagaaagtaagaataaggtcgagtgcaaatatctttcttgggaagaagtgtccgaaagtgatttatggggctaccagccggacgtagttcttggcgcagatataatctatgacccggtttgtgtgccgcaccttgtccgagtgctctcaatgctgttgagacgagatggtagacaagggggaaccaacggaacatctgttgacgaatttgtatatgaaacggaggctccggtcgcctacattgccacggtggttcgaaatccggagactttcgactgcttcgccacagcagctgccgatacaggattgtccgtcttgaacatcaccagtagcacggctccttcaagatttctcccttacatgctgtcttatgataggtctagtgtgcagcttcttagaattagtttgttgtcatagaacaactacagaaagttgatgtgtgcttccagtatctgtcgttacgagactcgttgtaagggcatcaatcatgtcatttgcattttaaatgcctaacagtttttttttcctaatttgcctctactactgagcatgtaataagcaacttgagtcttgaaaaagttttttttaagttccaaaacgtcaaggattcaaccaggcatc

SEQ ID NO: 13990 - DNA, 1527 bp, Zea Mays
ccgccagcgacgctcccttcctctcccaagttcgtgttcttgttgacgtgtatattttgcatcaatttcaaattacctccctatcttagttaaaactagatttgagcggttttcttaaaaaaattgttgataaaatatttggttttagaatttgagaagtgaaataaaaccgcgataataatcatttaggtctacatacactcagtccgtaccagtgcccttcccaaaacatcaaacaaaagagaaaccgccgcctccgcgtcctcctcccttgcgcgctcagagcagaagcccacccagccgccgatggctaacgcggcggcgcagaacagtaccgagcagctgctccacctgaagctcgcgttcctcgctggagagcctccctcctgcgtgctcacgctcgctaggtagaaagatgtcgagactctacttatacaacaattatttttaaaaagattatatctgaggttgaattatcttcaaatgttgtgattgatgaactttatgaggagtttgctcaacaaattttcatttttagacaagacaagtcatatttataaagaaatatcttttctatctcctacatatgatcatattttcccaaagcgagtaagtgttgtggcccgactatcatgttcttctaatatgcttgaaggtgatacagggtgttcaatttggccatcaagtttattcttgtctgaatttgttctttcataccctaaaattttctccacaaagtgttgcttcgagctaggttccggtgtcggtctggtgggcatttgtcttaatcatgttggtgcctctaaggttattcttactgatggtgacccatgtacactcagaaacatgaaggaaaatatggaactgaataacttatgcattgagcaggaagattctagagcgctaaaagaaagtaagaataaggtcgagtgcaaatatctttcttgggaagaagtgtccgaaagtgatttatggggctaccagccggacgtagttcttggcgcagatataatctatgacccggtttgtgtgccgcaccttgtccgagtgctctcaatgctgttgagacgagatggtagacaagggggaaccaacggaacatctgttgacgaatttgtatatgaaacggaggctccggtcgcctacattgccacggtggttcgaaatccggagactttcgactgcttcgccacagcagctgccgatacaggattgtccgtcttgaacatcaccagtagcacggctccttcaagatttctcccttacatgctgtcttatgataggtctagtgtgcagcttcttagaattagtttgttgtcatagaacaactacagaaagttgatgtgtgcttccagtatctgtcgttacgagactcgttgtaagggcatcaatcatgtcatttgcattttaaatgcctaacagtttttttttcctaatttgcctctactactgagcatgtaataagcaacttgagtcttgaaaaagttttttttaagttccaaaacgtcaaggattcaaccaggcatc

SEQ ID NO: 13991 - DNA, 1535 bp, Zea Mays
gcgcccccaaattcccgccaggagccgcgcctgcaggctgcagtgaaccgacagcgcccccgcccgccgagtagtcggcatcagcatccgccgagccgccagcgagagagggacacacacagggggaacaagacgaccatgtcctcctgggacgacgacgacgactctgctgctgcggcggcggccacggacgtcgagctgctcaagcgggcgtggcgcgacgagaaggccgcgccggagatcctccgcttcgacttgcccctcgtttcccgcgtccgagagcagatccagctcctcgtacgctcttctccctacccgtctttgcagtgccggagcctgagctggacaccttcgtcttctgcaagaccaagagcgacgtaggcgcgttccagctagatgacataggcgaggaggtcgtggacttggtcgctgatgacctctacgttcttcggtacaagtccatcaagggactcgtcgagagcaaccggatcgaccttgtttggtgtcagtggcggtggcgccgcgagccgtcagggtctgcaggacacagcatgcaagcatgggagatgcgacggcaaaggcttgtaagttgtaacatgtcatgaatcttttggttcaggattcttttcgagtcgtggaaagtaagggatcaatggaagaaaaatactaagcaccgtcgcagaggtaaacctcagttgaaagccgatgtctatgtgccattcgcatatggcttaggctttccatgtatctcataacttgtgttagagaatttgggcctggcccaataataaatcttgtaaattccaaaggtctattcacatatgcatgatatagtggtagctttagcaccacattgctacttcaggtagagtgaaaccaacttaaatagttcagctgtctccacccagttgaagctattgaggagtaaaatgtagaacacttgctcgctcgcctcactgggcggggctggcatgttgaatggttcaacaattttcttctccatccggttgacgacgtgccatcatggttcactgagcggggcgagcaatgggcgcgggcgcacgacacacacgtgtgaatggttcagcgatttattgcctgtgcatataacggggcaagacatcgtccctagcacgtgaatggttcagcaatttcttctccatccggttaccaatgtgccatcgtggttgggagagcaggatcttcgatcgtcccctcgtgcagggacacggggtagaggccgtataaggtcgatcagcttcgtctagggtcattctagcgccgacaaccccattgtaaacatgtgtatatctgtatttcttaaatcactagcactagtttatgaactactagtggattatagatatatgaaacatgatgttgtttcttttattattgtcgaaatcaatttgttcctattattttcaataacttgtacatggtacactgttggcggctgctatagcttcacatatttagtctggcaaaattgtcttgaggaggcaccatatccatgtgcacctcgtaacattttg

SEQ ID NO: 13992 - DNA, 2369 bp, Zea Mays
ggaaaaaacagctcgtggcagctgagactgagaggcgctgctgatataaaaacttgggaaggcaccttcagagatggattttttcacagagtatggcgaaggcagcaggtacaagatagaagaggtcataggcaaaggcagctacggcgtggtttgctctgccgtggacactcatactggcgaaaaggtcgctataaagaagataaacgacatcttcgagcatgtgtctgatgcgacgcggatactccgggagatcaagctgcttaggctcctgcggcatccggatattgtggaaataaagcatatcttgctccctccgtcgaggagggagttcagggatatatatgttgtctttgaactcatggagtctgatctgcaccaagttataaaggctaacgatgacttgaccccagagcattaccagtttttcttgtatcaattgcttcgaggattgaaatacatacatacagcaaatgtatttcatcgagatctcaaaccaaaaaatattctggcaaatgctgattgtaagctcaaaatatgtgactttggcttagcaagagtagctttcaatgatactccaaccgccatcttttggacggtggtaccgagcaccagagttgtgtggatctttcttctccaagtatacaccggcgatagatatatggagtattggctgtatatttgcagaattgttaactggaaaacctcttttcccggggaaaaatgtggtacatcaacttgatataattacagatctccttggaacaccttctcccgaagcaatatcaaggattcgtaatgaaaaggccaggcgctacttgagcagtatgaggcgaaaaaagcctataccgtttacgcaaaagttcccaaatgcagatccacttgcactatgtttgttagagcgaatgctcgcttttgagccaaaagacaggccaagtgctgaagaggctcttgctgatccttatttcaagaatatagccagtgtggatagagagccttctgcacaggctgtcacaaagcttgaatttgaattcgagaggcggagagttacaaaggaagacataagggagcttatatatagggaaattcttgagtatcatccaaagatgctgagggagtttcttgagggaactgagtcaagtggtttcatgtacccaagtgcagtagatcattttaaaaagcagtttgcataccttgaagaacattatgccaagggatctacaggaactccacctgagaggcaacataattcattgccgcggccgtctgttgtctattccgacaaccgatcacaaaccacagccaacatcaccgaggatctttccaagtgtatgctcagagaaaatacacagaagacacatccatattctgcttctgttgcaagtaaatttccaccacatgttcctcaaggtgatgttgcaaggcctggtaaagcagttggttcggtgatgcagtacagcccatgtccagcgcctgctgccgagcgatatgagcaacgaagaatcgctaggcacccagcagttgccccaaacaatatcccttctggaagctcataccccagaagaagccagacctgcaagagtgagacaggtgatgccgaaagccatatggatgcgaaccaagctcggcagccaaagccatatgcagcgaacaaactacctgctaccgttgatagtcgtggtggtcactggtaggatttctgcggtgcaccagaaagccattccaaaccgtttcttaacatgttatcagtatcgattacttctgctgagtgctacattattctgacaaatccagaaatgtagttctgtacagatttgtgttctttttccggatacctgaataccgaaagactgtacaactgtagtttctgattcctactccttgtcgctattcaatcgctaaaggatctgtccctggtggagaagaaccggcagattcaatgcaatgttcttgactgacgtcatggattttgttcttcaacctggtagctctgaagacgaattgaatagctgctagtttctgctaatcatctacagtcaggtgcagagtgttctgggagctagttctgaatatcactgtcacgctgtaatctgcacgtttctgagctcctaacttctaagcatgccactaccgtatccctttgtaatttaatcagctgtaccatccagtactctgtttacatttgtagaaacgctctgcaaagaagctattatgtgggagtttctttgctattattataaatgttctgttgttataaatgttaagtttttgtttattataaacgttatgtcgttataagtagtttctttgcaaagtgttattaacggccggaaatgatatcatctataccaaaacaaatgcgattgtct

SEQ ID NO: 13993 - DNA, 2385 bp, Zea Mays
gaaaaaacagctcgtggcagctgagactgagaggcgctgctgatataaaaacttgggaaggcaccttcagagatggattttttcacagagtatggcgaaggcagcaggtacaagatagaagaggtcataggcaaaggcagctacggcgtggtttgctctgccgtggacactcatactggcgaaaaggtcgctataaagaagataaacgacatcttcgagcatgtgtctgatgcgacgcggatactccgggagatcaagctgcttaggctcctgcggcatccggatattgtggaaataaagcatatcttgctccctccgtcgaggagggagttcagggatatatatgttgtctttgaactcatggagtctgatctgcaccaagttataaaggctaacgatgacttgaccccagagcattaccagtttttcttgtatcaattgcttcgaggattgaaatacatacatacagcaaatgtatttcatcgagatctcaaaccaaaaaatattctggcaaatgctgattgtaagctcaaaatatgtgactttggcttagcaagagtagctttcaatgatactccaaccgccatcttttggacggattatgttgcaactaggtggtaccgagcaccagagttgtgtggatctttcttctccaagtatacaccggcgatagatatatggagtattggctgtatatttgcagaattgttaactggaaaacctcttttcccggggaaaaatgtggtacatcaacttgatataattacagatctccttggaacaccttctcccgaagcaatatcaaggattcgtaatgaaaaggccaggcgctacttgagcagtatgaggcgaaaaaagcctataccgtttacgcaaaagttcccaaatgcagatccacttgcactatgtttgttagagcgaatgctcgcttttgagccaaaagacaggccaagtgctgaagaggctcttgctgatccttatttcaagaatatagccagtgtggatagagagccttctgcacaggctgtcacaaagcttgaatttgaattcgagaggcggagagttacaaaggaagacataagggagcttatatatagggaaattcttgagtatcatccaaagatgctgagggagtttcttgagggaactgagtcaagtggtttcatgtacccaagtgcagtagatcattttaaaaagcagtttgcataccttgaagaacattatgccaagggatctacaggaactccacctgagaggcaacataattcattgccgcggccgtctgttgtctattccgacaaccgatcacaaaccacagccaacatcaccgaggatctttccaagtgtatgctcagagaaaatacacagaagacacatccatattctgcttctgttgcaagtaaatttccaccacatgttcctcaaggtgatgttgcaaggcctggtaaagcagttggttcggtgatgcagtacagcccatgtccagcgcctgctgccgagcgatatgagcaacgaagaatcgctaggcacccagcagttgccccaaacaatatcccttctggaagctcataccccagaagaagccagacctgcaagagtgagacaggtgatgccgaaagccatatggatgcgaaccaagctcggcagccaaagccatatgcagcgaacaaactacctgctaccgttgatagtcgtggtggtcactggtaggatttctgcggtgcaccagaaagccattccaaaccgtttcttaacatgttatcagtatcgattacttctgctgagtgctacattattctgacaaatccagaaatgtagttctgtacagatttgtgttctttttccggatacctgaataccgaaagactgtacaactgtagtttctgattcctactccttgtcgctattcaatcgctaaaggatctgtccctggtggagaagaaccggcagattcaatgcaatgttcttgactgacgtcatggattttgttcttcaacctggtagctctgaagacgaattgaatagctgctagtttctgctaatcatctacagtcaggtgcagagtgttctgggagctagttctgaatatcactgtcacgctgtaatctgcacgtttctgagctcctaacttctaagcatgccactaccgtatccctttgtaatttaatcagctgtaccatccagtactctgtttacatttgtagaaacgctctgcaaagaagctattatgtgggagtttctttgctattattataaatgttctgttgttataaatgttaagtttttgtttattataaacgttatgtcgttataagtagtttctttgcaaagtgttattaacggccggaaatgatatcatctataccaaaacaaatgcgattgtct

SEQ ID NO: 13994 - DNA, 2642 bp, Zea Mays
atctctctctctctctgtctcccaccacctatcttccctccccatgtgggcggcctcgagctctgcttaggtctcacagctgtgctctcgttggttgggtgatccgccccttgtcggctcctttcaactcgagagctccgggacagcgagatctgcgctgtcgccgccttacctttcttacgagctcgcgtgcaggcaggcactgagcagtgagctcccccccgtcttcctcagcctcgtttcccctctcgttgctggatctggctcgcaagatccaatctttcgtgccccctttttccaaagatcctcgcttgggtggttcttcctggagattgctgggaggatgcagcacgaccagaagaagaaggcaccttcagagatggattttttcacagagtatggcgaaggcagcaggtacaagatagaagaggtcataggcaaaggcagctacggcgtggtttgctctgccgtggacactcatactggcgaaaaggtcgctataaagaagataaacgacatcttcgagcatgtgtctgatgcgacgcggatactccgggagatcaagctgcttaggctcctgcggcatccggatattgtggaaataaagcatatcttgctccctccgtcgaggagggagttcagggatatatatgttgtctttgaactcatggagtctgatctgcaccaagttataaaggctaacgatgacttgaccccagagcattaccagtttttcttgtatcaattgcttcgaggattgaaatacatacatacagcttattgcagcaaatgtatttcatcgagatctcaaaccaaaaaatattctggcaaatgctgattgtaagctcaaaatatgtgactttggcttagcaagagtagctttcaatgatactccaaccgccatcttttggacgtatacaccggcgatagatatatggagtattggctgtatatttgcagaattgttaactggaaaacctcttttcccggggaaaaatgtggtacatcaacttgatataattacagatctccttggaacaccttctcccgaagcaatatcaaggattcgtaatgaaaaggccaggcgctacttgagcagtatgaggcgaaaaaagcctataccgtttacgcaaaagttcccaaatgcagatccacttgcactatgtttgttagagcgaatgctcgcttttgagccaaaagacaggccaagtgctgaagaggctcttgctgatccttatttcaagaatatagccagtgtggatagagagccttctgcacaggctgtcacaaagcttgaatttgaattcgagaggcggagagttacaaaggaagacataagggagcttatatatagggaaattcttgagtatcatccaaagatgctgagggagtttcttgagggaactgagtcaagtggtttcatgtacccaagtgcagtagatcattttaaaaagcagtttgcataccttgaagaacattatgccaagggatctacaggaactccacctgagaggcaacataattcattgccgcggccgtctgttgtctattccgacaaccgatcacaaaccacagccaacatcaccgaggatctttccaagtgtatgctcagagaaaatacacagaagacacatccatattctgcttctgttgcaagtaaatttccaccacatgttcctcaaggtgatgttgcaaggcctggtaaagcagttggttcggtgatgcagtacagcccatgtccagcgcctgctgccgagcgatatgagcaacgaagaatcgctaggcacccagcagttgccccaaacaatatcccttctggaagctcataccccagaagaagccagacctgcaagagtgagacaggtgatgccgaaagccatatggatgcgaaccaagctcggcagccaaagccatatgcagcgaacaaactacctgctaccgttgatagtcgtggtggtcactggtaggatttctgcggtgcaccagaaagccattccaaaccgtttcttaacatgttatcagtatcgattacttctgctgagtgctacattattctgacaaatccagaaatgtagttctgtacagatttgtgttctttttccggatacctgaataccgaaagactgtacaactgtagtttctgattcctactccttgtcgctattcaatcgctaaaggatctgtccctggtggagaagaaccggcagattcaatgcaatgttcttgactgacgtcatggattttgttcttcaacctggtagctctgaagacgaattgaatagctgctagtttctgctaatcatctacagtcaggtgcagagtgttctgggagctagttctgaatatcactgtcacgctgtaatctgcacgtttctgagctcctaacttctaagcatgccactaccgtatccctttgtaatttaatcagctgtaccatccagtactctgtttacatttgtagaaacgctctgcaaagaagctattatgtgggagtttctttgctattattataaatgttctgttgttataaatgttaagtttttgtttattataaacgttatgtcgttataagtagtttctttgcaaagtgttattaacggccggaaatgatatcatctataccaaaacaaatgcgattgtct

SEQ ID NO: 13995 - DNA, 2527 bp, Zea Mays
atctctctctctctctgtctcccaccacctatcttccctccccatgtgggcggcctcgagctctgcttaggtctcacagctgtgctctcgttggttgggtgatccgccccttgtcggctcctttcaactcgagagctccgggacagcgagatctgcgctgtcgccgccttacctttcttacgagctcgcgtgcaggcaggcactgagcagcaccttcagagatggattttttcacagagtatggcgaaggcagcaggtacaagatagaagaggtcataggcaaaggcagctacggcgtggtttgctctgccgtggacactcatactggcgaaaaggtcgctataaagaagataaacgacatcttcgagcatgtgtctgatgcgacgcggatactccgggagatcaagctgcttaggctcctgcggcatccggatattgtggaaataaagcatatcttgctccctccgtcgaggagggagttcagggatatatatgttgtctttgaactcatggagtctgatctgcaccaagttataaaggctaacgatgacttgaccccagagcattaccagtttttcttgtatcaattgcttcgaggattgaaatacatacatacagcttattgcagcaaatgtatttcatcgagatctcaaaccaaaaaatattctggcaaatgctgattgtaagctcaaaatatgtgactttggcttagcaagagtagctttcaatgatactccaaccgccatcttttggacggtggtaccgagcaccagagttgtgtggatctttcttctccaagtatacaccggcgatagatatatggagtattggctgtatatttgcagaattgttaactggaaaacctcttttcccggggaaaaatgtggtacatcaacttgatataattacagatctccttggaacaccttctcccgaagcaatatcaaggattcgtaatgaaaaggccaggcgctacttgagcagtatgaggcgaaaaaagcctataccgtttacgcaaaagttcccaaatgcagatccacttgcactatgtttgttagagcgaatgctcgcttttgagccaaaagacaggccaagtgctgaagaggctcttgctgatccttatttcaagaatatagccagtgtggatagagagccttctgcacaggctgtcacaaagcttgaatttgaattcgagaggcggagagttacaaaggaagacataagggagcttatatatagggaaattcttgagtatcatccaaagatgctgagggagtttcttgagggaactgagtcaagtggtttcatgtacccaagtgcagtagatcattttaaaaagcagtttgcataccttgaagaacattatgccaagggatctacaggaactccacctgagaggcaacataattcattgccgcggccgtctgttgtctattccgacaaccgatcacaaaccacagccaacatcaccgaggatctttccaagtgtatgctcagagaaaatacacagaagacacatccatattctgcttctgttgcaagtaaatttccaccacatgttcctcaaggtgatgttgcaaggcctggtaaagcagttggttcggtgatgcagtacagcccatgtccagcgcctgctgccgagcgatatgagcaacgaagaatcgctaggcacccagcagttgccccaaacaatatcccttctggaagctcataccccagaagaagccagacctgcaagagtgagacaggtgatgccgaaagccatatggatgcgaaccaagctcggcagccaaagccatatgcagcgaacaaactacctgctaccgttgatagtcgtggtggtcactggtaggatttctgcggtgcaccagaaagccattccaaaccgtttcttaacatgttatcagtatcgattacttctgctgagtgctacattattctgacaaatccagaaatgtagttctgtacagatttgtgttctttttccggatacctgaataccgaaagactgtacaactgtagtttctgattcctactccttgtcgctattcaatcgctaaaggatctgtccctggtggagaagaaccggcagattcaatgcaatgttcttgactgacgtcatggattttgttcttcaacctggtagctctgaagacgaattgaatagctgctagtttctgctaatcatctacagtcaggtgcagagtgttctgggagctagttctgaatatcactgtcacgctgtaatctgcacgtttctgagctcctaacttctaagcatgccactaccgtatccctttgtaatttaatcagctgtaccatccagtactctgtttacatttgtagaaacgctctgcaaagaagctattatgtgggagtttctttgctattattataaatgttctgttgttataaatgttaagtttttgtttattataaacgttatgtcgttataagtagtttctttgcaaagtgttattaacggccggaaatgatatcatctataccaaaacaaatgcgattgtct

SEQ ID NO: 13996 - DNA, 2544 bp, Zea Mays
atctctctctctctctgtctcccaccacctatcttccctccccatgtgggcggcctcgagctctgcttaggtctcacagctgtgctctcgttggttgggtgatccgccccttgtcggctcctttcaactcgagagctccgggacagcgagatctgcgctgtcgccgccttacctttcttacgagctcgcgtgcaggcaggcactgagcagcaccttcagagatggattttttcacagagtatggcgaaggcagcaggtacaagatagaagaggtcataggcaaaggcagctacggcgtggtttgctctgccgtggacactcatactggcgaaaaggtcgctataaagaagataaacgacatcttcgagcatgtgtctgatgcgacgcggatactccgggagatcaagctgcttaggctcctgcggcatccggatattgtggaaataaagcatatcttgctccctccgtcgaggagggagttcagggatatatatgttgtctttgaactcatggagtctgatctgcaccaagttataaaggctaacgatgacttgaccccagagcattaccagtttttcttgtatcaattgcttcgaggattgaaatacatacatacagcttattgcagcaaatgtatttcatcgagatctcaaaccaaaaaatattctggcaaatgctgattgtaagctcaaaatatgtgactttggcttagcaagagtagctttcaatgatactccaaccgccatcttttggacggattatgttgcaactaggtggtaccgagcaccagagttgtgtggatctttcttctccaagtatacaccggcgatagatatatggagtattggctgtatatttgcagaattgttaactggaaaacctcttttcccggggaaaaatgtggtacatcaacttgatataattacagatctccttggaacaccttctcccgaagcaatatcaaggattcgtaatgaaaaggccaggcgctacttgagcagtatgaggcgaaaaaagcctataccgtttacgcaaaagttcccaaatgcagatccacttgcactatgtttgttagagcgaatgctcgcttttgagccaaaagacaggccaagtgctgaagaggctcttgctgatccttatttcaagaatatagccagtgtggatagagagccttctgcacaggctgtcacaaagcttgaatttgaattcgagaggcggagagttacaaaggaagacataagggagcttatatatagggaaattcttgagtatcatccaaagatgctgagggagtttcttgagggaactgagtcaagtggtttcatgtacccaagtgcagtagatcattttaaaaagcagtttgcataccttgaagaacattatgccaagggatctacaggaactccacctgagaggcaacataattcattgccgcggccgtctgttgtctattccgacaaccgatcacaaaccacagccaacatcaccgaggatctttccaagtgtatgctcagagaaaatacacagaagacacatccatattctgcttctgttgcaagtaaatttccaccacatgttcctcaaggtgatgttgcaaggcctggtaaagcagttggttcggtgatgcagtacagcccatgtccagcgcctgctgccgagcgatatgagcaacgaagaatcgctaggcacccagcagttgccccaaacaatatcccttctggaagctcataccccagaagaagccagacctgcaagagtgagacaggtgatgccgaaagccatatggatgcgaaccaagctcggcagccaaagccatatgcagcgaacaaactacctgctaccgttgatagtcgtggtggtcactggtaggatttctgcggtgcaccagaaagccattccaaaccgtttcttaacatgttatcagtatcgattacttctgctgagtgctacattattctgacaaatccagaaatgtagttctgtacagatttgtgttctttttccggatacctgaataccgaaagactgtacaactgtagtttctgattcctactccttgtcgctattcaatcgctaaaggatctgtccctggtggagaagaaccggcagattcaatgcaatgttcttgactgacgtcatggattttgttcttcaacctggtagctctgaagacgaattgaatagctgctagtttctgctaatcatctacagtcaggtgcagagtgttctgggagctagttctgaatatcactgtcacgctgtaatctgcacgtttctgagctcctaacttctaagcatgccactaccgtatccctttgtaatttaatcagctgtaccatccagtactctgtttacatttgtagaaacgctctgcaaagaagctattatgtgggagtttctttgctattattataaatgttctgttgttataaatgttaagtttttgtttattataaacgttatgtcgttataagtagtttctttgcaaagtgttattaacggccggaaatgatatcatctataccaaaacaaatgcgattgtct

SEQ ID NO: 13997 - DNA, 2702 bp, Zea Mays
atctctctctctctctgtctcccaccacctatcttccctccccatgtgggcggcctcgagctctgcttaggtctcacagctgtgctctcgttggttgggtgatccgccccttgtcggctcctttcaactcgagagctccgggacagcgagatctgcgctgtcgccgccttacctttcttacgagctcgcgtgcaggcaggcactgagcagtgagctcccccccgtcttcctcagcctcgtttcccctctcgttgctggatctggctcgcaagatccaatctttcgtgccccctttttccaaagatcctcgcttgggtggttcttcctggagattgctgggaggatgcagcacgaccagaagaagaaggcaccttcagagatggattttttcacagagtatggcgaaggcagcaggtacaagatagaagaggtcataggcaaaggcagctacggcgtggtttgctctgccgtggacactcatactggcgaaaaggtcgctataaagaagataaacgacatcttcgagcatgtgtctgatgcgacgcggatactccgggagatcaagctgcttaggctcctgcggcatccggatattgtggaaataaagcatatcttgctccctccgtcgaggagggagttcagggatatatatgttgtctttgaactcatggagtctgatctgcaccaagttataaaggctaacgatgacttgaccccagagcattaccagtttttcttgtatcaattgcttcgaggattgaaatacatacatacagcttattgcagcaaatgtatttcatcgagatctcaaaccaaaaaatattctggcaaatgctgattgtaagctcaaaatatgtgactttggcttagcaagagtagctttcaatgatactccaaccgccatcttttggacggattatgttgcaactaggtggtaccgagcaccagagttgtgtggatctttcttctccaagtatacaccggcgatagatatatggagtattggctgtatatttgcagaattgttaactggaaaacctcttttcccggggaaaaatgtggtacatcaacttgatataattacagatctccttggaacaccttctcccgaagcaatatcaaggattcgtaatgaaaaggccaggcgctacttgagcagtatgaggcgaaaaaagcctataccgtttacgcaaaagttcccaaatgcagatccacttgcactatgtttgttagagcgaatgctcgcttttgagccaaaagacaggccaagtgctgaagaggctcttgctgatccttatttcaagaatatagccagtgtggatagagagccttctgcacaggctgtcacaaagcttgaatttgaattcgagaggcggagagttacaaaggaagacataagggagcttatatatagggaaattcttgagtatcatccaaagatgctgagggagtttcttgagggaactgagtcaagtggtttcatgtacccaagtgcagtagatcattttaaaaagcagtttgcataccttgaagaacattatgccaagggatctacaggaactccacctgagaggcaacataattcattgccgcggccgtctgttgtctattccgacaaccgatcacaaaccacagccaacatcaccgaggatctttccaagtgtatgctcagagaaaatacacagaagacacatccatattctgcttctgttgcaagtaaatttccaccacatgttcctcaaggtgatgttgcaaggcctggtaaagcagttggttcggtgatgcagtacagcccatgtccagcgcctgctgccgagcgatatgagcaacgaagaatcgctaggcacccagcagttgccccaaacaatatcccttctggaagctcataccccagaagaagccagacctgcaagagtgagacaggtgatgccgaaagccatatggatgcgaaccaagctcggcagccaaagccatatgcagcgaacaaactacctgctaccgttgatagtcgtggtggtcactggtaggatttctgcggtgcaccagaaagccattccaaaccgtttcttaacatgttatcagtatcgattacttctgctgagtgctacattattctgacaaatccagaaatgtagttctgtacagatttgtgttctttttccggatacctgaataccgaaagactgtacaactgtagtttctgattcctactccttgtcgctattcaatcgctaaaggatctgtccctggtggagaagaaccggcagattcaatgcaatgttcttgactgacgtcatggattttgttcttcaacctggtagctctgaagacgaattgaatagctgctagtttctgctaatcatctacagtcaggtgcagagtgttctgggagctagttctgaatatcactgtcacgctgtaatctgcacgtttctgagctcctaacttctaagcatgccactaccgtatccctttgtaatttaatcagctgtaccatccagtactctgtttacatttgtagaaacgctctgcaaagaagctattatgtgggagtttctttgctattattataaatgttctgttgttataaatgttaagtttttgtttattataaacgttatgtcgttataagtagtttctttgcaaagtgttattaacggccggaaatgatatcatctataccaaaacaaatgcgattgtct

SEQ ID NO: 13998 - DNA, 2530 bp, Zea Mays
atctctctctctctctgtctcccaccacctatcttccctccccatgtgggcggcctcgagctctgcttaggtctcacagctgtgctctcgttggttgggtgatccgccccttgtcggctcctttcaactcgagagctccgggacagcgagatctgcgctgtcgccgccttacctttcttacgagctcgcgtgcaggcaccttcagagatggattttttcacagagtatggcgaaggcagcaggtacaagatagaagaggtcataggcaaaggcagctacggcgtggtttgctctgccgtggacactcatactggcgaaaaggtcgctataaagaagataaacgacatcttcgagcatgtgtctgatgcgacgcggatactccgggagatcaagctgcttaggctcctgcggcatccggatattgtggaaataaagcatatcttgctccctccgtcgaggagggagttcagggatatatatgttgtctttgaactcatggagtctgatctgcaccaagttataaaggctaacgatgacttgaccccagagcattaccagtttttcttgtatcaattgcttcgaggattgaaatacatacatacagcttattgcagcaaatgtatttcatcgagatctcaaaccaaaaaatattctggcaaatgctgattgtaagctcaaaatatgtgactttggcttagcaagagtagctttcaatgatactccaaccgccatcttttggacggattatgttgcaactaggtggtaccgagcaccagagttgtgtggatctttcttctccaagtatacaccggcgatagatatatggagtattggctgtatatttgcagaattgttaactggaaaacctcttttcccggggaaaaatgtggtacatcaacttgatataattacagatctccttggaacaccttctcccgaagcaatatcaaggattcgtaatgaaaaggccaggcgctacttgagcagtatgaggcgaaaaaagcctataccgtttacgcaaaagttcccaaatgcagatccacttgcactatgtttgttagagcgaatgctcgcttttgagccaaaagacaggccaagtgctgaagaggctcttgctgatccttatttcaagaatatagccagtgtggatagagagccttctgcacaggctgtcacaaagcttgaatttgaattcgagaggcggagagttacaaaggaagacataagggagcttatatatagggaaattcttgagtatcatccaaagatgctgagggagtttcttgagggaactgagtcaagtggtttcatgtacccaagtgcagtagatcattttaaaaagcagtttgcataccttgaagaacattatgccaagggatctacaggaactccacctgagaggcaacataattcattgccgcggccgtctgttgtctattccgacaaccgatcacaaaccacagccaacatcaccgaggatctttccaagtgtatgctcagagaaaatacacagaagacacatccatattctgcttctgttgcaagtaaatttccaccacatgttcctcaaggtgatgttgcaaggcctggtaaagcagttggttcggtgatgcagtacagcccatgtccagcgcctgctgccgagcgatatgagcaacgaagaatcgctaggcacccagcagttgccccaaacaatatcccttctggaagctcataccccagaagaagccagacctgcaagagtgagacaggtgatgccgaaagccatatggatgcgaaccaagctcggcagccaaagccatatgcagcgaacaaactacctgctaccgttgatagtcgtggtggtcactggtaggatttctgcggtgcaccagaaagccattccaaaccgtttcttaacatgttatcagtatcgattacttctgctgagtgctacattattctgacaaatccagaaatgtagttctgtacagatttgtgttctttttccggatacctgaataccgaaagactgtacaactgtagtttctgattcctactccttgtcgctattcaatcgctaaaggatctgtccctggtggagaagaaccggcagattcaatgcaatgttcttgactgacgtcatggattttgttcttcaacctggtagctctgaagacgaattgaatagctgctagtttctgctaatcatctacagtcaggtgcagagtgttctgggagctagttctgaatatcactgtcacgctgtaatctgcacgtttctgagctcctaacttctaagcatgccactaccgtatccctttgtaatttaatcagctgtaccatccagtactctgtttacatttgtagaaacgctctgcaaagaagctattatgtgggagtttctttgctattattataaatgttctgttgttataaatgttaagtttttgtttattataaacgttatgtcgttataagtagtttctttgcaaagtgttattaacggccggaaatgatatcatctataccaaaacaaatgcgattgtct

SEQ ID NO: 13999 - DNA, 2534 bp, Zea Mays
atctctctctctctctgtctcccaccacctatcttccctccccatgtgggcggcctcgagctctgcttaggtctcacagctgtgctctcgttggttgggtgatccgccccttgtcggctcctttcaactcgagagctccgggacagcgagatctgcgctgtcgccgccttacctttcttacgagctcgcgtgcaggcaggcactgagcagcaccttcagagatggattttttcacagagtatggcgaaggcagcaggtacaagatagaagaggtcataggcaaaggcagctacggcgtggtttgctctgccgtggacactcatactggcgaaaaggtcgctataaagaagataaacgacatcttcgagcatgtgtctgatgcgacgcggatactccgggagatcaagctgcttaggctcctgcggcatccggatattgtggaaataaagcatatcttgctccctccgtcgaggagggagttcagggatatatatgttgtctttgaactcatggagtctgatctgcaccaagttataaaggctaacgatgacttgaccccagagcattaccagtttttcttgtatcaattgcttcgaggattgaaatacatacatacagcaaatgtatttcatcgagatctcaaaccaaaaaatattctggcaaatgctgattgtaagctcaaaatatgtgactttggcttagcaagagtagctttcaatgatactccaaccgccatcttttggacggattatgttgcaactaggtggtaccgagcaccagagttgtgtggatctttcttctccaagtatacaccggcgatagatatatggagtattggctgtatatttgcagaattgttaactggaaaacctcttttcccggggaaaaatgtggtacatcaacttgatataattacagatctccttggaacaccttctcccgaagcaatatcaaggattcgtaatgaaaaggccaggcgctacttgagcagtatgaggcgaaaaaagcctataccgtttacgcaaaagttcccaaatgcagatccacttgcactatgtttgttagagcgaatgctcgcttttgagccaaaagacaggccaagtgctgaagaggctcttgctgatccttatttcaagaatatagccagtgtggatagagagccttctgcacaggctgtcacaaagcttgaatttgaattcgagaggcggagagttacaaaggaagacataagggagcttatatatagggaaattcttgagtatcatccaaagatgctgagggagtttcttgagggaactgagtcaagtggtttcatgtacccaagtgcagtagatcattttaaaaagcagtttgcataccttgaagaacattatgccaagggatctacaggaactccacctgagaggcaacataattcattgccgcggccgtctgttgtctattccgacaaccgatcacaaaccacagccaacatcaccgaggatctttccaagtgtatgctcagagaaaatacacagaagacacatccatattctgcttctgttgcaagtaaatttccaccacatgttcctcaaggtgatgttgcaaggcctggtaaagcagttggttcggtgatgcagtacagcccatgtccagcgcctgctgccgagcgatatgagcaacgaagaatcgctaggcacccagcagttgccccaaacaatatcccttctggaagctcataccccagaagaagccagacctgcaagagtgagacaggtgatgccgaaagccatatggatgcgaaccaagctcggcagccaaagccatatgcagcgaacaaactacctgctaccgttgatagtcgtggtggtcactggtaggatttctgcggtgcaccagaaagccattccaaaccgtttcttaacatgttatcagtatcgattacttctgctgagtgctacattattctgacaaatccagaaatgtagttctgtacagatttgtgttctttttccggatacctgaataccgaaagactgtacaactgtagtttctgattcctactccttgtcgctattcaatcgctaaaggatctgtccctggtggagaagaaccggcagattcaatgcaatgttcttgactgacgtcatggattttgttcttcaacctggtagctctgaagacgaattgaatagctgctagtttctgctaatcatctacagtcaggtgcagagtgttctgggagctagttctgaatatcactgtcacgctgtaatctgcacgtttctgagctcctaacttctaagcatgccactaccgtatccctttgtaatttaatcagctgtaccatccagtactctgtttacatttgtagaaacgctctgcaaagaagctattatgtgggagtttctttgctattattataaatgttctgttgttataaatgttaagtttttgtttattataaacgttatgtcgttataagtagtttctttgcaaagtgttattaacggccggaaatgatatcatctataccaaaacaaatgcgattgtct

SEQ ID NO: 14000 - DNA, 2685 bp, Zea Mays
atctctctctctctctgtctcccaccacctatcttccctccccatgtgggcggcctcgagctctgcttaggtctcacagctgtgctctcgttggttgggtgatccgccccttgtcggctcctttcaactcgagagctccgggacagcgagatctgcgctgtcgccgccttacctttcttacgagctcgcgtgcaggcaggcactgagcagtgagctcccccccgtcttcctcagcctcgtttcccctctcgttgctggatctggctcgcaagatccaatctttcgtgccccctttttccaaagatcctcgcttgggtggttcttcctggagattgctgggaggatgcagcacgaccagaagaagaaggcaccttcagagatggattttttcacagagtatggcgaaggcagcaggtacaagatagaagaggtcataggcaaaggcagctacggcgtggtttgctctgccgtggacactcatactggcgaaaaggtcgctataaagaagataaacgacatcttcgagcatgtgtctgatgcgacgcggatactccgggagatcaagctgcttaggctcctgcggcatccggatattgtggaaataaagcatatcttgctccctccgtcgaggagggagttcagggatatatatgttgtctttgaactcatggagtctgatctgcaccaagttataaaggctaacgatgacttgaccccagagcattaccagtttttcttgtatcaattgcttcgaggattgaaatacatacatacagcttattgcagcaaatgtatttcatcgagatctcaaaccaaaaaatattctggcaaatgctgattgtaagctcaaaatatgtgactttggcttagcaagagtagctttcaatgatactccaaccgccatcttttggacggtggtaccgagcaccagagttgtgtggatctttcttctccaagtatacaccggcgatagatatatggagtattggctgtatatttgcagaattgttaactggaaaacctcttttcccggggaaaaatgtggtacatcaacttgatataattacagatctccttggaacaccttctcccgaagcaatatcaaggattcgtaatgaaaaggccaggcgctacttgagcagtatgaggcgaaaaaagcctataccgtttacgcaaaagttcccaaatgcagatccacttgcactatgtttgttagagcgaatgctcgcttttgagccaaaagacaggccaagtgctgaagaggctcttgctgatccttatttcaagaatatagccagtgtggatagagagccttctgcacaggctgtcacaaagcttgaatttgaattcgagaggcggagagttacaaaggaagacataagggagcttatatatagggaaattcttgagtatcatccaaagatgctgagggagtttcttgagggaactgagtcaagtggtttcatgtacccaagtgcagtagatcattttaaaaagcagtttgcataccttgaagaacattatgccaagggatctacaggaactccacctgagaggcaacataattcattgccgcggccgtctgttgtctattccgacaaccgatcacaaaccacagccaacatcaccgaggatctttccaagtgtatgctcagagaaaatacacagaagacacatccatattctgcttctgttgcaagtaaatttccaccacatgttcctcaaggtgatgttgcaaggcctggtaaagcagttggttcggtgatgcagtacagcccatgtccagcgcctgctgccgagcgatatgagcaacgaagaatcgctaggcacccagcagttgccccaaacaatatcccttctggaagctcataccccagaagaagccagacctgcaagagtgagacaggtgatgccgaaagccatatggatgcgaaccaagctcggcagccaaagccatatgcagcgaacaaactacctgctaccgttgatagtcgtggtggtcactggtaggatttctgcggtgcaccagaaagccattccaaaccgtttcttaacatgttatcagtatcgattacttctgctgagtgctacattattctgacaaatccagaaatgtagttctgtacagatttgtgttctttttccggatacctgaataccgaaagactgtacaactgtagtttctgattcctactccttgtcgctattcaatcgctaaaggatctgtccctggtggagaagaaccggcagattcaatgcaatgttcttgactgacgtcatggattttgttcttcaacctggtagctctgaagacgaattgaatagctgctagtttctgctaatcatctacagtcaggtgcagagtgttctgggagctagttctgaatatcactgtcacgctgtaatctgcacgtttctgagctcctaacttctaagcatgccactaccgtatccctttgtaatttaatcagctgtaccatccagtactctgtttacatttgtagaaacgctctgcaaagaagctattatgtgggagtttctttgctattattataaatgttctgttgttataaatgttaagtttttgtttattataaacgttatgtcgttataagtagtttctttgcaaagtgttattaacggccggaaatgatatcatctataccaaaacaaatgcgattgtct

SEQ ID NO: 14001 - DNA, 2675 bp, Zea Mays
atctctctctctctctgtctcccaccacctatcttccctccccatgtgggcggcctcgagctctgcttaggtctcacagctgtgctctcgttggttgggtgatccgccccttgtcggctcctttcaactcgagagctccgggacagcgagatctgcgctgtcgccgccttacctttcttacgagctcgcgtgcaggcaggcactgagcagtgagctcccccccgtcttcctcagcctcgtttcccctctcgttgctggatctggctcgcaagatccaatctttcgtgccccctttttccaaagatcctcgcttgggtggttcttcctggagattgctgggaggatgcagcacgaccagaagaagaaggcaccttcagagatggattttttcacagagtatggcgaaggcagcaggtacaagatagaagaggtcataggcaaaggcagctacggcgtggtttgctctgccgtggacactcatactggcgaaaaggtcgctataaagaagataaacgacatcttcgagcatgtgtctgatgcgacgcggatactccgggagatcaagctgcttaggctcctgcggcatccggatattgtggaaataaagcatatcttgctccctccgtcgaggagggagttcagggatatatatgttgtctttgaactcatggagtctgatctgcaccaagttataaaggctaacgatgacttgaccccagagcattaccagtttttcttgtatcaattgcttcgaggattgaaatacatacatacagcaaatgtatttcatcgagatctcaaaccaaaaaatattctggcaaatgctgattgtaagctcaaaatatgtgactttggcttagcaagagtagctttcaatgatactccaaccgccatcttttggacggtggtaccgagcaccagagttgtgtggatctttcttctccaagtatacaccggcgatagatatatggagtattggctgtatatttgcagaattgttaactggaaaacctcttttcccggggaaaaatgtggtacatcaacttgatataattacagatctccttggaacaccttctcccgaagcaatatcaaggattcgtaatgaaaaggccaggcgctacttgagcagtatgaggcgaaaaaagcctataccgtttacgcaaaagttcccaaatgcagatccacttgcactatgtttgttagagcgaatgctcgcttttgagccaaaagacaggccaagtgctgaagaggctcttgctgatccttatttcaagaatatagccagtgtggatagagagccttctgcacaggctgtcacaaagcttgaatttgaattcgagaggcggagagttacaaaggaagacataagggagcttatatatagggaaattcttgagtatcatccaaagatgctgagggagtttcttgagggaactgagtcaagtggtttcatgtacccaagtgcagtagatcattttaaaaagcagtttgcataccttgaagaacattatgccaagggatctacaggaactccacctgagaggcaacataattcattgccgcggccgtctgttgtctattccgacaaccgatcacaaaccacagccaacatcaccgaggatctttccaagtgtatgctcagagaaaatacacagaagacacatccatattctgcttctgttgcaagtaaatttccaccacatgttcctcaaggtgatgttgcaaggcctggtaaagcagttggttcggtgatgcagtacagcccatgtccagcgcctgctgccgagcgatatgagcaacgaagaatcgctaggcacccagcagttgccccaaacaatatcccttctggaagctcataccccagaagaagccagacctgcaagagtgagacaggtgatgccgaaagccatatggatgcgaaccaagctcggcagccaaagccatatgcagcgaacaaactacctgctaccgttgatagtcgtggtggtcactggtaggatttctgcggtgcaccagaaagccattccaaaccgtttcttaacatgttatcagtatcgattacttctgctgagtgctacattattctgacaaatccagaaatgtagttctgtacagatttgtgttctttttccggatacctgaataccgaaagactgtacaactgtagtttctgattcctactccttgtcgctattcaatcgctaaaggatctgtccctggtggagaagaaccggcagattcaatgcaatgttcttgactgacgtcatggattttgttcttcaacctggtagctctgaagacgaattgaatagctgctagtttctgctaatcatctacagtcaggtgcagagtgttctgggagctagttctgaatatcactgtcacgctgtaatctgcacgtttctgagctcctaacttctaagcatgccactaccgtatccctttgtaatttaatcagctgtaccatccagtactctgtttacatttgtagaaacgctctgcaaagaagctattatgtgggagtttctttgctattattataaatgttctgttgttataaatgttaagtttttgtttattataaacgttatgtcgttataagtagtttctttgcaaagtgttattaacggccggaaatgatatcatctataccaaaacaaatgcgattgtct

SEQ ID NO: 14002 - DNA, 2536 bp, Zea Mays
atctctctctctctctgtctcccaccacctatcttccctccccatgtgggcggcctcgagctctgcttaggtctcacagctgtgctctcgttggttgggtgatccgccccttgtcggctcctttcaactcgagagctccgggacagcgagatctgcgctgtcgccgccttacctttcttacgagctcgcgtgcaggcaggcactgagcagtgagctcccccccgtcttcctcagcctcgtttcccctctcgttgctggatctggctcgcaagatccaatctttcgtgccccctttttccaaagatcctcgcttgggtggttcttcctggagattgctgggaggatgcagcacgaccagaagaagaaggcaccttcagagatggattttttcacagagtatggcgaaggcagcaggtacaagatagaagaggtcataggcaaaggcagctacggcgtggtttgctctgccgtggacactcatactggcgaaaaggtcgctataaagaagataaacgacatcttcgagcatgtgtctgatgcgacgcggatactccgggagatcaagctgcttaggctcctgcggcatccggatattgtggaaataaagcatatcttgctccctccgtcgaggagggagttcagggatatatatgttgtctttgaactcatggagtctgatctgcaccaagttataaaggctaacgatgacttgaccccagagcattaccagtttttcttgtatcaattgcttcgaggattgaaatacatacatacagcaaatgtatttcatcgagatctcaaaccaaaaaatattctggcaaatgctgattgtaagctcaaaatatgtgactttggcttagcaagagtagctttcaatgatactccaaccgccatcttttggacggattatgttgcaactaggtggtaccgagcaccagagttgtgtggatctttcttctccaagtatacaccggcgatagatatatggagtattggctgtatatttgcagaattgttaactggaaaacctcttttcccggggaaaaatgtggtacatcaacttgatataattacagatctccttggaacaccttctcccgaagcaatatcaagggctcttgctgatccttatttcaagaatatagccagtgtggatagagagccttctgcacaggctgtcacaaagcttgaatttgaattcgagaggcggagagttacaaaggaagacataagggagcttatatatagggaaattcttgagtatcatccaaagatgctgagggagtttcttgagggaactgagtcaagtggtttcatgtacccaagtgcagtagatcattttaaaaagcagtttgcataccttgaagaacattatgccaagggatctacaggaactccacctgagaggcaacataattcattgccgcggccgtctgttgtctattccgacaaccgatcacaaaccacagccaacatcaccgaggatctttccaagtgtatgctcagagaaaatacacagaagacacatccatattctgcttctgttgcaagtaaatttccaccacatgttcctcaaggtgatgttgcaaggcctggtaaagcagttggttcggtgatgcagtacagcccatgtccagcgcctgctgccgagcgatatgagcaacgaagaatcgctaggcacccagcagttgccccaaacaatatcccttctggaagctcataccccagaagaagccagacctgcaagagtgagacaggtgatgccgaaagccatatggatgcgaaccaagctcggcagccaaagccatatgcagcgaacaaactacctgctaccgttgatagtcgtggtggtcactggtaggatttctgcggtgcaccagaaagccattccaaaccgtttcttaacatgttatcagtatcgattacttctgctgagtgctacattattctgacaaatccagaaatgtagttctgtacagatttgtgttctttttccggatacctgaataccgaaagactgtacaactgtagtttctgattcctactccttgtcgctattcaatcgctaaaggatctgtccctggtggagaagaaccggcagattcaatgcaatgttcttgactgacgtcatggattttgttcttcaacctggtagctctgaagacgaattgaatagctgctagtttctgctaatcatctacagtcaggtgcagagtgttctgggagctagttctgaatatcactgtcacgctgtaatctgcacgtttctgagctcctaacttctaagcatgccactaccgtatccctttgtaatttaatcagctgtaccatccagtactctgtttacatttgtagaaacgctctgcaaagaagctattatgtgggagtttctttgctattattataaatgttctgttgttataaatgttaagtttttgtttattataaacgttatgtcgttataagtagtttctttgcaaagtgttattaacggccggaaatgatatcatctataccaaaacaaatgcgattgtct

SEQ ID NO: 14003 - DNA, 2517 bp, Zea Mays
atctctctctctctctgtctcccaccacctatcttccctccccatgtgggcggcctcgagctctgcttaggtctcacagctgtgctctcgttggttgggtgatccgccccttgtcggctcctttcaactcgagagctccgggacagcgagatctgcgctgtcgccgccttacctttcttacgagctcgcgtgcaggcaggcactgagcagcaccttcagagatggattttttcacagagtatggcgaaggcagcaggtacaagatagaagaggtcataggcaaaggcagctacggcgtggtttgctctgccgtggacactcatactggcgaaaaggtcgctataaagaagataaacgacatcttcgagcatgtgtctgatgcgacgcggatactccgggagatcaagctgcttaggctcctgcggcatccggatattgtggaaataaagcatatcttgctccctccgtcgaggagggagttcagggatatatatgttgtctttgaactcatggagtctgatctgcaccaagttataaaggctaacgatgacttgaccccagagcattaccagtttttcttgtatcaattgcttcgaggattgaaatacatacatacagcaaatgtatttcatcgagatctcaaaccaaaaaatattctggcaaatgctgattgtaagctcaaaatatgtgactttggcttagcaagagtagctttcaatgatactccaaccgccatcttttggacggtggtaccgagcaccagagttgtgtggatctttcttctccaagtatacaccggcgatagatatatggagtattggctgtatatttgcagaattgttaactggaaaacctcttttcccggggaaaaatgtggtacatcaacttgatataattacagatctccttggaacaccttctcccgaagcaatatcaaggattcgtaatgaaaaggccaggcgctacttgagcagtatgaggcgaaaaaagcctataccgtttacgcaaaagttcccaaatgcagatccacttgcactatgtttgttagagcgaatgctcgcttttgagccaaaagacaggccaagtgctgaagaggctcttgctgatccttatttcaagaatatagccagtgtggatagagagccttctgcacaggctgtcacaaagcttgaatttgaattcgagaggcggagagttacaaaggaagacataagggagcttatatatagggaaattcttgagtatcatccaaagatgctgagggagtttcttgagggaactgagtcaagtggtttcatgtacccaagtgcagtagatcattttaaaaagcagtttgcataccttgaagaacattatgccaagggatctacaggaactccacctgagaggcaacataattcattgccgcggccgtctgttgtctattccgacaaccgatcacaaaccacagccaacatcaccgaggatctttccaagtgtatgctcagagaaaatacacagaagacacatccatattctgcttctgttgcaagtaaatttccaccacatgttcctcaaggtgatgttgcaaggcctggtaaagcagttggttcggtgatgcagtacagcccatgtccagcgcctgctgccgagcgatatgagcaacgaagaatcgctaggcacccagcagttgccccaaacaatatcccttctggaagctcataccccagaagaagccagacctgcaagagtgagacaggtgatgccgaaagccatatggatgcgaaccaagctcggcagccaaagccatatgcagcgaacaaactacctgctaccgttgatagtcgtggtggtcactggtaggatttctgcggtgcaccagaaagccattccaaaccgtttcttaacatgttatcagtatcgattacttctgctgagtgctacattattctgacaaatccagaaatgtagttctgtacagatttgtgttctttttccggatacctgaataccgaaagactgtacaactgtagtttctgattcctactccttgtcgctattcaatcgctaaaggatctgtccctggtggagaagaaccggcagattcaatgcaatgttcttgactgacgtcatggattttgttcttcaacctggtagctctgaagacgaattgaatagctgctagtttctgctaatcatctacagtcaggtgcagagtgttctgggagctagttctgaatatcactgtcacgctgtaatctgcacgtttctgagctcctaacttctaagcatgccactaccgtatccctttgtaatttaatcagctgtaccatccagtactctgtttacatttgtagaaacgctctgcaaagaagctattatgtgggagtttctttgctattattataaatgttctgttgttataaatgttaagtttttgtttattataaacgttatgtcgttataagtagtttctttgcaaagtgttattaacggccggaaatgatatcatctataccaaaacaaatgcgattgtct

SEQ ID NO: 14004 - DNA, 1975 bp, Zea Mays
attgagttcattcttatgacttatgctgagttttaaatgcagagaatctcacatacatggctttcataagcgtctgctttaatcgtttgacgtaatatcatgtggttttagatctaccattatagcatgttctttgttcataggaaggattgttgcatatttccttctcacctgttccatggccctgtatagtttgtgaaatatctggagcaccattgaacaaatatgtgttttttgttttttgtagtatacaccggcgatagatatatggagtattggctgtatatttgcagaattgttaactggaaaacctcttttcccggggaaaaatgtggtacatcaacttgatataattacagatctccttggaacaccttctcccgaagcaatatcaaggattcgtaatgaaaaggccaggcgctacttgagcagtatgaggcgaaaaaagcctataccgtttacgcaaaagttcccaaatgcagatccacttgcactatgtttgttagagcgaatgctcgcttttgagccaaaagacaggccaagtgctgaagaggctcttgctgatccttatttcaagaatatagccagtgtggatagagagccttctgcacaggctgtcacaaagcttgaatttgaattcgagaggcggagagttacaaaggaagacataagggagcttatatatagggaaattcttgagtatcatccaaagatgctgagggagtttcttgagggaactgagtcaagtggtttcatgtacccaagtgcagtagatcattttaaaaagcagtttgcataccttgaagaacattatgccaagggatctacaggaactccacctgagaggcaacataattcattgccgcggccgtctgttgtctattccgacaaccgatcacaaaccacagccaacatcaccgaggatctttccaagtgtatgctcagagaaaatacacagaagacacatccatattctgcttctgttgcaagtaaatttccaccacatgttcctcaaggtgatgttgcaaggcctggtaaagcagttggttcggtgatgcagtacagcccatgtccagcgcctgctgccgagcgatatgagcaacgaagaatcgctaggcacccagcagttgccccaaacaatatcccttctggaagctcataccccagaagaagccagacctgcaagagtgagacaggtgatgccgaaagccatatggatgcgaaccaagctcggcagccaaagccatatgcagcgaacaaactacctgctaccgttgatagtcgtggtggtcactggtaggatttctgcggtgcaccagaaagccattccaaaccgtttcttaacatgttatcagtatcgattacttctgctgagtgctacattattctgacaaatccagaaatgtagttctgtacagatttgtgttctttttccggatacctgaataccgaaagactgtacaactgtagtttctgattcctactccttgtcgctattcaatcgctaaaggatctgtccctggtggagaagaaccggcagattcaatgcaatgttcttgactgacgtcatggattttgttcttcaacctggtagctctgaagacgaattgaatagctgctagtttctgctaatcatctacagtcaggtgcagagtgttctgggagctagttctgaatatcactgtcacgctgtaatctgcacgtttctgagctcctaacttctaagcatgccactaccgtatccctttgtaatttaatcagctgtaccatccagtactctgtttacatttgtagaaacgctctgcaaagaagctattatgtgggagtttctttgctattattataaatgttctgttgttataaatgttaagtttttgtttattataaacgttatgtcgttataagtagtttctttgcaaagtgttattaacggccggaaatgatatcatctataccaaaacaaatgcgattgtct

SEQ ID NO: 14005 - DNA, 1966 bp, Zea Mays
agttcattcttatgacttatgctgagttttaaatgcagagaatctcacatacatggctttcataagcgtctgctttaatcgtttgacgtaatatcatgtggttttagatctaccattatagcatgttctttgttcataggaaggattgttgcatatttccttctcacctgttccatggccctgtatagtttgtgaaatatctggagcaccattgaacaaatatgtgttttttgttttttgtagtatacaccggcgatagatatatggagtattggctgtatatttgcagaattgttaactggaaaacctcttttcccggggaaaaatgtggtacatcaacttgatataattacagatctccttggaacaccttctcccgaagcaatatcaaggattcgtaatgaaaaggccaggcgctacttgagcagtatgaggcgaaaaaagcctataccgtttacgcaaaagttcccaaatgcagatccacttgcactatgtttgttagagcgaatgctcgcttttgagccaaaagacaggccaagtgctgaagaggctcttgctgatccttatttcaagaatatagccagtgtggatagagagccttctgcacaggctgtcacaaagcttgaatttgaattcgagaggcggagagttacaaaggaagacataagggagcttatatatagggaaattcttgagtatcatccaaagatgctgagggagtttcttgagggaactgagtcaagtggtttcatgtacccaagtagatcattttaaaaagcagtttgcataccttgaagaacattatgccaagggatctacaggaactccacctgagaggcaacataattcattgccgcggccgtctgttgtctattccgacaaccgatcacaaaccacagccaacatcaccgaggatctttccaagtgtatgctcagagaaaatacacagaagacacatccatattctgcttctgttgcaagtaaatttccaccacatgttcctcaaggtgatgttgcaaggcctggtaaagcagttggttcggtgatgcagtacagcccatgtccagcgcctgctgccgagcgatatgagcaacgaagaatcgctaggcacccagcagttgccccaaacaatatcccttctggaagctcataccccagaagaagccagacctgcaagagtgagacaggtgatgccgaaagccatatggatgcgaaccaagctcggcagccaaagccatatgcagcgaacaaactacctgctaccgttgatagtcgtggtggtcactggtaggatttctgcggtgcaccagaaagccattccaaaccgtttcttaacatgttatcagtatcgattacttctgctgagtgctacattattctgacaaatccagaaatgtagttctgtacagatttgtgttctttttccggatacctgaataccgaaagactgtacaactgtagtttctgattcctactccttgtcgctattcaatcgctaaaggatctgtccctggtggagaagaaccggcagattcaatgcaatgttcttgactgacgtcatggattttgttcttcaacctggtagctctgaagacgaattgaatagctgctagtttctgctaatcatctacagtcaggtgcagagtgttctgggagctagttctgaatatcactgtcacgctgtaatctgcacgtttctgagctcctaacttctaagcatgccactaccgtatccctttgtaatttaatcagctgtaccatccagtactctgtttacatttgtagaaacgctctgcaaagaagctattatgtgggagtttctttgctattattataaatgttctgttgttataaatgttaagtttttgtttattataaacgttatgtcgttataagtagtttctttgcaaagtgttattaacggccggaaatgatatcatctataccaaaacaaatgcgattgtct

SEQ ID NO: 14006 - DNA, 1225 bp, Zea Mays
taaatatagatatttattacataataaattgaacctaatactaaaagattcaccataaggcctataaatacttggtattgtgcttgcccttttctccatccatgtatgttggttcatacattaacttgttgtgtagttctcacccctcattacccatggaccccaacatcaattgtgcatggagtgcctttgaaatagatatggtgaagtcattcatcactagtcacaaaaccaacaatacctacacaaatggtgtagccaagaatcacaatgatattgttgatgagctccaagcaaggttcccatgcaaagagaagcaacaggaatttccttcgtggcctagaagtgtatggtcgtggtaactggaagaacatatctaagtacttcgtccccacaaggacgccaatacagatctgcagccatgcacaaaagtatttccataggaaagagggcaccacaagaaaacaacgatttagcatcaatgatatcgacctctatgacacagatccacgggtgcaaaagaactcttctagtttggaggctctcacctttggtcatactgcttacaacaacaaatattatgactttgagagacaaaatgttgtcttgaacaaactcacacatactagccagacgagcagtggccatgtagctacatggacaagaggtcaacacataatagccagttcatccatagatccaacaatggtgcagagtaactctcttggatgggaggcgctcaccttcactagcgatgctaacaacacaaacaactatgactttgattggcaacatgattctataaacaacctcagatgtgctaaccaagcgagcaataaccaagtggccacttggactagaggtcaacaaacaactagctcttctgcagctccaacgatggtgcagaatacttctcatagctgggatgtgctttccttcactggcaatgcttacaacacaaactactatggatttgatgaacaacaagttgccttaagcaatatcactagaggcaaccatggtgagcagcaaccaggtagttacctagacaagagatgagctatcaactagttcttctgtaattttaatgatggagagggttgagagtgaccatacaacttgtattggccatcaatagggaaggcttccttcataatcaatggacgaacatgtattatatttttactagttatctatgtttaagtatcaaaaggttcatttgaat

SEQ ID NO: 14007 - DNA, 1373 bp, Zea Mays
taaatatagatatttattacataataaattgaacctaatactaaaagattcaccataaggcctataaatacttggtattgtgcttgcccttttctccatccatgtatgttggttcatacattaacttgttgtgtagttctcacccctcattacccatggaccccaacatcaattgtgcatggagtgcctttgaaatagatatggtgaagtcattcatcactagtcacaaaaccaacaatacctacacaaatggtgtagccaagaatcacaatgatattgttgatgagctccaagcaaggttcccatgcaaagagaagcaacagacatgaacaacatggacatgtttcatggttatatactagacgatgtggaggtgatgaagatggtagaggaaccactgcacaagcagaatattgttcctaagaaaaagaggcaacacccagtgatagtttggacacaagatgagcacaagaatttccttcgtggcctagaagtgtatggtcgtggtaactggaagaacatatctaagtacttcgtccccacaaggacgccaatacagatctgcagccatgcacaaaagtatttccataggaaagagggcaccacaagaaaacaacgatttagcatcaatgatatcgacctctatgacacagatccacgggtgcaaaagaactcttctagtttggaggctctcacctttggtcatactgcttacaacaacaaatattatgactttgagagacaaaatgttgtcttgaacaaactcacacatactagccagacgagcagtggccatgtagctacatggacaagaggtcaacacataatagccagttcatccatagatccaacaatggtgcagagtaactctcttggatgggaggcgctcaccttcactagcgatgctaacaacacaaacaactatgactttgattggcaacatgattctataaacaacctcagatgtgctaaccaagcgagcaataaccaagtggccacttggactagaggtcaacaaacaactagctcttctgcagctccaacgatggtgcagaatacttctcatagctgggatgtgctttccttcactggcaatgcttacaacacaaactactatggatttgatgaacaacaagttgccttaagcaatatcactagaggcaaccatggtgagcagcaaccaggtagttacctagacaagagatgagctatcaactagttcttctgtaattttaatgatggagagggttgagagtgaccatacaacttgtattggccatcaatagggaaggcttccttcataatcaatggacgaacatgtattatatttttactagttatctatgtttaagtatcaaaaggttcatttgaat

SEQ ID NO: 14008 - DNA, 992 bp, Zea Mays
cagcgcaagtgttgtagtatactgaaccctcaaaaaactaactagctagcttagctaaccccggccgatggacatggacccaaggttcaacgtcgactggagtgccaacgagatcgagatggtgagatctctcatcgcttgtcacggcgccagcaacagcacgaacgacgacattgtggatgagctccaggcaatgttcccagggaaggataagcgccaggaatttcctgcgtggcctgcgtgtgtacgggcgcggcaattggaagaacatctccaaggacttcgtcaccactaagacgccggtgcaggtctccagccatgcacagaagtacttccggaggcaggagagcaccacaaggaagcagcgctacagcatcaacgacgtcggcctctacgatgctgagccatgggaggagcagcagcagcagcagcagaacagctcactgccggctttcactagcaccaacaataatgcttattacaacccatactgctatgcctttggtggtggccagcagcagctcgcatcatcccccttccagtgccatgccagtcaggcgagcagcagcagccagacagcagtcacctgggctgcaggaggtcagcagccaccgatttgctcttctgcagctccacccatgatggaggggggtggggctgaaatgtcatggaccacttattattagctagctactagcttggagattttgttcctaagctgttaaatctcgttgttgaagacaacatgtatggtagtttaaggccccgtttcaatctcacgggataaactttagcttccggctaaactttagctatatgaattgaagtgctaaagtttagtttcaattatcaccattaactctcatgtttagattacaaatggctaaaagtggctaaaaaaaagctgctaaagtttatctcacgggattgaaacagggcctaagtagtagtttcttcatttcaatgaactagtaacaattaatgtgttcccg

SEQ ID NO: 14009 - DNA, 4133 bp, Zea Mays
gtgaaattcccctttccccatttcgcgtccgcagccctcggtgctccgccccgctccgctcagctctcaccaccgccgccctatccgcgccgctcccgccctattccccaccgcagccggcccgattccgcgcccacccgcggcggattcgactcccagtcgcggatctggtccgtggcgcgacggggaggaacccgagcgcggttgcgacggcgtagagagcatagcccggcgaccgcgcggattccatcgacgacggccgtgcctagaaggagctctgtccagccgccagccaccgatccactccccgcatccttccgggcctggagaagacgtccgccgcaggaacccgtgtgtagcgagggacgtccaaaggccggcgcaagctcaaccacacacgagtaccacttcagcgcgacggcaacagcaaaggcgcaggtctgttcaaggtgtgtttggttcggttccaagatcactagactgaagtgacaaagttgtgttgcacgctgtgcttctaacaaatggaagcagctgctcttgctcgtagaactagagcagtggaagaactacggcgtttatctacagttgctgaatctgatgacacaccagaacagcgcctatctacagttgctaaatctgatggcatgccagcagaagagcaggaatgcgatcacttctccctgaggggttatgttgctatgcttcagaagaaggatccaaaactttgctctcctcatattttccatagccagccacaatatgatgagcaccatggttcgtccccacttttggtgtcaaagtatcgtcgatgggattgctcaaaatgtcttgaaagagtgaaagtttcaggccatcgacctacatctggaaatgtttctatcgagcaggatggaatgaatgatggctgctctatttcaattgttcggattttgcctaatagggttgatcccagaagaatgttttattgcaaacaacaatcatctcaagggaatgatcaattgaccctttcaaagaccgcccaagaatgcaattcaaaatgcagttctcctggcaacaaagcaattactgcgatgaatattccagtagctgaagaaaatgttctagaggcactcgttgaaagaagtgttccagcgacagaagatttacaggcctctcccaataatattgatgtctcagcaaatatcttgaatgttgtccccaaggatgccagcgatttacctgatgatgttcaaacgatatcaaccattgaagaaaatggcacaaaaaatccatgtagcccaaaacttcgtgtgatgccaaatgaagatgagagtaacatagttcaagatgttcctaattttgaccccaatgagtctaatgtttgtaaaccattatcttgccacaaaggcaaacaaatatctgggcacaaaagcagccaagtctgcaacaagggtccacgccgagcatcgttaaaaaggaaagttggatctgatggtaagaagaaaagggacaaatcaactgacctgcctgatatttcaggtctaaaattttgtcagagaaagccaaaaaagatgaggcttttatcagaactcatagatgctgaccaggtagggatttctgcaaatgccgttcaagtggaccgtactgacagtgttgatctttgtgagggtggtaaaagaaaaaggcaccttgaggttggaaaagataatgatactcctaatcagaaactggacaaaatccagtcaagagctgtcaagaacaaggcaaaacacacagcagtagacaaggtagacgatggaccctctctaatgaactggctgaagaacactcataagaaaattagaacagatagaaaagactcagaacacaagaatcttgattcctctgctatttcaagatcttacccagatatagttgcttctgatgatatgtatcatgattttataccctcagttggggatgtggatcaggtaaagttaccatctactaccagtgccaagcatgggaaggtaaatgcacagaatgacaacctggagcaaaatatgcagaaggtggatgaatccaggaacttgaaacagaggttcttctcaagtgaaaaatcaacgattttgctaaagcgaaaggtacagtccacttcagttgcccatgacgagaacattgagaacagtattataaagagagacatgctcaggccagatgatgtgcctcaaatgggacatgaaggctctgtccagagatgtttggcaaaggtttctcttgataaacagaagatccagaatgtgcctggcctccgcaagaagaatataccaaagaataagaagaaagtaagtcaggaggtgcatgagaaacagaatgtgatagatgacatccccatggacattgttgaacttctcgccagaaatcagcatgagagacacttgatgactcagactgacaccaattctttggaaaactgtcatgatcaacccaaggcaggtgaagttgattgtgctgaatctgcagccaaggattgtcccgtgaattcatcgaatgctaattttgagaaacctttggcattggaaagtaagcagaagtccttacaggatcatgcatcatccagtacacaggctacaaacgtgaatccgcaggatttacatactcagaagttgccacagtgtcctgcagcatccagcaccaaggttccaaatggtcctccttcagaatcgcaaacgcagaattcgcttcaggaacaaccgacacgattccacagggacgatgaagtcaccatcgcatgtacctcgcctatattttcaaactatcaacatattgctgaaacgcctgctcggagctggagggacagcagggaaaagaagctaatgtgggattctttcaagacagcttcaaggaatccaccatcaccaccaccgtcatatggttttcaattcggaaacaggcttcaagaagttgattcagctcccattcatgcatatggagctcaccagccagtaattgtggccgtagatcagccgagaagtgttccaagcacagcgttggctatggaggctggtaggctgtacgatcaaaggatccctggacagccaggcctttacccaaaagagcccatgcctgcaacacatctcctgaggctgatggactcatcaacagctccaggcttcacaaactaccaaagagctaataggcggcagatggagcttcaaacgcaagctctcggctcgcagtacacacagcatgagcattacaatgcgtcaccgagcacgtcatatggaagccaaccgctgacactggaagacttgtctcggcgtcatttccagcaagacttgcgcaggcctttacgccctcaccctcgtgtcggtgtgctcggttcattgctgcagcaggagatcgcaaactggtctgggaactgcgggccgcagtctgggtacagactaggtgattgtaaagggacaaggccgcctgatgccaacagagcaggaaactacgagaccttgagctcggcaggatggaacaccctgcagttgggttctgttagctctgctgccaatctggagtaccggtttccatggtatggtacgggtcagccttcgaccagtggcaatgggaggaccattcatccgttggataagctcgtgaggaaggatatctgtgtgactaacagaaacccagccgatttcactgtaattagtgacaagaacgagtacatgagaaccctttgaaagagagaaaggctttgtttaagcaatcatcattggtagagcgaggaaggctttgagcagcagctaccgggagccgggtgcagcctccagttttgttctgtgcaaatgttttatacataggcgaagaactaatgtcgggttgccatggaaaaccccaataaacttgtgtgttgtaggtagataggcagatgtacaagacaagcatgcgtggctgtggccatagtaatgtttttctttttctttttggttttgcctttttttttggtactcctgtcccagaataaactgcaatttctacaattcaaaatttatcccaaaagaatgggccgtataggtgtgagctatgtcatgtggttgagcaatgtgtaaggtggtcaactcgttatttttggtatagcatcagactgctctgatgaaagcttatttgaaagaagaatggcc

SEQ ID NO: 14010 - DNA, 4236 bp, Zea Mays
ccgctccgctcagctctcaccaccgccgccctatccgcgccgctcccgccctattccccaccgcagccggcccgattccgcgcccacccgcggcggattcgactcccagtcgcggatctggtccgtggcgcgacggggaggaacccgagcgcggttgcgacggcgtagagagcatagcccggcgaccgcgcggattccatcgacgacggccgtgcctagaaggagctctgtccagccgccagccaccgatccactccccgcatccttccgggcctggagaagacgtccgccgcaggaacccgtgtgtagcgagggacgtccaaaggccggcgcaagctcaaccacacacgagtaccacttcagcgcgacggcaacagcaaaggcgcaggtctgttcaaggtgtgtttggttcggttccaagatcactagactgaagtgacaaagttgtgttgcacgctgtgcttctaacaaatggaagcagctgctcttgctcgtagaactagagcagtggaagaactacggcgtttatctacagttgctgaatctgatgacacaccagaacagcgcctatctacagttgctaaatctgatggcatgccagcagaagagcaggaatgcgatcacttctccctgagtcatttgttgtatgcaagcgtgatacattggcactattgtgacaacaattgatcaacgtccaggggttatgttgctatgcttcagaagaaggatccaaaactttgctctcctcatattttccatagccagccacaatatgatgagcaccatggttcgtccccacttttggtgtcaaagtatcgtcgatgggattgctcaaaatgtcttgaaagagtgaaagtttcaggccatcgacctacatctggaaatgtttctatcgagcaggatggaatgaatgatggctgctctatttcaattgttcggattttgcctaatagggttgatcccagaagaatgttttattgcaaacaacaatcatctcaagggaatgatcaattgaccctttcaaagaccgcccaagaatgcaattcaaaatgcagttctcctggcaacaaagcaattactgcgatgaatattccagtagctgaagaaaatgttctagaggcactcgttgaaagaagtgttccagcgacagaagatttacaggcctctcccaataatattgatgtctcagcaaatatcttgaatgttgtccccaaggatgccagcgatttacctgatgatgttcaaacgatatcaaccattgaagaaaatggcacaaaaaatccatgtagcccaaaacttcgtgtgatgccaaatgaagatgagagtaacatagttcaagatgttcctaattttgaccccaatgagtctaatgtttgtaaaccattatcttgccacaaaggcaaacaaatatctgggcacaaaagcagccaagtctgcaacaagggtccacgccgagcatcgttaaaaaggaaagttggatctgatggtaagaagaaaagggacaaatcaactgacctgcctgatatttcaggtctaaaattttgtcagagaaagccaaaaaagatgaggcttttatcagaactcatagatgctgaccaggtagggatttctgcaaatgccgttcaagtggaccgtactgacagtgttgatctttgtgagggtggtaaaagaaaaaggcaccttgaggttggaaaagataatgatactcctaatcagaaactggacaaaatccagtcaagagctgtcaagaacaaggcaaaacacacagcagtagacaaggtagacgatggaccctctctaatgaactggctgaagaacactcataagaaaattagaacagatagaaaagactcagaacacaagaatcttgattcctctgctatttcaagatcttacccagatatagttgcttctgatgatatgtatcatgattttataccctcagttggggatgtggatcaggtaaagttaccatctactaccagtgccaagcatgggaaggtaaatgcacagaatgacaacctggagcaaaatatgcagaaggtggatgaatccaggaacttgaaacagaggttcttctcaagtgaaaaatcaacgattttgctaaagcgaaaggtacagtccacttcagttgcccatgacgagaacattgagaacagtattataaagagagacatgctcaggccagatgatgtgcctcaaatgggacatgaaggctctgtccagagatgtttggcaaaggtttctcttgataaacagaagatccagaatgtgcctggcctccgcaagaagaatataccaaagaataagaagaaagtaagtcaggaggtgcatgagaaacagaatgtgatagatgacatccccatggacattgttgaacttctcgccagaaatcagcatgagagacacttgatgactcagactgacaccaattctttggaaaactgtcatgatcaacccaaggcaggtgaagttgattgtgctgaatctgcagccaaggattgtcccgtgaattcatcgaatgctaattttgagaaacctttggcattggaaagtaagcagaagtccttacaggatcatgcatcatccagtacacaggctacaaacgtgaatccgcaggatttacatactcagaagttgccacagtgtcctgcagcatccagcaccaaggttccaaatggtcctccttcagaatcgcaaacgcagaattcgcttcaggttcacgcattaccagtaccacccatcgtacagtctttcaatgcgtacccttcaaaattacctgcccttgacatactggagtgtgcccaggaacaaccgacacgattccacagggacgatgaagtcaccatcgcatgtacctcgcctatattttcaaactatcaacatattgctgaaacgcctgctcggagctggagggacagcagggaaaagaagctaatgtgggattctttcaagacagcttcaaggaatccaccatcaccaccaccgtcatatggttttcaattcggaaacaggcttcaagaagttgattcagctcccattcatgcatatggagctcaccagccagtaattgtggccgtagatcagccgagaagtgttccaagcacagcgttggctatggaggctggtaggctgtacgatcaaaggatccctggacagccaggcctttacccaaaagagcccatgcctgcaacacatctcctgaggctgatggactcatcaacagctccaggcttcacaaactaccaaagagctaataggcggcagatggagcttcaaacgcaagctctcggctcgcagtacacacagcatgagcattacaatgcgtcaccgagcacgtcatatggaagccaaccgctgacactggaagacttgtctcggcgtcatttccagcaagacttgcgcaggcctttacgccctcaccctcgtgtcggtgtgctcggttcattgctgcagcaggagatcgcaaactggtctgggaactgcgggccgcagtctgggtacagactaggtgattgtaaagggacaaggccgcctgatgccaacagagcaggaaactacgagaccttgagctcggcaggatggaacaccctgcagttgggttctgttagctctgctgccaatctggagtaccggtttccatggtatggtacgggtcagccttcgaccagtggcaatgggaggaccattcatccgttggataagctcgtgaggaaggatatctgtgtgactaacagaaacccagccgatttcactgtaattagtgacaagaacgagtacatgagaaccctttgaaagagagaaaggctttgtttaagcaatcatcattggtagagcgaggaaggctttgagcagcagctaccgggagccgggtgcagcctccagttttgttctgtgcaaatgttttatacataggcgaagaactaatgtcgggttgccatggaaaaccccaataaacttgtgtgttgtaggtagataggcagatgtacaagacaagcatgcgtggctgtggccatagtaatgtttttctttttctttttggttttgcctttttttttggtactcctgtcccagaataaactgcaatttctacaattcaaaatttatcccaaaagaatgggccgtataggtgtgagctatgtcatgtggttgagcaatgtgtaaggtggtcaactcgttatttttggtatagcatcagactgctctgatgaaagcttatttgaaagaagaatggcc

SEQ ID NO: 14011 - DNA, 3680 bp, Zea Mays
atggaagcagctgctcttgctcgtagaactagagcagtggaagaactacggcgtttatctacagttgctgaatctgatgacacaccagaacagcgcctatctacagttgctaaatctgatggcatgccagcagaagagcaggaatgcgatcacttctccctgagaagaaggatccaaaactttgctctcctcatattttccatagccagccacaatatgatgagcaccatggttcgtccccacttttggtgtcaaagtatcgtcgatgggattgctcaaaatgtcttgaaagagtgaaagtttcaggccatcgacctacatctggaaatgtttctatcgagcaggatggaatgaatgatggctgctctatttcaattgttcggattttgcctaatagggttgatcccagaagaatgttttattgcaaacaacaatcatctcaagggaatgatcaattgaccctttcaaagaccgcccaagaatgcaattcaaaatgcagttctcctggcaacaaagcaattactgcgatgaatattccagtagctgaagaaaatgttctagaggcactcgttgaaagaagtgttccagcgacagaagatttacaggcctctcccaataatattgatgtctcagcaaatatcttgaatgttgtccccaaggatgccagcgatttacctgatgatgttcaaacgatatcaaccattgaagaaaatggcacaaaaaatccatgtagcccaaaacttcgtgtgatgccaaatgaagatgagagtaacatagttcaagatgttcctaattttgaccccaatgagtctaatgtttgtaaaccattatcttgccacaaaggcaaacaaatatctgggcacaaaagcagccaagtctgcaacaagggtccacgccgagcatcgttaaaaaggaaagttggatctgatggtaagaagaaaagggacaaatcaactgacctgcctgatatttcaggtctaaaattttgtcagagaaagccaaaaaagatgaggcttttatcagaactcatagatgctgaccaggtagggatttctgcaaatgccgttcaagtggaccgtactgacagtgttgatctttgtgagggtggtaaaagaaaaaggcaccttgaggttggaaaagataatgatactcctaatcagaaactggacaaaatccagtcaagagctgtcaagaacaaggcaaaacacacagcagtagacaaggtagacgatggaccctctctaatgaactggctgaagaacactcataagaaaattagaacagatagaaaagactcagaacacaagaatcttgattcctctgctatttcaagatcttacccagatatagttgcttctgatgatatgtatcatgattttataccctcagttggggatgtggatcaggtaaagttaccatctactaccagtgccaagcatgggaaggtaaatgcacagaatgacaacctggagcaaaatatgcagaaggtggatgaatccaggaacttgaaacagaggttcttctcaagtgaaaaatcaacgattttgctaaagcgaaaggtacagtccacttcagttgcccatgacgagaacattgagaacagtattataaagagagacatgctcaggccagatgatgtgcctcaaatgggacatgaaggctctgtccagagatgtttggcaaaggtttctcttgataaacagaagatccagaatgtgcctggcctccgcaagaagaatataccaaagaataagaagaaagtaagtcaggaggtgcatgagaaacagaatgtgatagatgacatccccatggacattgttgaacttctcgccagaaatcagcatgagagacacttgatgactcagactgacaccaattctttggaaaactgtcatgatcaacccaaggcaggtgaagttgattgtgctgaatctgcagccaaggattgtcccgtgaattcatcgaatgctaattttgagaaacctttggcattggaaagtaagcagaagtccttacaggatcatgcatcatccagtacacaggctacaaacgtgaatccgcaggatttacatactcagaagttgccacagtgtcctgcagcatccagcaccaaggttccaaatggtcctccttcagaatcgcaaacgcagaattcgcttcaggttcacgcattaccagtaccacccatcgtacagtctttcaatgcgtacccttcaaaattacctgcccttgacatactggagtgtgcccaggaacaaccgacacgattccacagggacgatgaagtcaccatcgcatgtacctcgcctatattttcaaactatcaacatattgctgaaacgcctgctcggagctggagggacagcagggaaaagaagctaatgtgggattctttcaagacagcttcaaggaatccaccatcaccaccaccgtcatatggttttcaattcggaaacaggcttcaagaagttgattcagctcccattcatgcatatggagctcaccagccagtaattgtggccgtagatcagccgagaagtgttccaagcacagcgttggctatggaggctggtaggctgtacgatcaaaggatccctggacagccaggcctttacccaaaagagcccatgcctgcaacacatctcctgaggctgatggactcatcaacagctccaggcttcacaaactaccaaagagctaataggcggcagatggagcttcaaacgcaagctctcggctcgcagtacacacagcatgagcattacaatgcgtcaccgagcacgtcatatggaagccaaccgctgacactggaagacttgtctcggcgtcatttccagcaagacttgcgcaggcctttacgccctcaccctcgtgtcggtgtgctcggttcattgctgcagcaggagatcgcaaactggtctgggaactgcgggccgcagtctgggtacagactaggtgattgtaaagggacaaggccgcctgatgccaacagagcaggaaactacgagaccttgagctcggcaggatggaacaccctgcagttgggttctgttagctctgctgccaatctggagtaccggtttccatggtatggtacgggtcagccttcgaccagtggcaatgggaggaccattcatccgttggataagctcgtgaggaaggatatctgtgtgactaacagaaacccagccgatttcactgtaattagtgacaagaacgagtacatgagaaccctttgaaagagagaaaggctttgtttaagcaatcatcattggtagagcgaggaaggctttgagcagcagctaccgggagccgggtgcagcctccagttttgttctgtgcaaatgttttatacataggcgaagaactaatgtcgggttgccatggaaaaccccaataaacttgtgtgttgtaggtagataggcagatgtacaagacaagcatgcgtggctgtggccatagtaatgtttttctttttctttttggttttgcctttttttttggtactcctgtcccagaataaactgcaatttctacaattcaaaatttatcccaaaagaatgggccgtataggtgtgagctatgtcatgtggttgagcaatgtgtaaggtggtcaactcgttatttttggtatagcatcagactgctctgatgaaagcttatttgaaagaagaatggcc

SEQ ID NO: 14012 - DNA, 1965 bp, Zea Mays
cttttttgcaattacaaaaatgacagatcaaacgtcaaaaacggtacgggtgggattagattttacttttcatccctaatatcaatattgttgtggccccactgcgtcagtgacccaccaagatcgcggaaaccctagcttctcaccataactcagcctcacctagcctccacactccttcccccgccgcctccttccgagacctccttaccgccggcttcccttccctccggacctccaccgcgtgcgcgtgaaggatagcggccgcggcgatggggaaggcgtccaagggctcacggaaggggaagaaggcgtggcgcgccaacatcggcaccgacgacattgacgattttttcgagaagcagacgcgcgatgcccacgcgggcaccgccgccatcccttctcttccttcggactcgctcttctttgtcgacaagcccgccacctccgcatctacttccgccgccggcgcctcggacacaaccaccaaagatattcctgtcaaaaggaagatcgagaagaagagggagaaggttctttatcatgagagtgtactgaagcggaatccgtttgtgcagccaatcccatcttctgtgccgggcaagaaggataagaagataaagaagaagaaattgcaggagacacagggagagaaaagtgttcctatggaaaatgattctgtagttaagaactttgacatctgggctgtggatggtaaaggtgattccaaggccaaaaagagatctactatatcagttattcctgctgttgaagttgagcctgcaggatgttcatttaatcccccattcgaagcgcatcaagattctcttgctcaagctgtagcagatgaaaaacgcaaagagtacatgaaagagctggggccaacacctgtaccactcatagttcctggtgaagctatagccgaagaagataaattttttcttgatgctggtgaaggagatgaagatgaagatgctgcagaaaatggagatcaggatgctgatacttccattggacaaaggaagaacacaacaaaaagagttacaagagtagaaatgaacagaagagctcgccggaaggagaggttaagagcagaagcgaaagcaaagaaaatggaaaatattttgaaagaaattgacagcttgccaaatataatggatgagatagctaaagaggacaaggaaaaggagaagaggcacaaacgtcgaactgtggttaaagaggagagacgtaaatcaggcccacctcgtctgggcagacacaaatttgagccagctcctgttcaagttctattgacagaagagattagtggctcacttagaaagctaaaggggtgttgtaatcttgcaagggatcgctacaagagcattgagaaacgtggaatacttgcaccaagcaagagaataaggtttgcttttgtttttccttcgaaagagttgactcaagcaaacgtcggtagagaaggcaagttccaatctgagggatgatatggtgaagctggattgaagaggatttactagatttgagaagaccctttggatgttcactgtcggaatgttcccctctttcagtgtcttgcgaaagtacctaacgattggttctgtcgttgtgggctcgttgttgacgctagtttcataggatctgggatgcactcatatacctgggctggtcttgatgcatgatggcgtatcgcttggtatgtatgttatccacacatgcgtattccaatccaaccccaataaaaattcggcaaaaaaaaaaacaaacgaataggaaagtcgcgtcgattcctagctattgtgtttatccctgtaatataatacatacgggaagtttattggaaaactcactatcattcaaataaacgtgaatgcagattcctaaactctatagcgtgcagaccctttaatcttcttcacaaatccagctagattatccaagaatctaatttcacacaaaaaaaaa

SEQ ID NO: 14013 - DNA, 1860 bp, Zea Mays
cttttttgcaattacaaaaatgacagatcaaacgtcaaaaacggtacgggtgggattagattttacttttcatccctaatatcaatattgttgtggccccactgcgtcagtgacccaccaagatcgcggaaaccctagcttctcaccataactcagcctcacctagcctccacactccttcccccgccgcctccttccgagacctccttaccgccggcttcccttccctccggacctccaccgcgtgcgcgtgaaggatagcggccgcggcgatggggaaggcgtccaagggctcacggaaggggaagaaggcgtggcgcgccaacatcggcaccgacgacattgacgattttttcgagaagcagacgcgcgatgcccacgcgggcaccgccgccatcccttctcttccttcggactcgctcttctttgtcgacaagcccgccacctccgcatctacttccgccgccggcgcctcggacacaaccaccaaagatattcctgtcaaaaggaagatcgagaagaagagggagaaggttctttatcatgagagtgtactgaagcggaatccgtttgtgcagccaatcccatcttctgtgccgggcaagaaggataagaagataaagaagaagaaattgcaggagacacagggagagaaaagtgttcctatggaaaatgattctgtagttaagaactttgacatctgggctgtggatggtaaaggtgattccaaggccaaaaagagatctactatatcagttattcctgctgttgaagttgagcctgcaggatgttcatttaatcccccattcgaagcgcatcaagattctcttgctcaagctgtagcagatgaaaaacgcaaagagtacatgaaagagctggggccaacacctgtaccactcatagttcctggtgaagctatagccgaagaagataaattttttcttgatgctggtgaaggagatgaagatgaagatgctgcagaaaatggagatcaggatgctgatacttccattggacaaaggaagaacacaacaaaaagagttacaagagtagaaatgaacagaagagctcgccggaaggagaggttaagagcagaagcgaaagcaaagaaaatggaaaatattttgaaagaaattgacagcttgccaaatataatggatgagatagctaaagaggacaaggaaaaggagaagaggcacaaacgtcgaactgtggttaaagaggagagacgtaaatcaggcccacctcgtctgggcagacacaagggtgttgtaatcttgcaagggatcgctacaagagcattgagaaacgtggaatacttgcaccaagcaagagaataagcaaacgtcggtagagaaggcaagttccaatctgagggatgatatggtgaagctggattgaagaggatttactagatttgagaagaccctttggatgttcactgtcggaatgttcccctctttcagtgtcttgcgaaagtacctaacgattggttctgtcgttgtgggctcgttgttgacgctagtttcataggatctgggatgcactcatatacctgggctggtcttgatgcatgatggcgtatcgcttggtatgtatgttatccacacatgcgtattccaatccaaccccaataaaaattcggcaaaaaaaaaaacaaacgaataggaaagtcgcgtcgattcctagctattgtgtttatccctgtaatataatacatacgggaagtttattggaaaactcactatcattcaaataaacgtgaatgcagattcctaaactctatagcgtgcagaccctttaatcttcttcacaaatccagctagattatccaagaatctaatttcacacaaaaaaaaa

SEQ ID NO: 14014 - DNA, 1744 bp, Zea Mays
cccactgcgtcagtgacccaccaagatcgcggaaaccctagcttctcaccataactcagcctcacctagcctccacactccttcccccgccgcctccttccgagacctccttaccgccggcttcccttccctccggacctccaccgcgtgcgcgtgaaggatagcggccgcggcgatggggaaggcgtccaagggctcacggaaggggaagaaggcgtggcgcgccaacatcggcaccgacgacattgacgattttttcgagaagcagacgcgcgatgcccacgcgggcaccgccgccatcccttctcttccttcggactcgctcttctttgtcgacaagcccgccacctccgcatctacttccgccgccggcgcctcggacacaaccaccaaagccaatcccatcttctgtgccgggcaagaaggataagaagataaagaagaagaaattgcaggagacacagggagagaaaagtgttcctatggaaaatgattctgtagttaagaactttgacatctgggctgtggatggtaaaggtgattccaaggccaaaaagagatctactatatcagttattcctgctgttgaagttgagcctgcaggatgttcatttaatcccccattcgaagcgcatcaagattctcttgctcaagctgtagcagatgaaaaacgcaaagagtacatgaaagagctggggccaacacctgtaccactcatagttcctggtgaagctatagccgaagaagataaattttttcttgatgctggtgaaggagatgaagatgaagatgctgcagaaaatggagatcaggatgctgatacttccattggacaaaggaagaacacaacaaaaagagttacaagagtagaaatgaacagaagagctcgccggaaggagaggttaagagcagaagcgaaagcaaagaaaatggaaaatattttgaaagaaattgacagcttgccaaatataatggatgagatagctaaagaggacaaggaaaaggagaagaggcacaaacgtcgaactgtggttaaagaggagagacgtaaatcaggcccacctcgtctgggcagacacaaatttgagccagctcctgttcaagttctattgacagaagagattagtggctcacttagaaagctaaaggggtgttgtaatcttgcaagggatcgctacaagagcattgagaaacgtggaatacttgcaccaagcaagagaataagcaaacgtcggtagagaaggcaagttccaatctgagggatgatatggtgaagctggattgaagaggatttactagatttgagaagaccctttggatgttcactgtcggaatgttcccctctttcagtgtcttgcgaaagtacctaacgattggttctgtcgttgtgggctcgttgttgacgctagtttcataggatctgggatgcactcatatacctgggctggtcttgatgcatgatggcgtatcgcttggtatgtatgttatccacacatgcgtattccaatccaaccccaataaaaattcggcaaaaaaaaaaacaaacgaataggaaagtcgcgtcgattcctagctattgtgtttatccctgtaatataatacatacgggaagtttattggaaaactcactatcattcaaataaacgtgaatgcagattcctaaactctatagcgtgcagaccctttaatcttcttcacaaatccagctagattatccaagaatctaatttcacacaaaaaaaaa

SEQ ID NO: 14015 - DNA, 1040 bp, Zea Mays
ctccatgtcgaggttgctgtttaaggacttaagggcagaaaggagaaattttttcttgatgctggtgaaggagatgaagatgaagatgctgcagaaaatggagatcaggatgctgatacttccattggacaaaggaagaacacaacaaaaagagttacaagagtagaaatgaacagaagagctcgccggaaggagaggttaagagcagaagcgaaagcaaagaaaatggaaaatattttgaaagaaattgacagcttgccaaatataatggatgagatagctaaagaggacaaggaaaaggagaagaggcacaaacgtcgaactgtggttaaagaggagagacgtaaatcaggcccacctcgtctgggcagacacaaatttgagccagctcctgttcaagttctattgacagaagagattagtggctcacttagaaagctaaaggggtgttgtaatcttgcaagggatcgctacaagagcattgagaaacgtggaatacttgcaccaagcaagagaataagcaaacgtcggtagagaaggcaagttccaatctgagggatgatatggtgaagctggattgaagaggatttactagatttgagaagaccctttggatgttcactgtcggaatgttcccctctttcagtgtcttgcgaaagtacctaacgattggttctgtcgttgtgggctcgttgttgacgctagtttcataggatctgggatgcactcatatacctgggctggtcttgatgcatgatggcgtatcgcttggtatgtatgttatccacacatgcgtattccaatccaaccccaataaaaattcggcaaaaaaaaaaacaaacgaataggaaagtcgcgtcgattcctagctattgtgtttatccctgtaatataatacatacgggaagtttattggaaaactcactatcattcaaataaacgtgaatgcagattcctaaactctatagcgtgcagaccctttaatcttcttcacaaatccagctagattatccaagaatctaatttcacacaaaaaaaaa

SEQ ID NO: 14016 - DNA, 1156 bp, Zea Mays
cgtcggcggcggcgcgggcgcccaaccagccatgtgggttctccggagcctcctccgggcagcctcgccgtcgctccgccacagctccgggcgcttcaccgcgaggggcgaggcgctgtccgcggccttgggctccgctccggcgcccgcggggctgctggcggtgagaccacgagccgaaggaggctggcggcgggcgatgtcgaccaagggtaggaccatgcggaccaaggtggagaagcggatggcgagggagaccggccgcacgcagcgggagctccgccgcgccgtcaagctcaggaagaagctcatgacggaggacgagaagttcatctacaacctgcgcagggccaagaaaaaagttgctttgcttctacagaagctcaagaagtatgagctaccagacttacaagctcctcgtcatgatcctgagctgttaacagctgagcaactacaagcatacaagaagattggattcagaaatagaaactatgtgcctgttggagttcgtggagtctttggaggtgttgttcaaaacatgcatatgcactggaaattccatgagacggtgcaagtttgttgtgacaatttcccaaaggaaaaaattaaggaaatggctgcaatgctgacaagattgagtggtggaatagtgatcaacattcataataccaaaacaatcatcatgtttcggggaagaaactaccgtcaaccaaagaaccttatacctttcaacacacttaccaaaaggaagaaactaaacatcaagaaaatagagacacaactccgtcgtaaggggatcaatccagaggacccagttgctatggccagcatccagcgtgttgcctctacgttcttccgagccatagatgagcagcaaggtactccctatattttccgcggggacgcacaagcttctgctgggactcctgaaataaaagaaccacgtgatgaaccatctgaagatagtgaccaggaggagcttgacaggttcatctcagagatagaaactgcagcagagaagcaatgggaggaagaagaggctgcagagaaagaagaatcttcaagaatgcgatattgggagagggaagatgtaggtgaccggagggatttcaatagaagttatgagaactcagattatgaggatagaggacaggaa

SEQ ID NO: 14017 - DNA, 1734 bp, Zea Mays
gtagctcgcagccgactctgttctctgtaccagcccaacccagaagcctatactcgttacgattacgagcccaccagcatctcctctgcacgggggcattccaccgagcacctcacgtgatctccaccccgcggcggcggcgcgagcaccgtctccgcctctccgctctccggcgaatcaaacccctccggcgttgcccctcggttgcctttcccctccgccacaatgcggtttgacctggatggcctgcccgtgcacttcccgtacgcggcgatctacccggagcagcacgcgtacatgggggagctcaagcgcgccctcgacgcgcgcgggcacgcgctgctcgagatgcccacgggcaccggcaagacggcggcgctcatctccctcatcacctcctactccctcgccaacccggcccgcccgctccgcctcatctattgcacccgcaccgtgcacgagatggagaagaccctcgccgagctccgcctcctcttcgcccacctcccgcccgcggcctcccgctccctcctcgcgctcggcctctcctcccgcaagaacctctgcatccacccgcaggcgtccgccgccgccgcccgggactccgtcgacaccgcctgccgccgccttacggcctcctgggtccgcgagaaggcctcctccgacccggactccaccccgctgtgcgagttctacgagacgttcgaccgggccgctgccgccggcgacctcgcctccttcatgccgcccggggtgtacaccctggcagacctccgcgcgctcggaagggagcgccgggtctgcccttacttccttgccaggcagatggtcaagtacgccaatgttgtggtgtacagctaccagtacctgctcgaccccaaggtggccagcattgtgtccagggagatgcagaaggagtgtgtggtcgtgttcgatgaggctcacaacattgacaatgtctgcatagaggcgctgagcgtcagcatccgcaagcagacgctggaaggcgcagagcgaaatctgcggcgcatctcgcaagagatcgacaggttcaaggccaccgatgccaataggcttcgtgctgaatacaacagactggtggatggactggcacagcgaggaaatctaccaatatcggatgcttggctcgcgaatccgtctttgcctgatgacatcttgaaggaagctgttcctggaaacataaggagggctgaacattttcttgctgtcttgcggaggcttgtgagattccttgatggccggcttgaaacagaaaatgttgagaatgaaatgccagtttcctttgttgcctcaatccattcccaggctggaatcgaccaaaaaatgctgaggttttgttatgaccggctacactccctaatgatgacattagagataactgatacagatgagttcatgcacatacagaccatatgtgactttgccacactgattggaacttatacacggggcttttctattataatagagccgtatgatgatagaatgcctgatattcgtgatcctgttattcagctgagttgccatgatgcttcactcgcaataagacctgtttttgatcgtttcgaaacggttgtgatcacttctggaactctcagcccaatagatctttaccctcgtctcttgaattttaatcctgtcataagcagaagcttcaccatgtccttaacaagagattgtatttgtcccatggtcttgacccgaggaaggatc

SEQ ID NO: 14018 - DNA, 3919 bp, Zea Mays
gtagctcgcagccgactctgttctctgtaccagcccaacccagaagcctatactcgttacgattacgagcccaccagcatctcctctgcacgggggcattccaccgagcacctcacgtgatctccaccccgcggcggcggcgcgagcaccgtctccgcctctccgctctccggcgaatcaaacccctccggcgttgcccctcggttgcctttcccctccgccacaatgcggtttgacctggatggcctgcccgtgcacttcccgtacgcggcgatctacccggagcagcacgcgtacatgggggagctcaagcgcgccctcgacgcgcgcgggcacgcgctgctcgagatgcccacgggcaccggcaagacggcggcgctcatctccctcatcacctcctactccctcgccaacccggcccgcccgctccgcctcatctattgcacccgcaccgtgcacgagatggagaagaccctcgccgagctccgcctcctcttcgcccacctcccgcccgcggcctcccgctccctcctcgcgctcggcctctcctcccgcaagaacctctgcatccacccgcaggcgtccgccgccgccgcccgggactccgtcgacaccgcctgccgccgccttacggcctcctgggtccgcgagaaggcctcctccgacccggactccaccccgctgtgcgagttctacgagacgttcgaccgggccgctgccgccggcgacctcgcctccttcatgccgcccggggtgtacaccctggcagacctccgcgcgctcggaagggagcgccgggtctgcccttacttccttgccaggcagatggtcaagtacgccaatgttgtggtgtacagctaccagtacctgctcgaccccaaggtggccagcattgtgtccagggagatgcagaaggagtgtgtggtcgtgttcgatgaggctcacaacattgacaatgtctgcatagaggcgctgagcgtcagcatccgcaagcagacgctggaaggcgcagagcgaaatctgcggcgcatctcgcaagagatcgacaggttcaaggccaccgatgccaataggcttcgtgctgaatacaacagactggtggatggactggcacagcgaggaaatctaccaatatcggatgcttggctcgcgaatccgtctttgcctgatgacatcttgaaggaagctgttcctggaaacataaggagggctgaacattttcttgctgtcttgcggaggcttgtgagattccttgatggccggcttgaaacagaaaatgttgagaatgaaatgccagtttcctttgttgcctcaatccattcccaggctggaatcgaccaaaaaatgctgaggttttgttatgaccggctacactccctaatgatgacattagagataactgatacagatgagttcatgcacatacagaccatatgtgactttgccacactgattggaacttatacacggggcttttctattataatagagccgtatgatgatagaatgcctgatattcgtgatcctgttattcagctgagttgccatgatgcttcactcgcaataagacctgtttttgatcgtttcgaaacggttgtgatcacttctggaactctcagcccaatagatctttaccctcgtctcttgaattttaatcctgtcataagcagaagcttcaccatgtccttaacaagagattgtatttgtcccatggtcttgacccgaggaaggtatgagctggtcccacgcgaacttcatatttcaaaatctactgtactgtagcatgacacttatgttaagcatggcacttatgttagtctttaaatgctagcattgtcaacatattcttaggtttggaaatgctaacactgtcttgcgtatacatgatacatttttattcctgagaatcatatgacacttatgttaagcttttataacatctttagttgtttccaacatttcatattactggtagcattgtacactgtgtaaacaccaaccattccatcatcttcagtgatcagctacctgtgagtacaaagttcgatatgcgtagtgatcctggtgttgtgaggaattatggccgcctcttgctggaaatggcttctgctgttccagatggcatagtttgcttttttgtcagttattcctatatggatggcattgtcaacagctggcacgaaatgggaattctgcaggttatttctttcacttgtaaatttctttctcatataaaccctacaattaatatagatatggcaatgagggatgtgtctaatcgtgtaacacctatgcaactcagctaagttcataaatcgtccatatctgttagataattgggcatgtcctctggaacatcatcggtttatagtaagtatatgaaatggtgtctaagcatctaattccatattgttgtctgttttagattttccattcaactatctatattgataataacttaataagactataagtctataagagtctcaagttgcattaagactcactcctgtagacactgtcaaattatttattacatcggcaacatgcataattgcatatggaactggataggctgctttaagtctttcctttggttctagatagatgctatctagtctttggacaaagaactacatctaccatatcttcggttttgttatctaaaggatatgctcggtattggtgctaatttttgttatccacaaagatatgctagtcatctgtgttatgaaaataaaatacctgtaaatgttatatagccaagataagatgtatatgcattagttccaataacgaaaacctggttttactgtttttcaggacatcatgcaacataaattagtgtttatcgaaacaccagatgtcgttgagacaacattggctcttgataactacagaaaggcatgtgattgtggaagaggtgccattttcttctctgttgccaggggcaaagttgctgaaggtattgattttgatcggcactatggcagattagttatcatgtttggtgttcctttccagtacacattgagtcggatattgcttgctaggttggagtacctgcgggaaacttttcagataaaggagggtgacttcctaacatttgatgctttgaggcaagcggcccaatgtgtcggtcgtgttattcgctccaaagctgattatgggatgatgatatttgctgacaagagatacagtcggcatgataaacggtccaagttgcctgggtggatactctcgcatttgcatgatgcgcacctaaatctgagcactgatatggctctccatatagctcgtgagtttctccggaggatggcacagccatatgacaaggcgggaagcggtggcaagaaaacgctgttaaccgaggaggatctggagaatttggcgcaggatggcatggcgatgtaaaaaaatgagggtactgttgtacatttctttttgtagccattttatggcggtagataacttgtttgaagcatcggtaatgacgtgtggggccaaatcattcttactcgagttcgcacggatttgatcatccgaacatcatggtcgatgttcttctgagtgggtgtgggtgtggggccaaatcatgtcagcgggccatctgcagctacgtatacagacgaggatccaaacataaccgagaggaaacatagatcatgcttctaatcaaagaaaaaaaatccgcactcgatgcgcaggtgacgcctcattacatggctgggattcatatcttggtaaaaaccgcaagggtctgttttagaagtgaattatttttatagcttgtattcaatatcaaggttttggataataccgttgtattttatgacattagatgtttggttgcaattctggaaaccaatttttaaaaccattgtattttctatatatcatggtatttttagagtattgg

SEQ ID NO: 14019 - DNA, 3632 bp, Zea Mays
gtagctcgcagccgactctgttctctgtaccagcccaacccagaagcctatactcgttacgattacgagcccaccagcatctcctctgcacgggggcattccaccgagcacctcacgtgatctccaccccgcggcggcggcgcgagcaccgtctccgcctctccgctctccggcgaatcaaacccctccggcgttgcccctcggttgcctttcccctccgccacaatgcggtttgacctggatggcctgcccgtgcacttcccgtacgcggcgatctacccggagcagcacgcgtacatgggggagctcaagcgcgccctcgacgcgcgcgggcacgcgctgctcgagatgcccacgggcaccggcaagacggcggcgctcatctccctcatcacctcctactccctcgccaacccggcccgcccgctccgcctcatctattgcacccgcaccgtgcacgagatggagaagaccctcgccgagctccgcctcctcttcgcccacctcccgcccgcggcctcccgctccctcctcgcgctcggcctctcctcccgcaagaacctctgcatccacccgcaggcgtccgccgccgccgcccgggactccgtcgacaccgcctgccgccgccttacggcctcctgggtccgcgagaaggcctcctccgacccggactccaccccgctgtgcgagttctacgagacgttcgaccgggccgctgccgccggcgacctcgcctccttcatgccgcccggggtgtacaccctggcagacctccgcgcgctcggaagggagcgccgggtctgcccttacttccttgccaggcagatggtcaagtacgccaatgttgtggtgtacagctaccagtacctgctcgaccccaaggtggccagcattgtgtccagggagatgcagaaggagtgtgtggtcgtgttcgatgaggctcacaacattgacaatgtctgcatagaggcgctgagcgtcagcatccgcaagcagacgctggaaggcgcagagcgaaatctgcggcgcatctcgcaagagatcgacaggttcaaggccaccgatgccaataggcttcgtgctgaatacaacagactggtggatggactggcacagcgaggaaatctaccaatatcggatgcttggctcgcgaatccgtctttgcctgatgacatcttgaaggaagctgttcctggaaacataaggagggctgaacattttcttgctgtcttgcggaggcttgtgagattccttgatggccggcttgaaacagaaaatgttgagaatgaaatgccagtttcctttgttgcctcaatccattcccaggctggaatcgaccaaaaaatgctgaggttttgttatgaccggctacactccctaatgatgacattagagataactgatacagatgagttcatgcacatacagaccatatgtgactttgccacactgattggaacttatacacggggcttttctattataatagagccgtatgatgatagaatgcctgatattcgtgatcctgttattcagctgagttgccatgatgcttcactcgcaataagacctgtttttgatcgtttcgaaacggttgtgatcacttctggaactctcagcccaatagatctttaccctcgtctcttgaattttaatcctgtcataagcagaagcttcaccatgtccttaacaagagattgtatttgtcccatggtcttgacccgaggaagtgatcagctacctgtgagtacaaagttcgatatgcgtagtgatcctggtgttgtgaggaattatggccgcctcttgctggaaatggcttctgctgttccagatggcatagtttgcttttttgtcagttattcctatatggatggcattgtcaacagctggcacgaaatgggaattctgcaggttatttctttcacttgtaaatttctttctcatataaaccctacaattaatatagatatggcaatgagggatgtgtctaatcgtgtaacacctatgcaactcagctaagttcataaatcgtccatatctgttagataattgggcatgtcctctggaacatcatcggtttatagtaagtatatgaaatggtgtctaagcatctaattccatattgttgtctgttttagattttccattcaactatctatattgataataacttaataagactataagtctataagagtctcaagttgcattaagactcactcctgtagacactgtcaaattatttattacatcggcaacatgcataattgcatatggaactggataggctgctttaagtctttcctttggttctagatagatgctatctagtctttggacaaagaactacatctaccatatcttcggttttgttatctaaaggatatgctcggtattggtgctaatttttgttatccacaaagatatgctagtcatctgtgttatgaaaataaaatacctgtaaatgttatatagccaagataagatgtatatgcattagttccaataacgaaaacctggttttactgtttttcaggacatcatgcaacataaattagtgtttatcgaaacaccagatgtcgttgagacaacattggctcttgataactacagaaaggcatgtgattgtggaagaggtgccattttcttctctgttgccaggggcaaagttgctgaaggtattgattttgatcggcactatggcagattagttatcatgtttggtgttcctttccagtacacattgagtcggatattgcttgctaggttggagtacctgcgggaaacttttcagataaaggagggtgacttcctaacatttgatgctttgaggcaagcggcccaatgtgtcggtcgtgttattcgctccaaagctgattatgggatgatgatatttgctgacaagagatacagtcggcatgataaacggtccaagttgcctgggtggatactctcgcatttgcatgatgcgcacctaaatctgagcactgatatggctctccatatagctcgtgagtttctccggaggatggcacagccatatgacaaggcgggaagcggtggcaagaaaacgctgttaaccgaggaggatctggagaatttggcgcaggatggcatggcgatgtaaaaaaatgagggtactgttgtacatttctttttgtagccattttatggcggtagataacttgtttgaagcatcggtaatgacgtgtggggccaaatcattcttactcgagttcgcacggatttgatcatccgaacatcatggtcgatgttcttctgagtgggtgtgggtgtggggccaaatcatgtcagcgggccatctgcagctacgtatacagacgaggatccaaacataaccgagaggaaacatagatcatgcttctaatcaaagaaaaaaaatccgcactcgatgcgcaggtgacgcctcattacatggctgggattcatatcttggtaaaaaccgcaagggtctgttttagaagtgaattatttttatagcttgtattcaatatcaaggttttggataataccgttgtattttatgacattagatgtttggttgcaattctggaaaccaatttttaaaaccattgtattttctatatatcatggtatttttagagtattgg

SEQ ID NO: 14020 - DNA, 3466 bp, Zea Mays
gtagctcgcagccgactctgttctctgtaccagcccaacccagaagcctatactcgttacgattacgagcccaccagcatctcctctgcacgggggcattccaccgagcacctcacgtgatctccaccccgcggcggcggcgcgagcaccgtctccgcctctccgctctccggcgaatcaaacccctccggcgttgcccctcggttgcctttcccctccgccacaatgcggtttgacctggatggcctgcccgtgcacttcccgtacgcggcgatctacccggagcagcacgcgtacatgggggagctcaagcgcgccctcgacgcgcgcgggcacgcgctgctcgagatgcccacgggcaccggcaagacggcggcgctcatctccctcatcacctcctactccctcgccaacccggcccgcccgctccgcctcatctattgcacccgcaccgtgcacgagatggagaagaccctcgccgagctccgcctcctcttcgcccacctcccgcccgcggcctcccgctccctcctcgcgctcggcctctcctcccgcaagaacctctgcatccacccgcaggcgtccgccgccgccgcccgggactccgtcgacaccgcctgccgccgccttacggcctcctgggtccgcgagaaggcctcctccgacccggactccaccccgctgtgcgagttctacgagacgttcgaccgggccgctgccgccggcgacctcgcctccttcatgccgcccggggtgtacaccctggcagacctccgcgcgctcggaagggagcgccgggtctgcccttacttccttgccaggcagatggtcaagtacgccaatgttgtggtgtacagctaccagtacctgctcgaccccaaggtggccagcattgtgtccagggagatgcagaaggagtgtgtggtcgtgttcgatgaggctcacaacattgacaatgtctgcatagaggcgctgagcgtcagcatccgcaagcagacgctggaaggcgcagagcgaaatctgcggcgcatctcgcaagagatcgacaggttcaaggccaccgatgccaataggcttcgtgctgaatacaacagactggtggatggactggcacagcgaggaaatctaccaatatcggatgcttggctcgcgaatccgtctttgcctgatgacatcttgaaggaagctgttcctggaaacataaggagggctgaacattttcttgctgtcttgcggaggcttgtgagattccttgatggccggcttgaaacagaaaatgttgagaatgaaatgccagtttcctttgttgcctcaatccattcccaggctggaatcgaccaaaaaatgctgaggttttgttatgaccggctacactccctaatgatgacattagagataactgatacagatgagttcatgcacatacagaccatatgtgactttgccacactgattggaacttatacacggggcttttctattataatagagccgtatgatgatagaatgcctgatattcgtgatcctgttattcagctgagttgccatgatgcttcactcgcaataagacctgtttttgatcgtttcgaaacggttgtgatcacttctggaactctcagcccaatagatctttaccctcgtctcttgaattttaatcctgtcataagcagaagcttcaccatgtccttaacaagagattgtatttgtcccatggtcttgacccgaggaaggtatgagctggtcccacgcgaacttcatatttcaaaatctactgtactgtagcatgacacttatgttaagcatggcacttatgttagtctttaaatgctagcattgtcaacatattcttaggtttggaaatgctaacactgtcttgcgtatacatgatacatttttattcctgagaatcatatgacacttatgttaagcttttataacatctttagttgtttccaacatttcatattactggtagcattgtacactgtgtaaacaccaaccattccatcatcttcagtgatcagctacctgtgagtacaaagttcgatatgcgtagtgatcctggtgttgtgaggaattatggccgcctcttgctggaaatggcttctgctgttccagatggcatagtttgcttttttgtcagttattcctatatggatggcattgtcaacagctggcacgaaatgggaattctgcaggttatttctttcacttgtaaatttctttctcatataaaccctacaattaatatagatatggcaatgagggatgtgtctaatcgtgtaacacctatgcaactcagctaagttcataaatcgtccatatctgttagataattgggcatgtcctctggaacatcatcggtttatagacatcatgcaacataaattagtgtttatcgaaacaccagatgtcgttgagacaacattggctcttgataactacagaaaggcatgtgattgtggaagaggtgccattttcttctctgttgccaggggcaaagttgctgaaggtattgattttgatcggcactatggcagattagttatcatgtttggtgttcctttccagtacacattgagtcggatattgcttgctaggttggagtacctgcgggaaacttttcagataaaggagggtgacttcctaacatttgatgctttgaggcaagcggcccaatgtgtcggtcgtgttattcgctccaaagctgattatgggatgatgatatttgctgacaagagatacagtcggcatgataaacggtccaagttgcctgggtggatactctcgcatttgcatgatgcgcacctaaatctgagcactgatatggctctccatatagctcgtgagtttctccggaggatggcacagccatatgacaaggcgggaagcggtggcaagaaaacgctgttaaccgaggaggatctggagaatttggcgcaggatggcatggcgatgtaaaaaaatgagggtactgttgtacatttctttttgtagccattttatggcggtagataacttgtttgaagcatcggtaatgacgtgtggggccaaatcattcttactcgagttcgcacggatttgatcatccgaacatcatggtcgatgttcttctgagtgggtgtgggtgtggggccaaatcatgtcagcgggccatctgcagctacgtatacagacgaggatccaaacataaccgagaggaaacatagatcatgcttctaatcaaagaaaaaaaatccgcactcgatgcgcaggtgacgcctcattacatggctgggattcatatcttggtaaaaaccgcaagggtctgttttagaagtgaattatttttatagcttgtattcaatatcaaggttttggataataccgttgtattttatgacattagatgtttggttgcaattctggaaaccaatttttaaaaccattgtattttctatatatcatggtatttttagagtattgg

SEQ ID NO: 14021 - DNA, 3819 bp, Zea Mays
gtagctcgcagccgactctgttctctgtaccagcccaacccagaagcctatactcgttacgattacgagcccaccagcatctcctctgcacgggggcattccaccgagcacctcacgtgatctccaccccgcggcggcggcgcgagcaccgtctccgcctctccgctctccggcgaatcaaacccctccggcgttgcccctcggttgcctttcccctccgccacaatgcggtttgacctggatggcctgcccgtgcacttcccgtacgcggcgatctacccggagcagcacgcgtacatgggggagctcaagcgcgccctcgacgcgcgcgggcacgcgctgctcgagatgcccacgggcaccggcaagacggcggcgctcatctccctcatcacctcctactccctcgccaacccggcccgcccgctccgcctcatctattgcacccgcaccgtgcacgagatggagaagaccctcgccgagctccgcctcctcttcgcccacctcccgcccgcggcctcccgctccctcctcgcgctcggcctctcctcccgcaagaacctctgcatccacccgcaggcgtccgccgccgccgcccgggactccgtcgacaccgcctgccgccgccttacggcctcctgggtccgcgagaaggcctcctccgacccggactccaccccgctgtgcgagttctacgagacgttcgaccgggccgctgccgccggcgacctcgcctccttcatgccgcccggggtgtacaccctggcagacctccgcgcgctcggaagggagcgccgggtctgcccttacttccttgccaggcagatggtcaagtacgccaatgttgtggtgtacagctaccagtacctgctcgaccccaaggtggccagcattgtgtccagggagatgcagaaggagtgtgtggtcgtgttcgatgaggctcacaacattgacaatgtctgcatagaggcgctgagcgtcagcatccgcaagcagacgctggaaggcgcagagcgaaatctgcggcgcatctcgcaagagatcgacaggaaggttcaaggccaccgatgccaataggcttcgtgctgaatacaacagactggtggatggactggcacagcgaggaaatctaccaatatcggatgcttggctcgcgaatccgtctttgcctgatgacatcttgaaggaagctgttcctggaaacataaggagggctgaacattttcttgctgtcttgcggaggcttgtgagattccttgatggccggcttgaaacagaaaatgttgagaatgaaatgccagtttcctttgttgcctcaatccattcccaggctggaatcgaccaaaaaatgctgaggttttgttatgaccggctacactccctaatgatgacattagagataactgatacagatgagttcatgcacatacagaccatatgtgactttgccacactgattggaacttatacacggggcttttctattataatagagccgtatgatgatagaatgcctgatattcgtgatcctgttattcagctgagttgccatgatgcttcactcgcaataagacctgtttttgatcgtttcgaaacggttgtgatcacttctggaactctcagcccaatagatctttaccctcgtctcttgaattttaatcctgtcataagcagaagcttcaccatgtccttaacaagagattgtatttgtcccatggtcttgacccgaggaaggtatgagctggtcccacgcgaacttcatatttcaaaatctactgtactgtagcatgacacttatgttaagcatggcacttatgttagtctttaaatgctagcattgtcaacatattcttaggtttggaaatgctaacactgtcttgcgtatacatgatacatttttattcctgagaatcatatgacacttatgttaagcttttataacatctttagttgtttccaacatttcatattactggtagcattgtacactgtgtaaacaccaaccattccatcatcttcagtgatcagctacctgtgagtacaaagttcgatatgcgtagtgatcctggtgttgtgaggaattatggccgcctcttgctggaaatggcttctgctgttccagatggcatagtttgcttttttgtcagttattcctatatggatggcattgtcaacagctggcacgaaatgggaattctgcagctaagttcataaatcgtccatatctgttagataattgggcatgtcctctggaacatcatcggtttatagtaagtatatgaaatggtgtctaagcatctaattccatattgttgtctgttttagattttccattcaactatctatattgataataacttaataagactataagtctataagagtctcaagttgcattaagactcactcctgtagacactgtcaaattatttattacatcggcaacatgcataattgcatatggaactggataggctgctttaagtctttcctttggttctagatagatgctatctagtctttggacaaagaactacatctaccatatcttcggttttgttatctaaaggatatgctcggtattggtgctaatttttgttatccacaaagatatgctagtcatctgtgttatgaaaataaaatacctgtaaatgttatatagccaagataagatgtatatgcattagttccaataacgaaaacctggttttactgtttttcaggacatcatgcaacataaattagtgtttatcgaaacaccagatgtcgttgagacaacattggctcttgataactacagaaaggcatgtgattgtggaagaggtgccattttcttctctgttgccaggggcaaagttgctgaaggtattgattttgatcggcactatggcagattagttatcatgtttggtgttcctttccagtacacattgagtcggatattgcttgctaggttggagtacctgcgggaaacttttcagataaaggagggtgacttcctaacatttgatgctttgaggcaagcggcccaatgtgtcggtcgtgttattcgctccaaagctgattatgggatgatgatatttgctgacaagagatacagtcggcatgataaacggtccaagttgcctgggtggatactctcgcatttgcatgatgcgcacctaaatctgagcactgatatggctctccatatagctcgtgagtttctccggaggatggcacagccatatgacaaggcgggaagcggtggcaagaaaacgctgttaaccgaggaggatctggagaatttggcgcaggatggcatggcgatgtaaaaaaatgagggtactgttgtacatttctttttgtagccattttatggcggtagataacttgtttgaagcatcggtaatgacgtgtggggccaaatcattcttactcgagttcgcacggatttgatcatccgaacatcatggtcgatgttcttctgagtgggtgtgggtgtggggccaaatcatgtcagcgggccatctgcagctacgtatacagacgaggatccaaacataaccgagaggaaacatagatcatgcttctaatcaaagaaaaaaaatccgcactcgatgcgcaggtgacgcctcattacatggctgggattcatatcttggtaaaaaccgcaagggtctgttttagaagtgaattatttttatagcttgtattcaatatcaaggttttggataataccgttgtattttatgacattagatgtttggttgcaattctggaaaccaatttttaaaaccattgtattttctatatatcatggtatttttagagtattgg

SEQ ID NO: 14022 - DNA, 3218 bp, Zea Mays
gtagctcgcagccgactctgttctctgtaccagcccaacccagaagcctatactcgttacgattacgagcccaccagcatctcctctgcacgggggcattccaccgagcacctcacgtgatctccaccccgcggcggcggcgcgagcaccgtctccgcctctccgctctccggcgaatcaaacccctccggcgttgcccctcggttgcctttcccctccgccacaatgcggtttgacctggatggcctgcccgtgcacttcccgtacgcggcgatctacccggagcagcacgcgtacatgggggagctcaagcgcgccctcgacgcgcgcgggcacgcgctgctcgagatgcccacgggcaccggcaagacggcggcgctcatctccctcatcacctcctactccctcgccaacccggcccgcccgctccgcctcatctattgcacccgcaccgtgcacgagatggagaagaccctcgccgagctccgcctcctcttcgcccacctcccgcccgcggcctcccgctccctcctcgcgctcggcctctcctcccgcaagaacctctgcatccacccgcaggcgtccgccgccgccgcccgggactccgtcgacaccgcctgccgccgccttacggcctcctgggtccgcgagaaggcctcctccgacccggactccaccccgctgtgcgagttctacgagacgttcgaccgggccgctgccgccggcgacctcgcctccttcatgccgcccggggtgtacaccctggcagacctccgcgcgctcggaagggagcgccgggtctgcccttacttccttgccaggcagatggtcaagtacgccaatgttgtggtgtacagctaccagtacctgctcgaccccaaggtggccagcattgtgtccagggagatgcagaaggagtgtgtggtcgtgttcgatgaggctcacaacattgacaatgtctgcatagaggcgctgagcgtcagcatccgcaagcagacgctggaaggcgcagagcgaaatctgcggcgcatctcgcaagagatcgacaggttcaaggccaccgatgccaataggcttcgtgctgaatacaacagactggtggatggactggcacagcgaggaaatctaccaatatcggatgcttggctcgcgaatccgtctttgcctgatgacatcttgaaggaagctgttcctggaaacataaggagggctgaacattttcttgctgtcttgcggaggcttgtgagattccttgatggccggcttgaaacagaaaatgttgagaatgaaatgccagtttcctttgttgcctcaatccattcccaggctggaatcgaccaaaaaatgctgagaccatatgtgactttgccacactgattggaacttatacacggggcttttctattataatagagccgtatgatgatagaatgcctgatattcgtgatcctgttattcagctgagttgccatgatgcttcactcgcaataagacctgtttttgatcgtttcgaaacggttgtgatcacttctggaactctcagcccaatagatctttaccctcgtctcttgaattttaatcctgtcataagcagaagcttcaccatgtccttaacaagagattgtatttgtcccatggtcttgacccgaggaaggtatgagctggtcccacgcgaacttcatatttcaaaatctactgtactgtagcatgacacttatgttaagcatggcacttatgttagtctttaaatgctagcattgtcaacatattcttaggtttggaaatgctaacactgtcttgcgtatacatgatacatttttattcctgagaatcatatgacacttatgttaagcttttataacatctttagttgtttccaacatttcatattactggtagcattgtacactgtgtaaacaccaaccattccatcatcttcagtgatcagctacctgtgagtacaaagttcgatatgcgtagtgatcctggtgttgtgaggaattatggccgcctcttgctggaaatggcttctgctgttccagatggcatagtttgcttttttgtcagttattcctatatggatggcattgtcaacagctggcacgaaatgggaattctgcaggacatcatgcaacataaattagtgtttatcgaaacaccagatgtcgttgagacaacattggctcttgataactacagaaaggcatgtgattgtggaagaggtgccattttcttctctgttgccaggggcaaagttgctgaaggtattgattttgatcggcactatggcagattagttatcatgtttggtgttcctttccagtacacattgagtcggatattgcttgctaggttggagtacctgcgggaaacttttcagataaaggagggtgacttcctaacatttgatgctttgaggcaagcggcccaatgtgtcggtcgtgttattcgctccaaagctgattatgggatgatgatatttgctgacaagagatacagtcggcatgataaacggtccaagttgcctgggtggatactctcgcatttgcatgatgcgcacctaaatctgagcactgatatggctctccatatagctcgtgagtttctccggaggatggcacagccatatgacaaggcgggaagcggtggcaagaaaacgctgttaaccgaggaggatctggagaatttggcgcaggatggcatggcgatgtaaaaaaatgagggtactgttgtacatttctttttgtagccattttatggcggtagataacttgtttgaagcatcggtaatgacgtgtggggccaaatcattcttactcgagttcgcacggatttgatcatccgaacatcatggtcgatgttcttctgagtgggtgtgggtgtggggccaaatcatgtcagcgggccatctgcagctacgtatacagacgaggatccaaacataaccgagaggaaacatagatcatgcttctaatcaaagaaaaaaaatccgcactcgatgcgcaggtgacgcctcattacatggctgggattcatatcttggtaaaaaccgcaagggtctgttttagaagtgaattatttttatagcttgtattcaatatcaaggttttggataataccgttgtattttatgacattagatgtttggttgcaattctggaaaccaatttttaaaaccattgtattttctatatatcatggtatttttagagtattgg

SEQ ID NO: 14023 - DNA, 3011 bp, Zea Mays
gtagctcgcagccgactctgttctctgtaccagcccaacccagaagcctatactcgttacgattacgagcccaccagcatctcctctgcacgggggcattccaccgagcacctcacgtgatctccaccccgcggcggcggcgcgagcaccgtctccgcctctccgctctccggcgaatcaaacccctccggcgttgcccctcggttgcctttcccctccgccacaatgcggtttgacctggatggcctgcccgtgcacttcccgtacgcggcgatctacccggagcagcacgcgtacatgggggagctcaagcgcgccctcgacgcgcgcgggcacgcgctgctcgagatgcccacgggcaccggcaagacggcggcgctcatctccctcatcacctcctactccctcgccaacccggcccgcccgctccgcctcatctattgcacccgcaccgtgcacgagatggagaagaccctcgccgagctccgcctcctcttcgcccacctcccgcccgcggcctcccgctccctcctcgcgctcggcctctcctcccgcaagaacctctgcatccacccgcaggcgtccgccgccgccgcccgggactccgtcgacaccgcctgccgccgccttacggcctcctgggtccgcgagaaggcctcctccgacccggactccaccccgctgtgcgagttctacgagacgttcgaccgggccgctgccgccggcgacctcgcctccttcatgccgcccggggtgtacaccctggcagacctccgcgcgctcggaagggagcgccgggtctgcccttacttccttgccaggcagatggtcaagtacgccaatgttgtggtgtacagctaccagtacctgctcgaccccaaggtggccagcattgtgtccagggagatgcagaaggagtgtgtggtcgtgttcgatgaggctcacaacattgacaatgtctgcatagaggcgctgagcgtcagcatccgcaagcagacgctggaaggcgcagagcgaaatctgcggcgcatctcgcaagagatcgacaggaaggttcaaggccaccgatgccaataggcttcgtgctgaatacaacagactggtggatggactggcacagcgaggaaatctaccaatatcggatgcttggctcgcgaatccgtctttgcctgatgacatcttgaaggaagctgttcctggaaacataaggagggctgaacattttcttgctgtcttgcggaggcttgtgagattccttgatggccggcttgaaacagaaaatgttgagaatgaaatgccagtttcctttgttgcctcaatccattcccaggctggaatcgaccaaaaaatgctgaggttttgttatgaccggctacactccctaatgatgacattagagataactgatacagatgagttcatgcacatacagaccatatgtgactttgccacactgattggaacttatacacggggcttttctattataatagagccgtatgatgatagaatgcctgatattcgtgatcctgttattcagctgagttgccatgatgcttcactcgcaataagacctgtttttgatcgtttcgaaacggttgtgatcacttctggaactctcagcccaatagatctttaccctcgtctcttgaattttaatcctgtcataagcagaagcttcaccatgtccttaacaagagattgtatttgtcccatggtcttgacccgaggaagtgatcagctacctgtgagtacaaagttcgatatgcgtagtgatcctggtgttgtgaggaattatggccgcctcttgctggaaatggcttctgctgttccagatggcatagtttgcttttttgtcagttattcctatatggatggcattgtcaacagctggcacgaaatgggaattctgcaggacatcatgcaacataaattagtgtttatcgaaacaccagatgtcgttgagacaacattggctcttgataactacagaaaggcatgtgattgtggaagaggtgccattttcttctctgttgccaggggcaaagttgctgaaggtattgattttgatcggcactatggcagattagttatcatgtttggtgttcctttccagtacacattgagtcggatattgcttgctaggttggagtacctgcgggaaacttttcagataaaggagggtgacttcctaacatttgatgctttgaggcaagcggcccaatgtgtcggtcgtgttattcgctccaaagctgattatgggatgatgatatttgctgacaagagatacagtcggcatgataaacggtccaagttgcctgggtggatactctcgcatttgcatgatgcgcacctaaatctgagcactgatatggctctccatatagctcgtgagtttctccggaggatggcacagccatatgacaaggcgggaagcggtggcaagaaaacgctgttaaccgaggaggatctggagaatttggcgcaggatggcatggcgatgtaaaaaaatgagggtactgttgtacatttctttttgtagccattttatggcggtagataacttgtttgaagcatcggtaatgacgtgtggggccaaatcattcttactcgagttcgcacggatttgatcatccgaacatcatggtcgatgttcttctgagtgggtgtgggtgtggggccaaatcatgtcagcgggccatctgcagctacgtatacagacgaggatccaaacataaccgagaggaaacatagatcatgcttctaatcaaagaaaaaaaatccgcactcgatgcgcaggtgacgcctcattacatggctgggattcatatcttggtaaaaaccgcaagggtctgttttagaagtgaattatttttatagcttgtattcaatatcaaggttttggataataccgttgtattttatgacattagatgtttggttgcaattctggaaaccaatttttaaaaccattgtattttctatatatcatggtatttttagagtattgg

SEQ ID NO: 14024 - DNA, 2041 bp, Zea Mays
agactgtcaataagtttgatccccccccccttctcaccaaaaatatgcgtaaatatataccattcatttcggaacgaagagccgttagtacagtgaaggtgccatgggatctgatatatatattctccccacttggtgtaatctagtttgccgttggatattttgatatgataacggaaagcgctaagcagcagcggccagcatttgttctttgcccacttccctccctccaggctccagtccggtcctgatctctgtccagctagctagctagcgcctccagccgtccagccagcggcggcgcgacgattcttccctccccggccggaagcccccgcacgccgccgcccctgcagagatggataggctcgacggctctgcccgcctcctgctcgtctctgatctggaccagacgatgatcgaccatgatgaccgggagaacctgtcgttgctgaggtttgaggcgctgtgggaggcggagttcgcccaggactctctgctggtcttctccacggggaggacgccggtgagctacaagggcttgcggagggacaagcctctggtgacgccggacgtgaccatcatgtccgtggggaccgtgatagcgtacggcgaggagatggtccgtgacgtcggctgggaggagcggctggacagcgactgggacagggccgtcgtcgtggaggagacggctaggctgccccagttgacgcgcatgcagccggagaggaaccagggtccccataaggtgagcttcttcgtcgacaagcagggtgctcaggaagtgatggactatctccccaagaagctggagagacgtggggtggatgtgaagatagtctacagcagcgggaacgccctggacgtgttgccacgaggtgcaggcaaggggcaggcgctggtgtacctgctcaagaaactggattccaacgggaagccgcccaagaacaccctcgtctgtggcgactccggaaacgacgccgagctattcggtgtgccgtctgtacatggagtcatggtctgcaacgcccaagaggagctggtccagtggtaccaagagaacgcgagggacaatcctaggatcatccaggcgaccgagagatgcgctgccgggatcatgcaggccatcgggcacttggggctagggcccaacgtctctgcgagagaccttgttgggttccctgcttattatcccaacaacaacaagaagggggcagctgccaccgctaagcccgcagatgtggtggtgaggttctacgtcctctacgagaagtggcggaggggggagctccccagttcgaattatttttcttcttcgtcagccatgcgctacttgaaaagcatcactcatccgaacggtacaatcattcacccttgtggatcggagcgttctcttcacgcgtctgttgacgctctgctgagttcttgctacggggacaagaagaacttccgggtgtgggtggacaggctggtgacatcgcccatcggcacaagcagctggttggcgaggttcgatagctgggagatggaaggtggcgttcggtactgctgccgcactactattctgctcaacatcaagcctgagagtccagagggcctcgagctcacacacatccacaagacctgggtccaagggcactctgcagggccagggagtgcgctcgtcttctagactaaatcagtcaaacgcgaagcagcatgtcttgttcaattaatttccagagagaaagaatccatccaaatgtacgacagacagacagacagacagacagacatgcccaatgctgggtacttccatattccatatgtacaacaaaacaaaacaaaagatgtcccgatgctgggtacttctcatgaattattagctgaagctcttgtcttggatttttcatatttgcagaatgtagtttccagtgtggcccaatgccatcattcagaatgctagctgaaaagttagcgctgttatttgtacttcacaagaaaggaaaagagatacattttaggtttcaatattttgtcttaaatttgttgtctgttcttt

SEQ ID NO: 14025 - DNA, 2276 bp, Zea Mays
atgtgggttctccggagcctcctccgggcagcctcgccgtcgctccgccacagctccgggcgcttcaccgcgaggggcgaggcgctgtccgcggccttgggctccgctccggcgcccgcggggctgctggcggtgagaccacgagccgaaggaggctggcggcgggcgatgtcgaccaagggtaggaccatgcggaccaaggtggagaagcggatggcgagggagaccggccgcacgcagcgggagctccgccgcgccgtcaagctcaggaagaagctcatgacggaggacgagaagttcatctacaacctgcgcagggccaagaaaaaagttgctttgcttctacagaagctcaagaagtatgagctaccagacttacaagctcctcgtcatgatcctgagctgttaacagctgagcaactacaagcatacaagaagattggattcagaaatagaaactatgtgcctgttggagttcgtggagtctttggaggtgttgttcaaaacatgcatatgcactggaaattccatgagacggtgcaagtttgttgtgacaatttcccaaaggaaaaaattaaggaaatggctgcaatgctgacaagattgagtggtggaatagtgatcaacattcataataccaaaacaatcatcatgtttcggggaagaaactaccgtcaaccaaagaaccttatacctttcaacacacttaccaaaaggaagtattcttgttgcaggctttattcaaggctagatttgaacaagcgcttgaatcgcagaaactaaacatcaagaaaatagagacacaactccgtcgtaaggggatcaatccagaggacccagttgctatggccagcatccagcgtgttgcctctacgttcttccgagccatagatgagcagcaaggtactccctatattttccgcggggacgcacaagcttctgctgggactcctgaaataaaagaaccacgtgatgaaccatctgaagatagtgaccaggaggagcttgacaggttcatctcagagatagaaactgcagcagagaagcaatgggaggaagaagaggctgcagagaaagaagaatcttcaagaatgcgatattgggagagggaagatgtagatgcaaggaggtgggatgataatagtgagatcgaggcgtcaggtgaagaatgtggctctggtgatgacagagatagtgttcttggactcaacaatgatatagacacaggtgatggtcatcctcggcaattcaaaagcatgaggaacgagaggagcagatccagtggcaggcagatttccattcctgggggattcagaggttccaatcggattccagggaattcagccgatgcttccgacggcactatgttcagaggcagcaacggtgatgagtcggacacggaagacgatgacttgtggatgtcagattacaaggggggagagacgaactctagagccccaaaggtgaatttcccgaatttccacagcagcggtgaggatagtgatgacaacaggaaaaacggtggcaagattggtaaaacgaagaaaaatactgatgaaagttgggacagtgactgactgagggctcaagaaagagtaacgttgatccgtgatgcatggacgaaggtcggcaccaatggttgtcaatgcaggttctttcatcggtggtcttgctcgcatacttgtccaacggaaacttggaggaggtagaagagtaggcatggttttggtgagaacaactgtttgaacgtttgctgcatgttttcagacgtgttctattccagttggcatggtaacctgaaaagttgttgaagcggatgacaaagccagaacaacactgcacgacctgcacaagccggaggttcctgaagttcggtgccgacaaacttgatatgtcgaggttcctgaaggtttcagaaatgtgaaatcctttctgcgatcacatttatattctcatattcttgaagttttgatgtgagcgaaacatgcacgtagatgtgtcttgcgtgggagagttctcttattttcggtaaattgcccggtacacgttattcagagttcagagtgtgtgaagcttttagggcatgtttggttcgttacctcaattgccacactttgtccaacttttctgcctaaggttagttattcaattcgaacgactaaccttaggcaaagtgagcagttagccacaaaccaaacaagcccttactctgttttaatatcgtgtgtttcagcgtcatcatctaacgtaagaacatctcaatacttctgcatttt

SEQ ID NO: 14026 - DNA, 1105 bp, Zea Mays
agccacagcccaccacctttgcttgctctgcccctccatcatcgccagcctgccagtgccgccgctaccgtagtaccgtaccctcagctagtcagctacctccatccaccagaccagaccataccagaccagaccagaccaatggccctgcgcctaccaatctcatcgtcccacgggctggcctccacgccggcgccaatctccacgacgacgtgccggccggccgtcttggcgacggccgcggcccagaagaggagcctgctgctggcgacggcctccgagacgaggggagtcgcgccggtgaggtccagcgggatcgagacgagcacggtgggtctgggatgtgaggccgtcaccgggcaggtcacggaggtcaacaaggacaccttctggcccatcgtcgaggccgccggcgacaaggtcgtcgtcctcgacatgtacaccgaatggtgcgggccttgcaaagtgatggctccgaaattccaggagatgtctgagaagaacctggatgttgtgttcctgaagctcgactgcaaccaggacaacaagccgcttgcgaaggagctgggcataaaggttgtgccaacgttcaagatcctcaagggtgggaaggtcgtgaaggaggtgaccggcgccaagatcgacgagctagcgcaagccatcgacacagtcaagtcagactgacaaagaaagcaggtgatgcaactagctagtgtagacgatgaatgaatgagtccccggccggccttttgtgggacagcaaggctgctagatacgtaccccttaaggacttggatgtcgaggccagcctactatcaggaggtgcgagagggaggaagaaatgagcggcatttatctttttgcgtggtatcttgatctggtcattctataaaattgggtaccattgcatttcgctcctaaaataaaaagaaaatagaccagaccaccaccattgcaaaatcaagcaatgcataatatttttgttgctgtagatggagagagcagagcatcacgactcctccacgatttaaaccccttttgctttcacggataaactagcataaaaatagataacccaaaagaagaagaaaaaaaaagaggaaaa

SEQ ID NO: 14027 - DNA, 527 bp, Zea Mays
ttagatcaaatgtcgactcggtgatcgatagaggtgcttgaaatggtgcgggccttgcaaagtgatggctccgaaattccaggagatgtctgagaagaacctggatgttgtgttcctgaagctcgactgcaaccaggacaacaagccgcttgcgaaggagctgggcataaaggttgtgccaacgttcaagatcctcaagggtgggaaggtcgtgaaggaggtgaccggcgccaagatcgacgagctagcgcaagccatcgacacagtcaagtcagactgacaaagaaagcaggactgcttcaagcgcaagcggtgcaaatgaggaccagtattcttttttttcttcagcaatatcagaatgtatccctaaggggaaaagtcaccattagccaaactagacattattgtaatttgtaactggacattattaaaacattgaaacagaaaggttgcaatatcagaatgcatcctagcccatgatcctaaggttgcaatatcagaatgtatccctaaggggaatatttgag

SEQ ID NO: 14028 - DNA, 2243 bp, Zea Mays
atttgaatataatttcttgtatgaagatgacgtccacagatttcaagaactaattatcagcaataaattatttggtggccaactatcaagaagcacacttaatttagcattcatctaaattaatctgatttcatggtttcaaatgaatatgcaagggcacattttgaattaaaaggaactgacttcttttcaatgtccactgtttgcatgccctagtcagtatggattacaaataatgaccacacaccctatactacttactagacctcccaggtctcaggacaattcttaggtttggaaggagaatcgatccctggagacaccagctcctaccatatagaaaacatgtccatttaacactccatgctcttaatccaaattctcaaagccttctttttcaagtttgaacctagtgtgtagcttattgaagtactaccccacatggtgcaccacaaaaccaacactctattattttttttgaacgtaatggcaggagctctgtctctcaattaagaagaaaagaattgacccagttttaagggaaaccgggcccaaaaccaatacagggcgcacaaacaacccagacaacaacaacccacacacacagtacccatcctgagtcatcgttgccgagctcaacacaagtgacgagctccgactcccaagacgggcagcacaaggccaaaggaaacacgacgacgattacaaacaccggcacaggagaaggaagactgcgacgcgtcgtcgttgccaagccacgagacaccccactcgagacagctctgattcttcaccagcgagacttccaaaaccttaatccactgccccgcctccgccaaatgcctcatcttcgacgcagaccaacccacgaagaagggggggttcgccccacgtcatcgttgccgagccacatcccctgacatagcagcttcgacttcatgatgcaagctcccacctccacacgcaaaccggcacccgaaagacgaaagcaaccaccacaggctacgacgcgcccgagacaaacttcagaagcgacaccttcataaagggagtgacgtcggggatgccaccgtcgctggtccgagatggaccgggcttttgcccacgtaagacagtgctgaggagccgacaccctcaacaggggaagcagcgcccaggggtgtcgccaaagctttcgcccaagaaaaccccagcaaaacgaccggccaggaaccgggacaaagcaaccacctccgccgccaccgccgcccagacaacccacacagacccatctagagggacatcaacgtgtcggctgccacaacagccgcaaagttgcgtcgaccaccaccacctctggctgggcccatggacctggtcgagcgacggcagcacctcgagctgcacctcccgtcggccatccctggcagcagccgctgcgacgcgccagatccgctggcacgcgcaccaccgcagacgccattagggcactgcaggttgctgcccacctacagtcgccacacaccaccactgaggagccagatccggcggccgcagccccaaacaaggccacgacgcccgcacgagcaggccacggtcgctgcaccatcctctgctcctcaccgaccctcactaccgcaaccaccggaagcactcaacacagtagccactcgcccacagccgggaagcctgaaaccgccgtgggaccagaatgtagccccagcaggcagcaacagcgttgcgaccgcaccgccagagctccaccgcagtcaccacccagtggtcttccacactgcagccagcgcaccggcccagccgagtcacccatgccgctgtgcgccgacccctgctcagatctgcccgccgacgcacgtgtcgacggcccctgcctcaaagaagcacagctcggcgtcgccctagccccactgacagcgcatggcggcgacgaccggagcagatccacgagcgaggcgcggaggcaggccgcgacgccctcacagcggcgtcccgccacgcatggccgcctaggcctcagccgccacccgacgagctctgcggcgtgcgccacggcgcgcctcagcacggctacggccaccgtaggtaccgtgccgccatgtgctccaccgccgatgtgtcacgccatctcccaccagatccgtgcgaaacaccccgccgccgccatcctaggggccgagccagcctctggcagaccctccggcggcggcaaggggaggggagagagaatttgcgggcgacagcggcaa

SEQ ID NO: 14029 - DNA, 2105 bp, Zea Mays
gtcggtctgaaacgatcgacaacgaatgactgaatgagagatgtgtggtccccgcccctcagctacgcccacctcagcggcctcctcgcgcgctgcggccgcgctggggacctccgcctcggcacctcgctgcacgccatcgtcgccaagaaccccagccacttccgcctctgcccacgccgttcctgcctgcagcacgtggtcgtggtatggaactccctcgtcgccatgtacggccgctgcggctgccgcggggacgccgtcagggtgttcgacgaaatggccctccgggactccgtgtcctggaactcgctcctctccgcctccgcttcggccacggatgcgctcgcgctgctcaggcggatgctgagcgccgcgccaggcgccgccgcgtgcgaccacgccacgctgaccaccgtcctgtccgcgtgcgcgcgcgctggcgggggcacgggctccgcgtcgctccccgcggtacacgggctggcggcgtcgtgcgggctcgacgctgaggtgtccgtcgggaacgcgctgatcaccgcctacttcgagtgcagctccccgggctctgcggagcgtgtgttcgacggcatggcggacaggaacgtcatcacgtggacggcgatggtctccgggatggctcgggcagagcgatatagcgagagcctgtctctgttccggcagatgaggcgcgcggtggacgccaacagggcgtcgtactcgagttctttgctagcatgtgccggatcacgcgccgccagggaagggcagcagattcacgggcttgccgtcaaggctgggctggagactgatctccatgtcgagagtgagctcatggacatgtactccaaatgcgggttgatggaggatgcgctgagggtgttccgctccggccaggatcctgacgaagtttccttgacggtgattcttgctgggtttgctcagaacggactggaggaggaggcgttcaggttgttcgctgagatggtcgggaaaggaatccgcgtcgacgcaaacatggtttctgcagtcctgggtgccttcggtgcttcggcgccgtttgctcttgggaaacagatccacgcgctggccatcaagagatgcttcggagggaacacctacgtctgcaacggcctgatcaatatgtattccaaatgcggcgagctacaggagtctatccgagtgtttgacggaacgcccagcaagaacacggtcacgtggaattccatcatcgctgcgtatgcccggcacggccatggttgggaggtttttgggctgttcgagtccatggaagccgatggcgtcaagcccaccgatgtcacgttcctgtcactgctccacggatgcagccatgtcgggtcacccaggaagggactggagatactggactccatgccatcgaagtatggaatccatccgaaggtggagcactacgcatgcgtggttgacatgcttggccgagccagccagctggatgacgccaaggcgttcatagaagacggaccgttcaaggacagcgctcttctgtggcagtcgctgatgggagcttgcagcttccacaagaactcaggagttggtgaatgtgcggcagagaagttgctcctcctggaccctgactgcactgccgcttacgtcttgctctcgaacgtgtactcgtccgagggcagatgggacgacagggccaggatcatgaagaggatgagagctaggggcttgaggaaggacactggcaagagctggattgagctggaaaaggaggtccgttcttttgccgctgggccaacaaggtctcgccctgatgatgtgctggtgcagttgtccgcagttgccagtgatcaagaagatgtagtagagagcagtgctttgtgaaatgtcaggtgtgtatcttacattctacatggaactttgggcgtcatacatgattgtctctataccatatatctcgcctgaaatttgtgcaaagtgcattctgatggaagatcgaagagccggattgggaatcatctattaccagggaatagggagcctttgtatgcatgatgttccttgtacgtcgtcgaccttgaggatttaggaaagagggtgggtggccacgcaattgtgaa

SEQ ID NO: 14030 - DNA, 790 bp, Zea Mays
atgtccgaccccgccgctggaggcgccatggttcctgctgccggacgcggcatcgcatgggcgaacggcggcccccggttcggcgacatggtctgggccaaggtgaagtcccatccgtggtggcctggccatatctacagcgtcagcctcaccgacgacgaggaggtacaccgcggccaccgcgacgggctcgtcctcgtcgccttcttcggtgactcgagctatgggtggtttgaccccagcgagctcgtccccttcgaggaccacttcaccgagaaggcggcccagggcggcagctcccgcagcagctttgccgccgccgtggccgaggccgtcgacgaggtagcccgccgcagcgcgctggcgctgctctgcccttgcgacattcctgacgccttccgtccccaccccagcgacggcaacttcttcctggtcgacgtcccggcattcgacaccgacgctgactaccaactcgaccagatccgggccgcacggcagcgattcgtgccgcggaaggcgctcaactacctgctggacgccgccgtgactcagcgagacgcggcggaaaaagccgcgcgcaccgtgcctgggatggagatggccgcgctgttcttggcgtaccgccgcgcggtgttttcgccgatagacaacacctacgcccaagctttcggggtggatcctgagctggctcttgctgccgagcagaaagccgcggcagagagagctcaacgaggaccgcaggaggcattgaggtaagctggttgagtccacatgtacatggtgaaggaag

SEQ ID NO: 14031 - DNA, 2028 bp, Zea Mays
tccttcacacaagaatggaaattaacgagcaacgcggccgctcaaagggggactcaggaagacgccggagcatgccacgccgccggccggacgccggagaggcgccaggctcatggagaagatcgtcccgggcgcgtccgccatgaaggccaagtccagcaagaaggaccagtacctgctcaagcgccgggacgcccccgcccaccgccagcggcagctcccggacgacggcccacctggcttcccgtccagcggcgacccgcccacgccgccgctgcccgggagctccgtcgctgacgaggacttcatgctgcagaggcgcgccccgctcgtcgaggtccctcccgccgccctggcccagccgaccgagatgcccgccgcgcccaagccccgcaaacgccagccggaggaaggtgcggatgctagccccgacgcggccggcggtgaccccaagaggaataagaaaaagaagaagctttccgacgtggacggcgccggcgccggcaaggcctccgtggttcaggaccctatctggcttgacctgacgcagagctacgagaacgacccgcccgaggagtcaaagaagggcctgggcaagcccagtgccgccgccgctgacggccactggcccaagaagaagaagcctgccccgaggcctggcgcaggcaaaggcaacgaccccaccatagccggcgtgaagcgcgggccatcggaccgccagggcgatctggccgtcaggaagaaagccaagctcgataagatcaagacactgcccagtgagaagaaggccgccggtctcgaacagaaagacaccgcggtggcggcagtcgccaaggacaaggccgaggtggctgcggcgaagaggaaggagccggcgccggcgccggcgccggcgcccagtgtcaggaccctgtcgccgacggcgctgcagatgaagttcccgctgaagagcacgctgccgtcggtggcgttgctcaaggcgcggttcgcgcggttcggcccgctggacgtggacggcatccgcgtgtactggaagtcacacatgtgccgggtcgtctacaggttcaagtccgacgcggaggcggcgttcaggtacgcccaggcgaacgccatgttcgggcaggtggacacgcagtaccacctccgcgaggtcgaggcgccggaagcgcccccgcagcagcgctccgaactgcggctcatggagaccgcaccgttcagaccgggaagctccggcaacggcgctccgctgcccatgtccagggccggggccgtgccggcggcggcggcgcgtccgcccgtggggcagctgcctaagtcgatcctgaagaagagcaccgatgaaggaaactctgggaccgccagggaggtatctcgtgtgacgttcatgctggacggcggcgcaccaatggtggtcaaggccgccaaatccgtgggtttcgcttcttcccagccacccccgcgcccgctgttgcagcagcccatgcggccgaaccagcctcgccccagcggcttccccggtggacagcagcaggtggggtacccacctcggtccggcgacagcccgccgcagcagttcccgcctcgtccgagcggcggcgccgagattccagcgtggaagatgggggagagggagttcaaggaggaggtgtggaggctgatgacggggatcgccaagctggtggagccgctgaccgacaagaacggcttcttcccctaccacctgttccgagcacagtgagcatgtccatgcatgcacaggcacagcagaggtgggtggggtcgatggtcatggagctgccgcgttgtatccgtcgggcaccagggccagtagcaagcaacgagttcgccggagagagacagacagggagagtgtctatgctatggactccgtcttctagactctggacgggctgcttcttttgttttaaatcctctccattttttgtaactacaggttttattatcgtcgcgatcgcaatttccggccaagcgctcctgctgcaaccgcacaacgcagcctcctttgcc

SEQ ID NO: 14032 - DNA, 3880 bp, Zea Mays
aattaattttggatcacttcatgagatgtgctctcccgacaggaggaaaaggaggaaagacccattcattttttattcatcgattagaacaaagtagaataagcaactaaacaccatacatgttcatatatcaaacccatatattgtctaatagctacatctgtgatcaacaagatgttattaatcaattacgaaactttctatggatacacgatgtgtcaatactaatacaccattttttcctcaaaaacaatgatatatggatatgctattttgtaaaaattagtaaagatttgtaaatagtttatattggctaattattgataatagttgtcttcggatattctgcatcgtgcccctgacatagtagtgagagcacctagagggaggggtgaataggtgatcctgtaaaaacttaagacttaaagccacaaaacttgattaagtgttagcacaatgaaatcaagtggctaaggaccgagctcttgtgaaacacaatagtcacagtgagaacaagcacaagagacacgatggtttatcccgtggttcggtcaagtacaacacttgcctactccacgttgtggcgtcccaatggacgagggttgcactcaacccctttcaagtgatccaaagatccacttgaataccatggtgtttttctttctttcactatatcccgtttgcgaggaatctccacactttggagcctctcgcccttacaaatgatggtcacaaagaaacacgggtgtaagggagggaaaagcaacacacacaaatcccaacaatacgcacacacacaagccaagacttgagctcaaatgacacacaacaagttcaccactagaacggagctcaaatcactaagaatgtcaatcgagtgtgcaaagatggagtgcgggagtcttagaatgttcagagtatgcttggtgtactcctccatgcgcctaggggtcccttttatagccccaaggcagctaggagccgttgagaacaatccaggaaggcaattcttgccttctgtcgggtggcgcaccggacagtccggtgtgccaccggacaggcactgtacagcgtccggtgcagattgctttcctaaattggtgcagccgaccgttgaagatttggagccgttggcgcaccggacactctccggtgcacaccggacagtccgatatccccatcagaccgttggctcggccactcgtcacgcgcggattgcgcggccgaccgttggctcaccggagagtccggtgcaccaccggacagtccggtgaattttagccgtacgccggtgatgaattcccgagagcggccagttgaccagacgccagcctgacgcaccggacactgtccggtgcaccaccggacaatccggtgcacccagactgcgtagagtcttagcagctccagccaagtctttttccttttgtgttttctctgattctagcacatagacaaatatgttagtacacaaaaaccaatgtactaagtctagaatcatacctttgtgttgattttcacttcatcctccatttggcacttattaatacttaaggcatttgtgttggacacttaatcatcaaaatccttagatatggtccaagggcacatttccctttcaatctccccctttttggtgatttatgccaacacaacacaaagcaactaaaataggtgcaacatcaatgcaatttagaacaagaatttgttttgattcaaatttggcatatttggatcattctttgccaccacttggtttgtttttgcaaatcaacttcaatttcctatctctaagtcaaacacacttgttgaggcataaagagaggtattccaagagaaattgacaaatgattcaagaactcccccttttttctcataataaaacattctccctacaagagaccaatttttgacaataagagacactaagagaattttgacaaaacaaaagttctaactctactattttcaaaattctcaagtggtagctgatccatttcttgctttggccttaatttctccccctttggcattaagcaccaaaacgggatcatttttggccctttaacctcattgcctcaccaaaattttcaattaggagtaaaaaggcaataagagcatggagatgaacttggagtgagttaccctctcatcggagtgcagtggaagtctttcatggtccaagtctacctttccctttcaatccacttttgagactaaaacaagtaaactcaagcacaaggttagtctcaaagtgtcaagttgtagcatgcctccccctaaataagtgcatcacttgcaaatggacttgtgaggtccggggatcatgtgtacaacttgagcaccataaacaagcaacaatatgcataaaagaacatgatcaaaggcataaacacatgtatgctataaatcaatccaagttacgcgaatctaagacatttagctcactacgcagcctgcaaaaggttttctcatctaaaggcttggtaaagatatcgactagctggttctcggtgctaacataaaacacttcgatatctcccttttgctggtggtctctcaaaatgtgatgccggatgtctatgtgctttgtgcggctatgttcaacaggattatccgccatgcggattgcactctcattgtcacataggagtgggactttgctcagattgtagccaaagtcccggagggtttgcctcatccaaagtagttgcgtgcaacattgtcctgcggcaacatactcggcctcagcggtggatagggcaacagaagtttgtttcttagaactccaagacaccagggaccttcttaagaattggcactgtaacactccaggttccacaaacaacccggaatgctactgtactacacttccgacgtccatatataaaatttcggcagcatcccctttgcaagatagcataaaagagggggcaacagagtataaacatatatcataactaaaacatactaagtattattaatcggctagcaaggaaagataaacatacgacctgaactgaattaaccagtgcgcacgaccatataaaaaaaataaacaaacttcctttgacaataagtttctaattaaatcatggctgcgcctgggcagcgttattgtgagagtgaaagtggacgtgctgctactcccctcattcccaacatgtatcaagtacctgcattgagtaatgcaagagtgagatgacacatctcagcaagtaaaataatatcaaacagtttaaccacataagaacattgttttaccaccacttgattccacaaccttcctattacgaaggtgcaacacgtatacaacgtacaacgcacctagttaccacacctcgcagatagaaaccacaatagtaacatagtaatgtcacacttcatatattcctcatgagtgcaaatgtctgcaaatgcaaggatgacttctgccttcatacctctaaggatatgaagccgcatcgtacccctcctcgggcaacgtacgatgctaaaaatgtaccggtacggtcggaccataagatcacgacataacttcaaaatgcaagatggatgatgcgatgtgcatgtcatgcctacaacacttcatataacatgattcaaaagacacttcaacttcatccagatgggaatcaaccacatatatcattaccaaattatgatcatccacaatattagacaattgagaattaatacttccaaacaaataaacttcatcatagaattcaatgattaacataattaaaacttatgcatactcaatgacagggaataggatgcaaaccaaacggtagcaaccaccactgtatttacttgcctttaccggaagttcgggcaaatccctaagtacgatccggaagtccaccacctgtttttt

SEQ ID NO: 14033 - DNA, 1821 bp, Zea Mays
acgaatagtacgtgagattgcacgtggtccatattctgggcggcgatccgcaggcgggctacacacacatacatggcggcggagggcgccggaggccggggacgagccatgcggtacccgcctctgtcggcgctcgtggtctccgccatcgcggccttctcggccgtgatcgtcctcgccgtcgtccactcggcgtacgacgacgccatgtcgcggacgcggacgctgctgggccacaacctggagccgacgccgtggcacccgttcccgcacgacaagggccggccgccggcgcgcgcggcgctgcggtgcgcgccctccatcgcctgcctgccgccgctatcgtcgtcgtcgtcgtcgccgcagccgcaaggtaacaagaagaagaagcaaaagcagtgccctgcctacttcgctgccatccaccgggacctggctccgtggcgcgggcagggccggggcgtgacgcgcgcgctcctggacgaggcgcggcggcgcgcgtccatgcgcgtcaccatcacgggcggcgggcggcggctgcacgtggacctctactacgcctgcgtgcagagccgcgccctgttcacggtgtggagcctgctgcagctgatgcggcggtaccccgggcgcgtgcccgacgtggacctcatgttcgactgcatggaccgccccgccatcaaccggaccgagcacggggacggcgctctgccgccgccgccgctcttccgctactgcaccaccagggaccacttcgacatccccttccctgactggtccttctggggctggccggagacgaacatcgagccatggaaccacgagttcaagaacatcagggcgggcgccagggcaacgagatgggcggacagggtgccgacggcgtactggaagggcaacccggacgtggcgtcgccgctgcgggaggcgctgctgggctgcaacgacacggccctgtggcgcgccgagatcatgcgccagaactgggacgacgaggccaggtccggctaccagcactcgaggctctcggcgcagtgcacgcaccgctacaagatctacgccgagggcttcgcgtggtcggtcagcctcaagtacatcctctcctgcggctccatggcgctgctcatcgagccgcgctaccaggacttcttcagccgcgggctggagccccgggtgaactactggccggtcgccgccctgggcatgtgcgagtccatccgggacgccgtcgactggggcaacgccaacccggacgaggccgagcgcgtcggcaggcgcgggcagaggctcgtgcaggacctccgcatgcacgccgtctacgactacatgctgcacctgctcaccgagtatgcgcgcctcctcatagaccaggaccacggcttgagcccgccgccccacgcgcaggaggcatgcgaggcatccctgctctgcctcgcagacgacaagcagcggaggttcctccacgcatccaaggcagaccccgcgccgggcgacccgtgcgtgctcccgccgccgtgatccctccccctccctctctctctaggatttctttctttctttatttatttatttattagactcaacagacagatcagaacgagttgggaggatttcaatgatggttctaaagcttctgacaaaagcatgttcagatttcatttttaggtcaattgcaatttccttgaatttaaattgtattatgtatcctgccgtcctgcctcttacaaaactagatgccttcaactatgcaaaatgctaatatgaatgacgctataattaattagtgaagaaaaaaggagctgcaagattttttaaaaaaaaata

SEQ ID NO: 14034 - DNA, 1941 bp, Zea Mays
tcacaccagacccacgactcacaccacaaagcaatcgagtgcttccaaaccgggctgacccgcgtcgggacgttccggtccgtttcactcgctgttccaccacgcgctcgcccctgatccaccaccgcggccgcgatgagcaccgcctctggcgacggcgcggacgcaggcggcgacggggccgccgcatcggcgcccgccgggaggcggatcccgcccgcctcgtccatgccgtgggtccgcaatctccgccgcttcgtcggcacgggcgccggcctcggatcggaggccctcatggaactggagactaaaaggatattgcttgagattttcaaggagcggcagcggaagagtgccgaggctggttccatcccaagtttttacaagaagaaacctgaagaaggatccattagctctagagttcaaaggttggccaagtacaggtttctaaagaaacaatcagagcttctgctgaatgctgatgatcttgatgccatgtgggtttgtctcagagaaaattgtgttattgatgatgctactggtgctgaaaagatgaattatgaagatttctgccatatcgccacagtctgcacggagcagattggtcagaaatgcaaacgatttttcagcccttcaaacttcatgaagtttgagaaggatgattctgggaggattgctatcctaccattttatctttatgtcatgcgaacagtttctcttactcaagcaagaattgatatgagtgagcttgatgaggattctgatggtttccttcagcctcatgaaatggaagcatatattagaggactcatccccaatttggcgcaattgcgcgatatgccccactgcatttgttcagatgtactgccgcatagctgcacgcaagttctttttcttctgtgatccacacagacgggggaaagcatgcataaagaaagtgttgctgagcaattgtcttcaggagctaatggaactacatcaggagagtgaggaagaggtaaccgataccgagcaggcagaaaactggttttccttaacttcagctcagcgcatatgtgacatgtttcttgcactagataaggatacgaacggtacactgagcaaacaagagctcaaggaatatgcagatggcacgttgactgagattttcattgaaagagttttcgatgagcatgttcgccggagcaaagttggaggtgccttgatctcaatggaaggggtttccttacaactgcagatattcatactctatttagagacgtacaccagaaatggattgagggagggaactatgagctttgcatagaagacgtgagggatgaaatctgggacatggtgaaacccgcagatcctctcaggatctcgctatcagaccttctttcttgcaagcaaggtgggactgtcgccagcatgcttatagatgtgcgtggcttctgggcccacgacaacagggagaaccttctccaggaagaggaagagcaagtggaagaggcatgagttctccagctgccaagtaaccgtacctggtgcctcaaaattgcaacatcctcggaactgcctgtaccgcagtatcagtcattgtaacctagatagtgtattaaatctgtcaccaccagtttcctgaagctgaagcttgttcttaagtgtgccatagtggtcttcgaaacttgttgaggctagctagcgccgtttggccatattgacatctatccgtgagggcctgattcctcggcagcctgtatgtacatctagatttgcaccaagcgcgcaatcctcaatcctgactacggcatcacgcctgtaagcatatactccgtatgtaatacattgtgtttagttcgtacatggcttgtgggtcgttacttgaatgcctggtttatgccatttttgctgcatagcagaaccttgctatgtatcagtggggactgtgtgatcttgaac

SEQ ID NO: 14035 - DNA, 1926 bp, Zea Mays
cacgactcacaccacaaagcaatcgagtgcttccaaaccgggctgacccgcgtcgggacgttccggtccgtttcactcgctgttccaccacgcgctcgcccctgatccaccaccgcggccgcgatgagcaccgcctctggcgacggcgcggacgcaggcggcgacggggccgccgcatcggcgcccgccgggaggcggatcccgcccgcctcgtccatgccgtgggtccgcaatctccgccgcttcgtcggcacgggcgccggcctcggatcggaggccctcatggaactggagactaaaaggatattgcttgagattttcaaggagcggcagcggaagagtgccgaggctggttccatcccaagtttttacaagaagcctgaagaaggatccattagctctagagttcaaaggttggccaagtacaggtttctaaagaaacaatcagagcttctgctgaatgctgatgatcttgatgccatgtgggtttgtctcagagaaaattgtgttattgatgatgctactggtgctgaaaagatgaattatgaagatttctgccatatcgccacagtctgcacggagcagattggtcagaaatgcaaacgatttttcagcccttcaaacttcatgaagtttgagaaggatgattctgggaggattgctatcctaccattttatctttatgtcatgcgaacagtttctcttactcaagcaagaattgatatgagtgagcttgatgaggattctgatggtttccttcagcctcatgaaatggaagcatatattagaggactcatccccaatttggcgcaattgcgcgatatgccccactgcatttgttcagatgtactgccgcatagctgcacgcaagttctttttcttctgtgatccacacagacgggggaaagcatgcataaagaaagtgttgctgagcaattgtcttcaggagctaatggaactacatcaggagagtgaggaagaggtaaccgataccgagcaggcagaaaactggttttccttaacttcagctcagcgcatatgtgacatgtttcttgcactagataaggatacgaacggtacactgagcaaacaagagctcaaggaatatgcagatggcacgttgactgagattttcattgaaagagttttcgatgagcatgttcgccggagcaaagttggaggtgccttgatctcaatggaaggggtttccttacaactgcagatattcatactctatttagagacgtacaccagaaatggattgagggagggaactatgagctttgcatagaagacgtgagggatgaaatctgggacatggtgaaacccgcagatcctctcaggatctcgctatcagaccttctttcttgcaagcaaggtgggactgtcgccagcatgcttatagatgtgcgtggcttctgggcccacgacaacagggagaaccttctccaggaagaggaagagcaagtggaagaggcatgagttctccagctgccaagtaaccgtacctggtgcctcaaaattgcaacatcctcggaactgcctgtaccgcagtatcagtcattgtaacctagatagtgtattaaatctgtcaccaccagtttcctgaagctgaagcttgttcttaagtgtgccatagtggtcttcgaaacttgttgaggctagctagcgccgtttggccatattgacatctatccgtgagggcctgattcctcggcagcctgtatgtacatctagatttgcaccaagcgcgcaatcctcaatcctgactacggcatcacgcctgtaagcatatactccgtatgtaatacattgtgtttagttcgtacatggcttgtgggtcgttacttgaatgcctggtttatgccatttttgctgcatagcagaaccttgctatgtatcagtggggactgtgtgatcttgaac

SEQ ID NO: 14036 - DNA, 1837 bp, Zea Mays
acaccacaaagcaatcgagtgcttccaaaccgggctgacccgcgtcgggacgttccggtccgtttcactcgctgttccaccacgcgctcgcccctgatccaccaccgcggccgcgatgagcaccgcctctggcgacggcgcggacgcaggcggcgacggggccgccgcatcggcgcccgccgggaggcggatcccgcccgcctcgtccatgccgtgggtccgcaatctccgccgcttcgtcggcacgggcgccggcctcggatcggaggccctcatggaactggagactaaaaggatattgcttgagattttcaaggagcggcagcggaagagtgccgaggctggttccatcccaagtttttacaagaagaaacctgaagaaggatccattagctctagagttcaaagagaaaattgtgttattgatgatgctactggtgctgaaaagatgaattatgaagatttctgccatatcgccacagtctgcacggagcagattggtcagaaatgcaaacgatttttcagcccttcaaacttcatgaagtttgagaaggatgattctgggaggattgctatcctaccattttatctttatgtcatgcgaacagtttctcttactcaagcaagaattgatatgagtgagcttgatgaggattctgatggtttccttcagcctcatgaaatggaagcatatattagaggactcatccccaatttggcgcaattgcgcgatatgccccactgcatttgttcagatgtactgccgcatagctgcacgcaagttctttttcttctgtgatccacacagacgggggaaagcatgcataaagaaagtgttgctgagcaattgtcttcaggagctaatggaactacatcaggagagtgaggaagaggtaaccgataccgagcaggcagaaaactggttttccttaacttcagctcagcgcatatgtgacatgtttcttgcactagataaggatacgaacggtacactgagcaaacaagagctcaaggaatatgcagatggcacgttgactgagattttcattgaaagagttttcgatgagcatgttcgccggagcaaagttggaggtgccttgatctcaatggaaggggtttccttacaactgcagatattcatactctatttagagacgtacaccagaaatggattgagggagggaactatgagctttgcatagaagacgtgagggatgaaatctgggacatggtgaaacccgcagatcctctcaggatctcgctatcagaccttctttcttgcaagcaaggtgggactgtcgccagcatgcttatagatgtgcgtggcttctgggcccacgacaacagggagaaccttctccaggaagaggaagagcaagtggaagaggcatgagttctccagctgccaagtaaccgtacctggtgcctcaaaattgcaacatcctcggaactgcctgtaccgcagtatcagtcattgtaacctagatagtgtattaaatctgtcaccaccagtttcctgaagctgaagcttgttcttaagtgtgccatagtggtcttcgaaacttgttgaggctagctagcgccgtttggccatattgacatctatccgtgagggcctgattcctcggcagcctgtatgtacatctagatttgcaccaagcgcgcaatcctcaatcctgactacggcatcacgcctgtaagcatatactccgtatgtaatacattgtgtttagttcgtacatggcttgtgggtcgttacttgaatgcctggtttatgccatttttgctgcatagcagaaccttgctatgtatcagtggggactgtgtgatcttgaac

SEQ ID NO: 14037 - DNA, 2235 bp, Zea Mays
agtaatcaattccactgcgactgttgttgaaagagcaaatcaaaccaacccatcgaaaaccaaaatccccgcacgagctccggtttcaaattccctcggcagagctcgccgccgggcatggatgcggcgcgggagtccatggcggcgctcctcgacgccggcctcttcggccccgcccaaacgctggggtgtttccttgtgtcgtcagctggtgcgggcaacgatgctggtatgtccatgaaggtggaaagcctggtccagcatggggatgctttgtatggagagaaagaattccgcagggcactgaatgcgtacaagcaagctatgcaatatagtagaagtatccctaggcaagcaacaagtaacaccagaagttcagtatccgtcacaggccggtcaccttctccaaactcttcaaatctcttatcattcaatgaaaatgaggtgaagttcaagattgctctttgccattctgctctatgtgagcaccgtgaagcacttcatgagatggaaggtattccttcaaaagtgagaacactgaaaatgaatatgatgttagggaagctttatcgaatatcaagaaatagccgtacagctgtagtctgttataaggagtgcttgaggcaatgcccttatgttttcgaagctatcacagctttggcggaaatggggctttcagcaaaggaattttctttattattttcacaagcaccaaatagaggaggcaagctatcgggtgacttcgtagacacacaacgttggtggagtcggtatgttgaggcgcagtgttgcattgcttcacatgattataaaggtggccttgacatatatctagaactaatgcaacgattccccaataatgtgcatatcttgttggaaattgctaaggttgaagccatcataggcaggaatgatgaagcgataatgaactttgagaaggtccggctgattgatccaaacattatgacatatatggatgaatatgcaattcttctaaagtcaaaatctgactacatcagactgaataagttggtacatgatatgctacatattgaccctgcaagaccagagacatgtgttgctcttgcagcaatgtgggaaagaaaggatgaaagaaaagctttgacatatgcagaaaagagccttcgagttgatgacagacatataactggctatataatgaagggcaatctgcatctttcattgaatcgaccagatttggcagtgacagacttcaggggggctcaagaattgagggctgatcttcgttcttatcaagttattctccaggattggtgcgtgcttatctagcactttctaaatgcaaagatgcattattcactgcacgcgaggcgatgaaggttatgcatcagtctgcaaaagctcttaagctagttggtgatgttcatgcaattagttccagtgggagggagaaggcaagaaagttctatgaatcagccattcgtcttgaacctggatttcttggagctgcactggctctggctgatctgcatgttgcggaaggacggaataaggaggctgttatgctactggaaagatatatacaacaatggtcagatgattctctacacataaaggtggctcaagtacatgcggcaacaaatatgctttcggatgcactttcccattatcaatctgcactaagaataaacccacaaaatgaagctgcaaagaatggattggagcgcttggagaaacaaatgaaggtttgtgcagttcataacttgtcatacaataaaatatcctactgttgcaaacataactagcattgcccgcacttgtttttcacgtgaagggagtggacccagatgctccagaagacgatgaagagaacgaggaggaggacgtcgatgttgatcgagatgactttatttgaagctggctcattacaggtctcttatacctgtggaagctggcgctgattgatcacgaccatctttgtatagcggtggtagcagtggttttgtgctatttgtgactgaatagcaggtgttctagcagaaccccagttgttttagcttgtaaaaatgccgcccgaaacgaattttgcacgtgttgtatgccatttcctttcagttcttctttgtgtattcttttgcaccaaatatggttgacccaactcttctctccactcagatcacagtatttcccttaccgcctgttcaaagtcagctgacatgcccgcccataatacctctctgtcatcatctgctt

SEQ ID NO: 14038 - DNA, 962 bp, Zea Mays
atgcaactggatttacattattatgggcaatctgcatctttcattgaatcgaccagatttggcagtgacagacttcaggggggctcaagaattgagggctgatcttcgttcttatcaaggattggtgcgtgcttatctagcactttctaaatgcaaagatgcattattcactgcacgcgaggcgatgaaggttatgcatcagtctgcaaaagctcttaagctagttggtgatgttcatgcaattagttccagtgggagggagaaggcaagaaagttctatgaatcagccattcgtcttgaacctggatttcttggagctgcactggctctggctgatctgcatgttgcggaaggacggaataaggaggctgttatgctactggaaagatatatacaacaatggtcagatgattctctacacataaaggtggctcaagtacatgcggcaacaaatatgctttcggatgcactttcccattatcaatctgcactaagaataaacccacaaaatgaagctgcaaagaatggattggagcgcttggagaaacaaatgaagatgctccagaagacgatgaagagaacgaggaggaggacgtcgatgttgatcgagatgactttatttgaagctggctcattacaggtctcttatacctgtggaagctggcgctgattgatcacgaccatctttgtatagcggtggtagcagtggttttgtgctatttgtgactgaatagcaggtgttctagcagaaccccagttgttttagcttgtaaaaatgccgcccgaaacgaattttgcacgtgttgtatgccatttcctttcagttcttctttgtgtattcttttgcaccaaatatggttgacccaactcttctctccactcagatcacagtatttcccttaccgcctgttcaaagtcagctgacatgcccgcccataatacctctctgtcatcatctgctt

SEQ ID NO: 14039 - DNA, 1198 bp, Zea Mays
caggattccagttgacttgcagcaggcccgggacgtcaggtttttccctttccttcgtcgagcggctcgggtgagctcaatcttgacgcgcttctcggagtccgttgaagccgcccctaaaccgaccttgctgcgactataaagggtagccctgagggctccgctttctctttccatcgccacgactgtttaccagcgctaccgatgagagagagaatcaggggattcgagttggccgccgccgccgggtaactcgacaacgacatcgtctggggaccggattcgaaccgaggaggtgtgtgcggccccgtgggacgttctcttgtcaacaatcgtgtgcgggaggcggtggattgagggcagttccatgctggagacatcgagccatcgcggatccgcctatcgctgtgggcagagcttcgccgcgggcgattcctgacgagcaagcaaccgaggatcccggtacttagcaagtggaaaatactgaacaagagctcattgaaggcaagttatgcccttgaccacttttatttacccaataatgttctctataatcactttggcatgtttaggcttaattttgatgggacccaataggtcaccctagattggtcatctttataccttgtttacccctgaacctttttggacagtatctgctattgctatatgtggtattgggtgtcaagataattattattcatgatcatgttccttaatgttgttgaattctttatcattcatgataagactattgttttaattggaacatggagcttaacttgagatatacgtgctaccacaaggttggaatgggacgctcttggctgactaattaggaaagctagtggagatctaccttactaaaagggaaatgtgcccttgggccatttctaagtattttggtgattgagtgccaacgcaagtgcttttgtgttgatctatgcaaagtggtggacaaagtgcaaatcatgtcaaaaggtatgtttctagacttagtacatcgttttatagactaatgtattgtctctaagtgctggaaacaggaaagattgaattggaaatgagatggctctgttcagccaaagtcagctcggtctgggtgcaccggactgtccgatcgtgcaccggacagtgtccggtgcgccaggctggctcaggcgaacttgctgctctcgggaagaaactaacgacgtac

SEQ ID NO: 14040 - DNA, 1322 bp, Zea Mays
atacgatgtagcacatatgaggaattgaaattgtgagaaaacctaacaaaaaagtacggaacggaggggagagacggagatagtagtgtcatcccgtcttccctcacccagtcaccctgacgggacggcaagcggcggaggcgctgtcatccgctggtccctttcctttccgcgcgcatggcgagaatcttggccgccgtctggccgatcgttaaaggctgcatcaccggcggcgtgttcggcatcaccatcgccgactggagcgcctcctacgtcaccttgcacggcgcctccatgcaccccaccttcgacccgcagcaggccgaacgcgctctggtagataagcgctgcctccaccgctaccacttctcccgcggcgacgtcgtcgtcttcaggtcgccgagggaccatcgtgaactggtggtgaagaggctgattgcgctgcctggggattggatccagatcccggagaagcaggagatccagcagatcccgcaggggcgctgctgggttgaaggttcctatgggtctgttacggggcagggtcacacacataatctggccaccccacagaattggccgagttgacaggaaaatgcccgaaggaaggattgtgccactgtgacctgatagagatctgtgccactatataaccatggagatccctttttgcaaaagctagatgtgcaagtccgaatgctggctccagaagaagctacgtggagtcatcacactcaggcaatacaggtgtgtgaaaggaggagggatcacgggccggtgtcactgtcttgtttgtaaagatgtgcctccaaattaatccgcaaaactggaggggcaaaggcatgatcgcaaagggggaaaaatgaatcggtgtagttaattgtcatgtctttgctagcgttgccttggaaatttaagataacagtcaatttaagtcttgagagttgtctctgtttgcttttatcttttatcaagccgtagtgtcaagtgctgctccgaaaatctttggttcaagttcaataatactattggtaactagtttttttatttgcccatatcatattgatcatgtaaggccgtgccctgcatagcgtgcgcgtaaaacactgttttgtattataaagtgcattatgcgtgcatgtaaaacactgttttatattgtagagtgcattatttatggtgtggagtttcaaatatggagtaagatagataagagatgagatagagagactgctgaagatagcgtaacaattctacttaacgtggactttttagattgttattgtgccattttcttataataaaaaaaagatgttgtattc

SEQ ID NO: 14041 - DNA, 1232 bp, Zea Mays
gaggaattgaaattgtgagaaaacctaacaaaaaagtacggaacggaggggagagacggagatagtagtgtcatcccgtcttccctcacccagtcaccctgacgggacggcaagcggcggaggcgctgtcatccgctggtccctttcctttccgcgcgcatggcgagaatcttggccgccgtctggccgatcgttaaaggctgcatcaccggcggcgtgttcggcatcaccatcgccgactggagcgcctcctacgtcaccttgcacggcgcctccatgcaccccaccttcgacccgcagcaggccgaacgcgctctggtagataagcgctgcctccaccgctaccacttctcccgcggcgacgtcgtcgtcttcaggtcgccgagggaccatcgtgaactggtggtgaagaggctgattgcgctgcctggggattggatccagatcccggagaagcaggagatccagcagatcccgcaggggcgctgctgggttgaaggtgacaatgccgccaccagctttgactcgagatcctatggccctagatctgtgccactatataaccatggagatccctttttgcaaaagctagatgtgcaagtccgaatgctggctccagaagaagctacgtggagtcatcacactcaggcaatacaggtgtgtgaaaggaggagggatcacgggccggtgtcactgtcttgtttgtaaagatgtgcctccaaattaatccgcaaaactggaggggcaaaggcatgatcgcaaagggggaaaaatgaatcggtgtagttaattgtcatgtctttgctagcgttgccttggaaatttaagataacagtcaatttaagtcttgagagttgtctctgtttgcttttatcttttatcaagccgtagtgtcaagtgctgctccgaaaatctttggttcaagttcaataatactattggtaactagtttttttatttgcccatatcatattgatcatgtaaggccgtgccctgcatagcgtgcgcgtaaaacactgttttgtattataaagtgcattatgcgtgcatgtaaaacactgttttatattgtagagtgcattatttatggtgtggagtttcaaatatggagtaagatagataagagatgagatagagagactgctgaagatagcgtaacaattctacttaacgtggactttttagattgttattgtgccattttcttataataaaaaaaagatgttgtattc

SEQ ID NO: 14042 - DNA, 1974 bp, Zea Mays
cttggttcaactttttttggtatgttttgggcttggtgatactgtgtgtagcgcgtggtctatatcacgcgtttgacgtttgtcttctgccagaaaggttatagatagcattaaatatttacgtttgcggtgagctgtatccagaattttgcttaagctgtacttgatttattatttggaatgcaatacaaacaacggaatgcttcacatacaacacatttgtaaaactgcattcaagacaggtacccaacccctatgattaataagtgaatttccacccgagtgatttaactgtttaattcccttggtgtaatgtggttgtacaaatggttggcaacactcaaccaacatgtggtgtgcaactcatacaattctatctggcatggctcaagcgagtcataacacagcaaaaagaactttataggcaagttatatcatagaaatggttgtcattatttaagatatatatatataatgcaagcctaatttcaatttcaaattatgtacattgaaatcacaaaattttatttgaatattcagataaagtaagcaatagtggtaagaaatgtttgacttgcaatggccaacttaacatattataagttactgttccaacagtagatatacaattatgctctaaacattagctgttgcatatcaaactacatcaaaattgatcttaccattaggaattatatggacattcatccaaatttcttgtaacataccggtttttgtcgttttataaaaagaccaactttcacgaaaaaactgcatgaatgtgtgtaaacagttggtcaaacataagttaacttttccaccttgtctcactttcaaaccacaatttcaaaatcgtttgcaacacaaatccttatagtgatgttgaccaagtcaacactatgataaaggtgaatcaaaaataaaataatttcgagaaaaaaaactttgtctaaatttgagcctacactcgaattcaacatgcaactctcacaagcattttctattatttataaaatgaaacctaataactctctctctcatctttttcaaaagaaactattaaatcaggtagtgctcttcacaaagtgtaattgcttgagtattcgattcgtattttggattaggttttggctttgggttagagtttgttttctctaaaacaacagagctgaaaaataaggaaaccctccttccttctctatccggcctgcagccagcttggcggttggcccactctgcctcctccctgctgtggcccaccacccccaccagcccaactacacgctgacccagcagcccagacttcacctcagccagcaggtgacccaaaccaccaagcagcccatgcagcccagctcccacagcctgccaggccggccgccagcgccctagggaaaccctaggcgcgggtgctcctgggagggagccatcaccaccgtatcttcgctctatggttgcgcccttagcattcgtgccactcccgatagctccctggagccctccctaatgtgtgctacgtgacctcgccaaacatggatggcgaggatggtcgcctcctttaaatttcatgtgcttcaattagtttcccctctccaaacctcaaatggtgaagtgggacatgtgcttcaatttatgtatgcaacaactgtgtataatattataccaacttatctaatataccagctttgaatttgtctattggatgtctatttccgaattaagtttctatctcccgttcgtttccgtcaaattccattcgtattagttcattttcgtctgcatgtcctgatcctattttcgattttaacttatccaaacgtgattcatccctccccctatacccgggtatggtcggtccttgtgcaacaacattatcacataccttttaggttgcagctgtcagatgaaaagttgaccatgttgatcatcattttatccaaattgtgtccggagttattgaatttctctgtccta

SEQ ID NO: 14043 - DNA, 1374 bp, Zea Mays
catacatcggtgtgttgcggtgagagccggaatatacccggttgctcccccttggatccttgtttgcttcctgctgcctggccttctctcctccccaaaatcaatcgcccacaaaggagagccaggcagccagccaaatcttccacctcctccatttccagccccgtccccacaccagctcgcgtaacctcctgcccatggctggaggcggcggcgcaggcgcgggctcgtcgtccggcggcggcggagggggcggcagggagggcgactgggactgcggcagctgcggcaaccgcaactacgccttccgctcgctctgcaaccgctgcaagcagccgcgcctcctcgtcgaccccaacaccccgcgcgactccaagtggctaccccgcgccggggactggatctgcaccggtaacacctctcctgccacgctacccttcattattacccagccctgaatcacccgtcacttgttgtagatgctggctctcatccatccctatgcagcgcattgatagtctagtgaatctagcatttctccttcatcccttgtgttcgctctaggtttagtatgttggcatagccctggttattattgtagacttcttagctagactttgggtctgtttggattcaagatctaattactagctagctaaaattagctaaaattgattctagtgcatccaaacaagagggctaatagacgtgataattttttagccaagtttttaactagctgttagccaactagctagccaaactcagctagattttaacccatctagtagccctaactcatccaaacatgatcttttctagtcatgcagacaacattttaataaggtaagttagttgcattttaaatgatgagtgtttattttttaaaacagaacaggtgtaaataaaggaactagaaacttcattcaaactaagaaaggaaactctacaaattatttgaccaccgctccttaagctttccatgcaaatcagttcattcaccctctttgatctatatttttttttgaccaaactgtatacctctcttataagcacggtaatcagggtatttagtactactatatgttctgaaagtatcttggatgatctttgtttgtgttttaattgttgctactacctattagaaatattttcattattccttctgtttattttgttcattgaatgctgctatatgtagataatattagaaaaaaaactttaccaatgagtgtgctaagtaatgactagtgtgcgtgtgtctattcctttctatgggtttgtgcgtgatggctggtcatggtggtggtgggtgtgggtgtgcttcggtgcgttttgctgcctactgtgctggtgggtttatgcggcaaatgg

SEQ ID NO: 14044 - DNA, 1391 bp, Zea Mays
catacatcggtgtgttgcggtgagagccggaatatacccggttgctcccccttggatccttgtttgcttcctgctgcctggccttctctcctccccaaaaccccgcgcgactccaagtggctaccccgcgccggggactggatctgcaccggttgcagtaacaataattatgcatccagaaagaactgcaaaaagtgtggcttgcccaaggaggaagcagcaatgccagcattgcaaatggcagggatgactatgccaacttatgcaacttatattgcaagactacaaagccttgctgcttctgcttctgcctataagatgaactttgggatggctgccaattcacctttgcagcagcaactacttgcaaatgcaaactggccctatgggatggctggtagatatgggatgcaatcttctggttggccatttggcaacggcaacccaaatcagtttttaggtgttccaaaggattggcgtaatggagattggctctgcagctgtggatttcataactattcatctcgtactcagtgcaaagagtgtggtgcacctgtaccatcgggcattccctccacaacaatgaaagctacatctgatgcctcttccacattaggaactaagcggttggcttcagaggacctggccaatgactgggataataaaaggctaaatccaggaaatgacaattatccactttcaacaggagctgcaaataatttatttttgggtattgagcaaggagctggaagcagcaatggccagtctgcctttcccaagtttgacaacgggagctcaatggcattaccatctgggcagggaatgtctggtcttatgggaaaaggggcaaaatggcgtgacggggactggttgtgcaacaactgcaacaatcacaactatgcatctcgtgcgttttgcaacaggtgcaaaactcagaaagaatctgcagttcaccctggtgtgttatagcttgctgttggattattttgttccaggatatgttgctgcctgttctagctccttcctcaagactgcggtttgagttttttcgattctgcagtgtttttgctgctctcaaatgtttgtctcgatatttcattagtgcttgttgaagttcccccatttgtttatggtataagcgcttgaataaaatgtttctggaaagtaccggcctacaatctggattttggcaaaataattgaattagttgttgtacaatgaagcaaattgtcttacgttgtactttatgaactctggagtattatcactcgtcgggttgaaaaggggaactatacaatgtaatttcagtacagattattattttttcctgagactccagttgtgctgttatgcgagttttgcccattcagaatacttttgatgcattcatc

SEQ ID NO: 14045 - DNA, 1302 bp, Zea Mays
catacatcggtgtgttgcggtgagagccggaatatacccggttgctcccccttggatccttgtttgcttcctgctgcctggccttctctcctccccaaaatcaatcgcccacaaaggagagccaggcagccagccaaatcttccacctcctccatttccagccccgtccccacaccagctcgcgtaacctcctgcccatggctggaggcggcggcgcaggcgcgggctcgtcgtccggcggcggcggagggggcggcagggagggcgactgggactgcggcagctgcggcaaccgcaactacgccttccgctcgctctgcaaccgctgcaagcagccgcgcctcctcgtcgaccccaacaccccgcgcgactccaagtggctaccccgcgccggggactggatctgcaccgctgtggatttcataactattcatctcgtactcagtgcaaagagtgtggtgcacctgtaccatcgggcattccctccacaacaatgaaagctacatctgatgcctcttccacattaggaactaagcggttggcttcagaggacctggccaatgactgggataataaaaggctaaatccaggaaatgacaattatccactttcaacaggagctgcaaataatttatttttgggtattgagcaaggagctggaagcagcaatggccagtctgcctttcccaagtttgacaacgggagctcaatggcattaccatctgggcagggaatgtctggtcttatgggaaaaggggcaaaatggcgtgacggggactggttgtgcaacaactgcaacaatcacaactatgcatctcgtgcgttttgcaacaggtgcaaaactcagaaagaatctgcagttcaccctggtgtgttatagcttgctgttggattattttgttccaggatatgttgctgcctgttctagctccttcctcaagactgcggtttgagttttttcgattctgcagtgtttttgctgctctcaaatgtttgtctcgatatttcattagtgcttgttgaagttcccccatttgtttatggtataagcgcttgaataaaatgtttctggaaagtaccggcctacaatctggattttggcaaaataattgaattagttgttgtacaatgaagcaaattgtcttacgttgtactttatgaactctggagtattatcactcgtcgggttgaaaaggggaactatacaatgtaatttcagtacagattattattttttcctgagactccagttgtgctgttatgcgagttttgcccattcagaatacttttgatgcattcatc

SEQ ID NO: 14046 - DNA, 1623 bp, Zea Mays
catacatcggtgtgttgcggtgagagccggaatatacccggttgctcccccttggatccttgtttgcttcctgctgcctggccttctctcctccccaaaatcaatcgcccacaaaggagagccaggcagccagccaaatcttccacctcctccatttccagccccgtccccacaccagctcgcgtaacctcctgcccatggctggaggcggcggcgcaggcgcgggctcgtcgtccggcggcggcggagggggcggcagggagggcgactgggactgcggcagctgcggcaaccgcaactacgccttccgctcgctctgcaaccgctgcaagcagccgcgcctcctcgtcgaccccaacaccccgcgcgactccaagtggctaccccgcgccggggactggatctgcaccgaaagaactgcaaaaagtgtggcttgcccaaggaggaagcagcaatgccagcattgcaaatggcagggatgactatgccaacttatgcaacttatattgcaagactacaaagccttgctgcttctgcttctgcctataagatgaactttgggatggctgccaattcacctttgcagcagcaactacttgcaaatgcaaactggccctatgggatggctggtagatatgggatgcaatcttctggttggccatttggcaacggcaacccaaatcagtttttaggtgttccaaaggattggcgtaatggagattggctctgcagctgtggatttcataactattcatctcgtactcagtgcaaagagtgtggtgcacctgtaccatcgggcattccctccacaacaatgaaagctacatctgatgcctcttccacattaggaactaagcggttggcttcagaggacctggccaatgactgggataataaaaggctaaatccaggaaatgacaattatccactttcaacaggagctgcaaataatttatttttgggtattgagcaaggagctggaagcagcaatggccagtctgcctttcccaagtttgacaacgggagctcaatggcattaccatctgggcagggaatgtctggtcttatgggaaaaggggcaaaatggcgtgacggggactggttgtgcaacaactgcaacaatcacaactatgcatctcgtgcgttttgcaacaggtgcaaaactcagaaagaatctgcagttcaccctggtgtgttatagcttgctgttggattattttgttccaggatatgttgctgcctgttctagctccttcctcaagactgcggtttgagttttttcgattctgcagtgtttttgctgctctcaaatgtttgtctcgatatttcattagtgcttgttgaagttcccccatttgtttatggtataagcgcttgaataaaatgtttctggaaagtaccggcctacaatctggattttggcaaaataattgaattagttgttgtacaatgaagcaaattgtcttacgttgtactttatgaactctggagtattatcactcgtcgggttgaaaaggggaactatacaatgtaatttcagtacagattattattttttcctgagactccagttgtgctgttatgcgagttttgcccattcagaatacttttgatgcattcatc

SEQ ID NO: 14047 - DNA, 881 bp, Zea Mays
ctactgctttcacatctgttggggttttctgccaacttctaccgagttacactggttagactgttggagaaactctcatcatcagtctgtacaaaaacggcattaggaactaagcggttggcttcagaggacctggccaatgactgggataataaaaggctaaatccaggaaatgacaattatccactttcaacaggagctgcaaataatttatttttgggtattgagcaaggagctggaagcagcaatggccagtctgcctttcccaagtttgacaacgggagctcaatggcattaccatctgggcagggaatgtctggtcttatgggaaaaggggcaaaatggcgtgacggggactggttgtgcaacaactgcaacaatcacaactatgcatctcgtgcgttttgcaacaggtgcaaaactcagaaagaatctgcagttcaccctggtgtgttatagcttgctgttggattattttgttccaggatatgttgctgcctgttctagctccttcctcaagactgcggtttgagttttttcgattctgcagtgtttttgctgctctcaaatgtttgtctcgatatttcattagtgcttgttgaagttcccccatttgtttatggtataagcgcttgaataaaatgtttctggaaagtaccggcctacaatctggattttggcaaaataattgaattagttgttgtacaatgaagcaaattgtcttacgttgtactttatgaactctggagtattatcactcgtcgggttgaaaaggggaactatacaatgtaatttcagtacagattattattttttcctgagactccagttgtgctgttatgcgagttttgcccattcagaatacttttgatgcattcatc

SEQ ID NO: 14048 - DNA, 881 bp, Zea Mays
cacatctccaggttcgagcgtaaaaatcttaaattttgagcataaaacccctcagttataagcgtaaataccgagccaatgtgagaggttcatatctctgcattaggaactaagcggttggcttcagaggacctggccaatgactgggataataaaaggctaaatccaggaaatgacaattatccactttcaacaggagctgcaaataatttatttttgggtattgagcaaggagctggaagcagcaatggccagtctgcctttcccaagtttgacaacgggagctcaatggcattaccatctgggcagggaatgtctggtcttatgggaaaaggggcaaaatggcgtgacggggactggttgtgcaacaactgcaacaatcacaactatgcatctcgtgcgttttgcaacaggtgcaaaactcagaaagaatctgcagttcaccctggtgtgttatagcttgctgttggattattttgttccaggatatgttgctgcctgttctagctccttcctcaagactgcggtttgagttttttcgattctgcagtgtttttgctgctctcaaatgtttgtctcgatatttcattagtgcttgttgaagttcccccatttgtttatggtataagcgcttgaataaaatgtttctggaaagtaccggcctacaatctggattttggcaaaataattgaattagttgttgtacaatgaagcaaattgtcttacgttgtactttatgaactctggagtattatcactcgtcgggttgaaaaggggaactatacaatgtaatttcagtacagattattattttttcctgagactccagttgtgctgttatgcgagttttgcccattcagaatacttttgatgcattcatc

SEQ ID NO: 14049 - DNA, 503 bp, Zea Mays
gagtacccttagcgcagtcgcgtggaagaagacaggtgcaaaactcagaaagaatctgcagttcaccctggtgtgttatagcttgctgttggattattttgttccaggatatgttgctgcctgttctagctccttcctcaagactgcggtttgagttttttcgattctgcagtgtttttgctgctctcaaatgtttgtctcgatatttcattagtgcttgttgaagttcccccatttgtttatggtataagcgcttgaataaaatgtttctggaaagtaccggcctacaatctggattttggcaaaataattgaattagttgttgtacaatgaagcaaattgtcttacgttgtactttatgaactctggagtattatcactcgtcgggttgaaaaggggaactatacaatgtaatttcagtacagattattattttttcctgagactccagttgtgctgttatgcgagttttgcccattcagaatacttttgatgcattcatc

SEQ ID NO: 14050 - DNA, 2499 bp, Zea Mays
ttcttagacttcttggagtgcacccatggacagaactcactcctcttgtacaatgctctacactttacaatggaacattccaaaagaatggtatttgtcatttagctctacacccaacaacaggtccagtaccggtataatatcgatgtcattgtctcgaatccatggacgagttaaatttcaaaaaggcttgtccgagcatgtcacccagccggagttgggcttctgtggagaggtgtagttggtcgtcgcggaggggcaatcctatcgcgtctacaagaactacgttaggaagcttgatgtttctctgagcctccctgacgatatcagtgtaattcccctctcctgatgcaagaccaacctgaaattaacaactgccatatgagtttcaggggggagggggaggcattatatatactgtccacgatttttttgactaaagacatttgggagctgaaattaaatgcaagagagcaaagatttgcttaaatgtgggaaacaaggacataacacgtttttccaagatttttaaagctttactaaaatatagattgtttcccagtcattgtgcacagaaataataatagagaatattcttttccatgacatcacatgtactgaaccttcataaggtcaaagtactgttactggactccattccatatctcaactgaagcggtgcaggcgtggaacccagcatcacagctgtcatgtgcattattataataaagggagtaaactgaagagtgacaagcaacaaccttcttgctcctagtggtaaagtgccctccttagacattcagatcagcttgttcaagggagggaaaaaaaggaaaaagaacattcggatcactaaacctgataaaaaggatttatcatacttctttcaaacaatgttgaattggtcatcagtcccatgctctaatcataactataaaaaatataaccactttgagtcgaaggcaagaaatatgatagtgatgtagaagtcatacctttttattaggtagggtgtattgtaatgtattgcttggagaaagacaatcttttttttcaaaatgaagttcaacaggagccaccgaatttctcaaatttctaggcaaatggcagctttggaggtattgttctgatgagtttggtgtctctggtatgctgccattttctgtgacatctacctttggttggacatatcgtttcatggaagacttggtagctaaacgtacgaatggtttcctttctataataaaattgctcacagaagggtggctctatcaaccaagttagcacattcacaactagagtatttcagtgagtcataagcagcatttcgttacttacattgaaaccttactagcacatatgtttcagtcactcactcattttttgtgtggaggtttttatgttgcatattcttcgaatctacaaatcgagtcaactaaacctatgacaatagcactctgcatatcaatcaatagcgccttcaatcaagatcttaacattttaaaatacattcatgtaggttgagttctacgaactcagagggacatatgtttttgccttcaatcatgtatctcttgacattttgaaatgctttcatgtgagttgagtacaatgaactcaaaggggcatacatttccatctgattatgtcttagacatgatccttttgaatctggcttcattttcaaatgaatgcaaaagagcagtaaggtgaaagtgtgatatgagtatgactgccatgtacagcactctttccccatatactaggccaattggcaagctatttatttttaataattagcgaagtcaatcacaaatgaacactttgaggttgtggtaagcaagatgtccctcactttaagctgattttcaacagagttcctgttgaaataatccttgtgcatgggtcttagttagtttacttaaggctgttgttttttattcccaggttaggcgtatagtcatctattggctgtacgtgtagtcgtggccggcatgcctatgtgtgggatggcacacaaagtggagggacgtgccgtgcttctcgggtggtcgttggccacgttctgttgaatcctttttattcagtaaacagagtcagaaaagttgcgcagttttacgcagcaccaaaaatcagagtgtgcccaattctattcgtgtgagttctgtgtgtttgtgaaaggctgcagggggagctcgccggcaacaggaggtgagtcttcggcgaggtctgacacgtggcatcagagccgaggttggaggaaggtgataatgtccctgccgccggagcgctctaggacgccgcagtaccggcgagggcgttcaccgccgcgacggccgcggactcgcgaggtcgtcgtcgagcgcgttgtggagcgcgtcgtggcgcctggaacgaccacttatccgactctcacgaagacgaactacaatgattgggcgttactgatgaaggtgaagatgcaagcgcgcggactatgggaagctgtggagatcggcg

SEQ ID NO: 14051 - DNA, 815 bp, Zea Mays
ccccaatcccctaggcctccacttctccgattggggcgatttcatggcaagcgggcatagatccgacggccgctctgtcctctgcgcctccactgccgctctccttgtcagtcgccaatggccaggaggaggaggaagggtcggccgggccaccgctggtggccatggcatcccagtgtgccccgcccttgcctcctcggccacgcgccgccgcgccgttcctcctcggccacacaccgccgcacgcccgtcctcctcggtgcgccgccctcaccccctcggtgcgtgccgctgcgcgcccgtgcttcctcgcctccacgcgcgtcctgctgagaccacagagcgaagaagccccagcctcctgtagctggtctgcctctgaccctctcctctgcgcttcccctgcgtcggccctgctcgtagcttggaggcggcggcattctccggcaatggggtgcaaggcgtgcgacaagcccaagcccaactaccgcaagggcctgtggtcgctggaggaggaccagaagctccgcgactacattctcctccacggccacggctgctggagcgcgctccccatgaaagccggtaccaatgtcaagatagctgccattccttcaagcgtcgtggttctgacttcagagacctttgactcaattgtccttgatgagttttatgccccatggtgtggtcactgcaagcatcttgctccgatttatgagaagctggcttcagttttcaagcaggacgacagtgttgtgattgccaatcttgatgctgacaagcacactgacttggatgaaaagtatgcattctga

SEQ ID NO: 14052 - DNA, 1966 bp, Zea Mays
atgcctcctggtcgtgagaaggttggagtcaaaaggccacatggacctcagctatcagaaccaccattgcatccatacgaacaactgcgtctaagacaatgtatgaggaataattcaaggctacaacaattaggaatccctgctttatcaagcatgcttgcaagcacaaattctatttctcagaggaataggccaagtcatagaaatagtgaggactctgagtctgattatgacatttcacaagatgagactggtgataacaatgttaaggtgggctcaaaggaatgtaacataagaactactgataattctcttggtgcaatcaagctctggtctaagagagtttttgcgcaacaagaaactactagaattacaaggtcaaagaaaaatattgctcaacctgatgcaactcttacaccaaggcacaacattgattaccacacacagggtatagttgaagctaatggccatgcccatttggatgagaacactaacatgaccaatgaaggtcatgttgctccttttgatgggaagaaccctacaggcaatgaagataatgtggatgtcctagctgataacaacatgacgattggaggtcaagttgatgacactaatcagatgtcgaacggagatttagaattaggtcagaatgatcggtgggaaaggggaatcaatatgggacatggtcttcatagaattaaccgaggtttgcgtggaaagttgcaagttgttattcctgaagggaagataaggcctatggcaccacttgttgctgctaagtttgcaactgaatgcaacattgttgtgaggaaccatgtgccagtgttcaaacattggaaggattacaagaaccattcaggcctattcaatctatttacaggaaaacttagtgcaaagtttgacattaacacaagtgatgcaccagttcaaaaggcttgttcccagatgatgaagagtgcagttcgacaacaacgataccggctcaagaaaaagtactttgatccttttccgctacatctagtggcaaaaaaatctccaatcagatctatgactgatgaagagtggaatgaacttgtggagtattggaagagtccaaaaaagtggtatgagacatctcaaaaaaacaaagagaatcgatccaaagttaaattccatcaaacaactggctctcgtagctacatggttcatgtagaaaatttgggagataaatacattgatcaagaacctgatgcactggatttatttaaggagtgtcactacagcaagataaagaaatgctattcatcttctgttcaacaagttatagtaagattgttataataaaaaagttctcattgaatgcttatggtttcttgatctgtaaccatgtttgtttcttgcatgctagactgaaatagaaaacaagtggtctacaccaacagaaggtgaacaagaaatgtttgtgactgaagttgttgctgatgtacttgctcaaaatacaaagaaaaatttgttccttcaaaatgtggggatacaaagtgcttatccaaggtctagtgtaagaaatatcgaagcacaacttgaagtagagaagagagcaaatagtgctcttcgatctgttgtcaacacccaacgggaggaactagaagtattgtcaaagcaaatgcatgaagcagaagagtcacggatcaaggagcaagaggaattgaagaagaggcaagttgagatggaagcagagatgaagaagaggcaagctgccatggatgccaagctccaacttttgtttagtaaatttcaaccacgttagttgcatgtgtggtatgtgaagtcaggttcaatataggttttggtgttgtagtcttatgttattactgtgatggagtgactttggatggcaacttgatttgtgttggaatgatattggttggcaattttatccttgtgatgttattatattattgatgttgagatattattttgaactgtg

SEQ ID NO: 14053 - DNA, 1868 bp, Zea Mays
atgcctcctggtcgtgagaaggttggagtcaaaaggccacatggacctcagctatcagaaccaccattgcatccatacgaacaactgcgtctaagacaatgtatgaggaataattcaaggctacaacaattaggaatccctgctttatcaagcatgcttgcaagcacaaattctatttctcagaggaataggccaagtcatagaaatagtgaggactctgagtctgattatgacatttcacaagatgagactggtgataacaatgttaaggtgggctcaaaggaatgtaacataagaactactgataattctcttggtgcaatcaagctctggtctaagagagtttttgcgcaacaagaaactactagaattacaaggtcaaagaaaaatattgctcaacctgatgcaactcttacaccaaggcacaacattgattaccacacacaggctaatggccatgcccatttggatgagaacactaacatgaccaatgaaggtcatgttgctccttttgatgggaagaaccctacaggcaatgaagataatgtggatgtcctagctgataacaacatgacgattggaggtcaagttgatgacactaatcagatgtcgaacggagatttagaattaggtcagaatgatcggtgggaaaggggaatcaatatgggacatggtcttcatagaattaaccgaggtttgcgtggaaagttgcaagttgttattcctgaagggaagataaggcctatggcaccacttgttgctgctaagtttgcaactgaatgcaacattgttgtgaggaaccatgtgccagtgttcaaacattggaaggattacaagaaccattcaggcctattcaatctatttacaggaaaacttagtgcaaagtttgacattaacacaagtgatgcaccagttcaaaaggcttgttcccagatgatgaagagtgcagttcgacaacaacgataccggctcaagaaaaagtactttgatccttttccgctacatctagtggcaaaaaaatctccaatcagatctatgactgatgaagagtggaatgaacttgtggagtattggaagagtccaaaaaagtggagacatctcaaaaaaacaaagagaatcgatccaaagttaaattccatcaaacaactggctctcgtagctacatggttcatgtagaaaatttgggagataaatacattgatcaagaacctgatgcactggatttatttaaggagtgtcactacagcaagataaagaaatgctattcatcttctgttcaacaagttataactgaaatagaaaacaagtggtctacaccaacagaaggtgaacaagaaatgtttgtgactgaagttgttgctgatgtacttgctcaaaatacaaagaaaaatttgttccttcaaaatgtggggatacaaagtgcttatccaaggtctagtgtaagaaatatcgaagcacaacttgaagtagagaagagagcaaatagtgctcttcgatctgttgtcaacacccaacgggaggaactagaagtattgtcaaagcaaatgcatgaagcagaagagtcacggatcaaggagcaagaggaattgaagaagaggcaagttgagatggaagcagagatgaagaagaggcaagctgccatggatgccaagctccaacttttgtttagtaaatttcaaccacgttagttgcatgtgtggtatgtgaagtcaggttcaatataggttttggtgttgtagtcttatgttattactgtgatggagtgactttggatggcaacttgatttgtgttggaatgatattggttggcaattttatccttgtgatgttattatattattgatgttgagatattattttgaactgtg

SEQ ID NO: 14054 - DNA, 2935 bp, Zea Mays
aaaaaggttatcttacctctattattttatcttaattacatcaacgagtaccattacatctgacaagttcttctatttaagagactaagagtacgagtagtatcatatactatgctactagtactgctcacaaggctaggaacaacagcccggacccatgcatggggtcctgtgcgagtccaaacaggcagccactctgaggagcagggcaggggggctctgaaattgaagttgatagacacacagcatatatgataacagctttctactgttgcctgttagaaactgcagtgttattctttcactcgatcatcccttcacatgacacaacccaatgcaatcaaggctatacaaactcgttgctcccaccagcccagcagaaaccatcactaccaacatctatccagcggctaccagctgcacttggcttccttccttgttgctgcattgtagtagcttgatcatcttgaaaagcctacgctatcaacctccaacctgcaagctaagctaccatggggcgaaggaccaagcagtcttcttcgttgtcgttgttccggtactcgcggagccgttcttcctccgcgcccaccacgccgaggccggaaccagcagcagagcctcccgtcgggtgcatgtccatggtgcactacctcatcttcgcgcctggcgccggctgcgtcggccgcccgcccacttccgctaacgctgccgtcgtcacgccgcacgactgccacggcctcggcagcagcgacggccaccggcggtgcgacggcagcaagagcggattcgaggcgcccaggaacagcctcgatctcgacgctgacaaccccaacgacatccagattggcgtgcagatccagccggtgttcgacgccctcgccagcaggacaagcagcatgcgccgccccaccaagcccacggcgccgtcgtccgaggccgagacgcccaggacgcccagcctcgtcgcgcgcctcatgggcatcgacggcctgccggaccagcagagctcgccggcgtcggctccggcgcagcacaagaagcccggccccgtcagaagatcaagctccacgggcaaggagaacgacagcagccgctgctccccgccggcgtctagagagaagaagaagcgcgtgatccccgagtccatgaaccgggagccgctgcgccgcctcagctgcaacgtcgtcgccgaggcccggtcgctaccggacacgccgcgcgcgtccacgtcggcgcgggcgtcctgggacgggcccaggctgtcgctgcaggcgctcaaggagaacgtcctcgaccgggccgcgcactacatgtccatgcccagctcgcccacgtacctgtccgccgccgccgccggcaacaacaagaggaaagatgctgcctgcagccgccgccggcggcgggacgagaaggcggccaaggcgcacgcgcgcgagatcctcctccaggccaaggagacggtcgccagccgcaagtctggcaagaacaacgcatcctcgtcgccggcggcggagaaaaggcagagctgctttaacgacaacaaggagaacgtgccggctcccgctctggaggacgccaagctgcgtgtcgtggctcaacaaactgccaagccgacgactgtggccccaaagccaaacgccgagcatcacagccccagggtggcgctggcgccgaggcagcagccgtcgacccctccgccgccgcagcgtgccaagccgtcgcggccgccgccgccgccacctccgctggacccgccacccaccagagcgagaaaacctgacgggtgcgagcgcttcgctacgcggatcaagaagcccgcggcgtgcccggggtccgcgccgccgacgtcgtcgtcatcaacggactgctgctcggcagcggaggcccgcgcccgcccgccgtcgtcgccgctggaggaggaccccgagtacaggtacctgcggacggtgctggagcgcggcgggttcatgcggtcgccgccgccacggcggccggggcggagccactcggtggcgtcgccagtggacccgatcttgttccacctcctggagctggagctgcctgccgtcgaatcacaaacacggctcgggcccctccggcatcggtgcaaccggaagctgctgttccacctggcgcaggagctactggcagacctgctgctggacctggacgcgtcggcggcggcatcagtatcaccatgcgccggagcgacggcgacggggttgccgctgctggggaaggtgtggaaaagtgtgcggagcttcccggccgcggactgccgggtggtgggcgacatcgacgcgctggtggcggcggacctgaagtcgtcgaacgtgcggcagctggcgcggcaccccgcggtggtggaggatgcgggcgacgtggcggaggaggtggcggaccgggtcctggacgcgctcgtcgcggagtgcgtggcggaatctgtttctctctcctgcgccgcttagtcgcactcgtcgtcgtcacgtgcggcggcgaggtaaccgttggggcggatcgggattgggggcgcccgtgacgtcacgcggccagcggatctcgacggaaacagcggagggtgcccgggcgtcccgcggcgctcacgaccataccctgcggctgcgcctgctctgctctggtagcctgtttctctgaagctggggccaggtgccagagaccacgcagcttctctgttcaacggtcatgatgggaacgtcgcgaagcctacgctagcacgcctcgagatgggtgcctctgaatcgaccggcgtatcccctattcacctgtaccgtatcactactgtagctgtaggtacgcgcctctgaattttgtctggttggttcgctagtttgctgcgcttggagtttgagtttttgttggcctggccacatgtaagtacttcctcaaccgaagaatataactatgctacgctctc

SEQ ID NO: 14055 - DNA, 1092 bp, Zea Mays
tttcgacatcgtcactaaaaaacgccgcctaggacaccactttctcccccactcatcctctttctcccccacaagtttctccaaccctaatcgccgccgccgggacacaaccgccatcgacgacctgcctccttgaccaggtacctcaccgccgccactagacacatccgccgtcgacgacctgcctcctcgaccaggtacctcaccgccgcccccttacctctcatcgcgttgatgagctgcgtcgtcgtcgacttcactcgccgcatcccgctctatctcattgccatccgcatttctctcgccccttccacctaacacgccccatccacatttctcttgccaacccctaaaccctaaccatcgttggatttgggtcatcgccgacgaccttgatggtgaacacaaggaggcaaaacagtcagaaaggtccacaataagaagaaggtatcttttggttcactcagcctaattcttagttgctaactattaccaagctggatctaaccaaacctagtgatgctagatacatcattcattcatcgacacgcatgtgagtgcatcaccgtgtttataaaaatggcatggaaaggccaatgatgtagcattccacacactaggaaagctggtccccatccataactattgtgagagacacgattaatctaacatgcacgcgaaagaaatcctcaacatagggtgtgtaattgattgattgcttccattggcttttgcttgtattagaccttatgcaacacaatcaaagacagaataatcgtgtacaatatcttagtgtttagttatcctgcacaaacaagacacatttggtacagttgtttttggttccttacgttgtgttatatgcagtcacatccatgttttagtagagaacttatgtttctagtacaagtagaaagagatgagaatatctccactttttttgttcatcagctcgtgtaaatctacatcgcctaatcaatgtactagctagtactttgaacattgtttaagcctgcataaagatttccacaaccaaacaggcgaagtacactgcagaagcctagatagaggctaatgcaagtcaccaaagag

SEQ ID NO: 14056 - DNA, 2962 bp, Zea Mays
aaaaaacgccgcctaggacaccactttctcccccactcatcctctttctcccccacaagtttctccaaccctaatcgccgccgccgggacacaaccgccatcgacgacctgcctccttgaccagttcaacatgagataactgattatgagagaagacgggataaacaagtggaggagaatataaagaagatgcaagatttgggtctgaacaaatatacttctgttctaaataaatctttaccaccatctgcatcaacaaaggggaaaatgcagcaaacaagaaaactaatagttcagattcggattcatatgtctctgtctatctccttgacgatgatgatcaaggagatattgatgatgatgacactcaatcttatgagcagccacaacccctggcaattaagtatcctagaagtgctacaaacacaactcgtgcttcaaagaagaagacaaaccccaacatggctccaggaattaggttcagcaagagagtgagggcaggtccacaaccagaggagcaaacttcaaaaaggcttcagtctatagagacagatggccacaatgtacaggaaccaacagatgctaatgatgacataccaaacaaccctactacacctggacttgctaaccatttcagcagagctacagagaaagacatggcatccgctgctcatgacagtacaggtgatgctgaaggcaatgtagctagagatgaagaaactaaaggcaagttatagttttttcagtcaaatatggcatctcttttgctgatttgcatgaaacaaaacaatttcattattcaataaatgtgaattctattttgtagctcctacacagcgagcaccaaggagaccagggcagcaactaagggaaaacaactggacaggatgactaaagttatgcaaaggagactgcccatagctgttgaggaaggcaaaaaaaggccacatgaacctgttcaagctgccaagtttgcatcagaggctggcatcattattcgggaaaccatgcctatcctaactcattggaaagattacaaggacgaccagaaatactacaacaactttatgtcaccgctaaatttaagtgcattactgattctatggttcacttgtatactgcttaacctaaattgactaactatggaattgtcatatgcataggggcgcttgtccgttaacactgaggacaaggcaacaaaggaagcttgcaccgatatgctacgctctgcggtaaaaaaccagcgttatcggctcaagcagaaatacttcaatggtgtacctacaaatgagattaggacaacttctccttatcttacatgactgatgaacagtggagggcattagttgcaaagtggtctgatccaaagaacatggtatgggtatcttgtcatatattcttctttcactataagtttgcaaaggatcttcgcatattgaacctatgatctaatctgacatgttcattctcttgtaggaaataagtgaaaagaacaagcagaaccacagtaaagtcaagtttcatcaggctacgggttctcgctgctatgtggcacacttacatgcatatgtaagtaaatattaccttgtactactacctgcactcaacaacttctattgcatttgatctgagaaaactttgctgtgattgtttatccatgaaacagaagcagaagagaaacagagaagaacccagcttagatcagactgaataactagatgcggtggacgccttcaagacctgccataccagctccaaacgtggcctgagtgaacccgcaagagaagcacttgtaagttcatttgttttctttatttagtgtatttttatgagatcatatgaggcaacacagttcatcattcacttgaaatattgggtagagatcaaacacattttcaggacaatatctctaactaagaaagatttaggaagagttttggtactatctagtatccttccaccattgatgagtttcacattattgtcagctccaaatctactataatttgtcatctctagatgtcacaccttatcagtttttaattttcagaaaatagaaattttattgcctgattgtccaactgacagtcttctggaaaggaacatgatatcatagatcatttgtgcctaaatctctgcatttttacctctcaaaagcaaatgccaactgcaatcagtttctgtcagtgtaccattggttattatttcattataaacaccttgtgtcatatatcttcctcaaattattacaataactaacaattggcatattgctgttgctcattagcattatatgtgactgttttctatccatgatatttcggtctgatatggaggctttgagggctgaacctgttgctgaaggtgagatgccagcatccagtgtgcagcttgtgtccaaggtgttgtcccagagcagctcacaccaattcctgaagagtgttggcatcaaaacaccggcatcctccaagtcatcatcatcaaatcaaagtgagcttcgggaacaacttgcagctgaagcgacggctgctgttcaaggtgaactcaaccagctcaagaagaaatatgaagaagctgaggaacagcaggcgaggacacaaagggagttggaggagtacaagaagataacagagaagaacagcaaggagatggaggagaccaatgtgctcatcaagaagctcttgtccttgcatggtaacacttcttcttcgacatgagggccgctggtcagagctactgtgtttggcctgttctttgacaagggtacccaaaaactcaagttgctcgtgggtggcaactttttattatatgattttgtttgtgcaaacacaactgaaatgttaagtcaagtggtggtgctgtgaactgaaatgttaagtcaagtggtgatgttgtgaattgaattgtgtgcccattcctctgttctagtatcttttgcaatttccaataaaattattctctg

SEQ ID NO: 14057 - DNA, 2907 bp, Zea Mays
ctccttgaccaggtacctcaccgccgccactagacacatccgccgtcgacgacctgcctcctcgaccagttcaacatgagataactgattatgagagaagacgggataaacaagtggaggagaatataaagaagatgcaagatttgggtctgaacaaatatacttctgttctaaataaatctttaccaccatctgcatcaacaaaggggaaaatgcagcaaacaagaaaactaatagttcagattcggattcatatgtctctgtctatctccttgacgatgatgatcaaggagatattgatgatgatgacactcaatcttatgagcagccacaacccctggcaattaagtatcctagaagtgctacaaacacaactcgtgcttcaaagaagaagacaaaccccaacatggctccaggaattaggttcagcaagagagtgagggcaggtccacaaccagaggagcaaacttcaaaaaggcttcagtctatagagacagatggccacaatgtacaggaaccaacagatgctaatgatgacataccaaacaaccctactacacctggacttgctaaccatttcagcagagctacagagaaagacatggcatccgctgctcatgacagtacaggtgatgctgaaggcaatgtagctagagatgaagaaactaaaggcaagttatagttttttcagtcaaatatggcatctcttttgctgatttgcatgaaacaaaacaatttcattattcaataaatgtgaattctattttgtagctcctacacagcgagcaccaaggagaccagggcagcaactaagggaaaacaactggacaggatgactaaagttatgcaaaggagactgcccatagctgttgaggaaggcaaaaaaaggccacatgaacctgttcaagctgccaagtttgcatcagaggctggcatcattattcgggaaaccatgcctatcctaactcattggaaagattacaaggacgaccagaaatactacaacaactttatgtcaccgctaaatttaagtgcattactgattctatggttcacttgtatactgcttaacctaaattgactaactatggaattgtcatatgcataggggcgcttgtccgttaacactgaggacaaggcaacaaaggaagcttgcaccgatatgctacgctctgcggtaaaaaaccagcgttatcggctcaagcagaaatacttcaatggtgtacctacaaatgagattaggacaacttctccttatcttacatgactgatgaacagtggagggcattagttgcaaagtggtctgatccaaagaacatggtatgggtatcttgtcatatattcttctttcactataagtttgcaaaggatcttcgcatattgaacctatgatctaatctgacatgttcattctcttgtaggaaataagtgaaaagaacaagcagaaccacagtaaagtcaagtttcatcaggctacgggttctcgctgctatgtggcacacttacatgcatatgtaagtaaatattaccttgtactactacctgcactcaacaacttctattgcatttgatctgagaaaactttgctgtgattgtttatccatgaaacagaagcagaagagaaacagagaagaacccagcttagatcagactgaataactagatgcggtggacgccttcaagacctgccataccagctccaaacgtggcctgagtgaacccgcaagagaagcacttgtaagttcatttgttttctttatttagtgtatttttatgagatcatatgaggcaacacagttcatcattcacttgaaatattgggtagagatcaaacacattttcaggacaatatctctaactaagaaagatttaggaagagttttggtactatctagtatccttccaccattgatgagtttcacattattgtcagctccaaatctactataatttgtcatctctagatgtcacaccttatcagtttttaattttcagaaaatagaaattttattgcctgattgtccaactgacagtcttctggaaaggaacatgatatcatagatcatttgtgcctaaatctctgcatttttacctctcaaaagcaaatgccaactgcaatcagtttctgtcagtgtaccattggttattatttcattataaacaccttgtgtcatatatcttcctcaaattattacaataactaacaattggcatattgctgttgctcattagcattatatgtgactgttttctatccatgatatttcggtctgatatggaggctttgagggctgaacctgttgctgaaggtgagatgccagcatccagtgtgcagcttgtgtccaaggtgttgtcccagagcagctcacaccaattcctgaagagtgttggcatcaaaacaccggcatcctccaagtcatcatcatcaaatcaaagtgagcttcgggaacaacttgcagctgaagcgacggctgctgttcaaggtgaactcaaccagctcaagaagaaatatgaagaagctgaggaacagcaggcgaggacacaaagggagttggaggagtacaagaagataacagagaagaacagcaaggagatggaggagaccaatgtgctcatcaagaagctcttgtccttgcatggtaacacttcttcttcgacatgagggccgctggtcagagctactgtgtttggcctgttctttgacaagggtacccaaaaactcaagttgctcgtgggtggcaactttttattatatgattttgtttgtgcaaacacaactgaaatgttaagtcaagtggtggtgctgtgaactgaaatgttaagtcaagtggtgatgttgtgaattgaattgtgtgcccattcctctgttctagtatcttttgcaatttccaataaaattattctctg

SEQ ID NO: 14058 - DNA, 279 bp, Zea Mays
cggtgattaggctccacggattcctgcccacgcgcgcagtcgagctcccggcagaacgctatcgcggtgagtatccgccagcgcacgaatggggttggctgcggcaattcggggcggtgctgcccaatcctctgccgagcccggccgcgaatcaccttcgacgaagcaactagattccccacggtccgaagctctcctctctcccctttttctgcccagatgagcttagctccgatgtgcaggtggtaacttcctcgccccggccctttcgcgactcgc

SEQ ID NO: 14059 - DNA, 78 bp, Zea Mays
gtttcaaaccggaaagccgaaaggttatgacgaggctagggtcttccagggaaccttgggatttgtctcttccacgcg

SEQ ID NO: 14060 - DNA, 1936 bp, Zea Mays
ctctttttgtcttgtattccagggacctagcgaatgtggtttactaggacggacaaagatgcagtagcgaatcatgtgcaaaattccaaactgaagaatccgattgctgtgcctttgagccaccctgaccggcgaagcgcggctgacatttcccccccaccataccgccaccacctgagaagagatcgatccaatcagattaaccaattagcagggagggaggagaggggcaaaggcaatggccgggacggaggtggaggacccgccggcggcggcgttggaggtgcccgcgaaacgcggccttctgcggtacaactcgccgctggcgcaggtgtccctgctgggcctcatctgcttctgctgccccggcatgttcaacgcgctgtcgggcctcggcggcggaggccaggtcgaccccaccatcgccgacaacgccaacaccgcgctctacgcctgcttcgcggtgttcggcgtgctgggcggcgccgcgcacaacctgctgggcccgcgcgcgacgctgctggccggcgcgctcacgtacccgctctacgccggctccttcctctactacaaccaccgcccgggctcgcaggtgttccccgtcacggcgggcgccctgctcggcgccggcgcgggcttcctctgggcggcgcagggcgccgtcatgacgtcgtacccgccgcccaaccgccggggcacctacatctccctcttctggtgcctcttcaacctgggcggcgtcctcggcggcctcctccctttcgccctcaactacaaccgcggggacaagaaagggagcgtcagcgacggcacgtacatcgccttcatggcattcatgctcgtcggcgccgcgctcaccgtgctcgtgctgccgcccgccaggatcgtccgcgacgacggcaccagggccaccagggtcaccttctcctccccggccaccgagggcgccgagatcctcaagctcttcgccaactggaagatgctgctcgcgctgccggccgcctgggccagcaacttcttctacacctaccagttcaacaacgtcaacagcggcctcttcacgctccgcaccaggggcctcaacaacgtcttctactggggcgcgcagatgatcggctccgccggcatcggctacttcctcgacttcggcttcgccagccgccgaaagagggggctgttcggggtcgccgccgtcgccgccgtcggaacggccatctggggaggcggtctggccaaccagctcagctacaatgccgtgccggtgcccgaccccatcgatttcaaggacggccaccgctacgccgggcccttcctgctctacttcagctacggactgctagatgccatgttccagagccttatctactggatcatcggcgcactcgccaacgactcccaaatcctcagcaggtacgtcgggttctacaagggggtgcagagtgcgggagcggcggtggcatggcaggtggacaggcgccacacgcccctcatgtcccagctgatcgtcaactgggggctcatgaccatcagctaccccttgcttgcgctgctggtgttcctggccgtgaaggacgagagctactcggtttcgtcggtggaggacggccgggagaaggacagcaagctgtccgcgccgaccagcttccactgatgaagaagaagaaggatagaccaagatgcacgtcactgtaattgtaacacggtgtttccatccaagtaagttttagtagtagaaatcaagaaacaactggagcatactcagggtgtggcgttcgtttttaagtaagttgtagtagtattcgttttggtgattgttatttattatagcacctctgggttagcttgagcatcatgcttccttgtcagtggtgtgaccaagaaattggatagaatctatatgaaggaattcttttgctatttaaaattgttctctctc

SEQ ID NO: 14061 - DNA, 1036 bp, Zea Mays
ccgtggggccagccgtgggaggccgagcacaatcgtgggcctggaataccacggagctgctgcatgtcaactgggaaagaagagaacaaaaataaagcaagaggcgagaggagagagcaacgacgccatcggagggaggaaagagaagaagacgatccgctagcgtgtgcgtggcgacgagatgtggcggaggcgagtgggcgccctcctccgatctccacgaacttcttcctcggcctcctcggcctgccagagccgccgccaccatcttctccccagcgaggaacctcttgctctcaaccgtcttgccaggctcttcacgtcccaggctggaagtgatggtggcgatacccagaagccctttattgcttttgtcttaggtggtcctgggagtggcaaaggaacacagtgcactaagattgcttcggattttggatttgcccatctgagcgctggtgatattctccgacatgaaatagcatctggcagtgagaaaggggagttgatcctagaaatcataaaggaagggaggattgttccgtctgagataactgtggaactcatcagaaaagcgatggaaatgaacaatgctaaaagggttcttattgatggcttcccaaggtgtgaggaaaacagaatcgccttcgaaaggattgttggaacagaaccagacattgtgattttctttgactgtcctgaggatgagatggttaaacgccttctaggccgtaaccaggggagagttgatgataacattgagacaatcaagaagcgtctaaaagtgtttgaaagtttgaacattcctgtcgttgactactactcttcaaggggaaaagttcacaagataaatgccacgggcactgcagatgaaatatttgaagcagtccgtaggctgttttcttccttaagcattgattcggcggtgttctgatgctgaagaaaggtgcgctcagaatcagacagatcttgatcaagtatccacgttccttgacggtgcccgagccatgaaaactcttccctaaataccaggcttgac

SEQ ID NO: 14062 - DNA, 921 bp, Zea Mays
ctggaataccacggagctgctgcatgtcaactgggaaagaagagaacaaaaataaagcaagaggcgagaggagagagcaacgacgccatcggagggaggaaagagaagaagacgatccgctagcgtgtgcgtggcgacgagatgtggcggaggcgagtgggcgccctcctccgatctccacgaacttcttcctcggcctcctcggcctgccagagccgccgccaccatcttctccccagcgaggaacctcttgctctcaaccgtcttgccaggctcttcacgtcccaggctggaagtgatggtggcgatacccagaagccctttattgcttttgtcttaggtggtcctgggagtggcaaaggaacacagtgcactaagattgcttcggattttggatttgcccatctgagcgctggtgatattctccgacatgaaatagcatctggcagtgagaaaggggagttgatcctagaaatcataaaggaagggaggattgttccgtctgagataactgtggaactcatcagaaaagcgatggaaatgaacaatgctaaaagggttcttattgatggcttcccaaggtgtgaggaaaacagaatcgccttcgaaaggattgttggaacagaaccagacattgtgattttctttgactgtcctgaggatgagatggttaaacgccttctaggccgtaaccaggggagagttgatgataacattgagacaatcaagaagcgtctaaaagtgtttgaaagtttgaacattcctgtcgttgactactactcttcaaggggaaaagttcacaagataaatgccacgggcactgcagatgaaatatttgaagcagtccgtaggctgttttcttccttaagtgcttcaaattgccgtgttcgttcacctctgcgaagccttcctcgaaatttt

SEQ ID NO: 14063 - DNA, 1406 bp, Zea Mays
cggagctgctgcatgtcaactgggaaagaagagaacaaaaataaagcaagaggcgagaggagagagcaacgacgccatcggagggaggaaagagaagaagacgatccgctagcgtgtgcgtggcgacgagatgtggcggaggcgagtgggcgccctcctccgatctccacgaacttcttcctcggcctcctcggcctgccagagccgccgccaccatcttctccccagcgaggaacctcttgctctcaaccgtcttgccaggctcttcacgtcccaggctggaagtgatggtggcgatacccagaagccctttattgcttttgtcttaggtggtcctgggagtggcaaaggaacacagtgcactaagattgcttcggattttggatttgcccatctgagcgctggtgatattctccgacatgaaatagcatctggcagtgagaaaggggagttgatcctagaaatcataaaggaagggaggattgttccgtctgagataactgtggaactcatcagaaaagcgatggaaatgaacaatgctaaaagggttcttattgatggcttcccaaggtgtgaggaaaacagaatcgccttcgaaaggattgttggaacagaaccagacattgtgattttctttgactgtcctgaggatgagatggttaaacgccttctaggccgtaaccaggggagagttgatgataacattgagacaatcaagaagcgtctaaaagtgtttgaaagtttgaacattcctgtcgttgactactactcttcaaggggaaaagttcacaagataaatgccacgggcactgcagatgaaatatttgaagcagtccgtaggctgttttcttccttaagtgccagctcctctatctattacctgacgcattgaccaagagcgagtcgacaacaacctcaccagtgacaagctccaatggcgtcatccaactctgcagtaccgacacctctccaaggacaaagtgtcgatgtaaagctcaacgagaccaacttcgcgttttggaagcgcaagttttgtccattcttagaggtgcctagccacaaggctacctaaatggcacagttgtaacgttcaccaagatctctatcaagtaggatggtaagatgatcgaccatgtcaacccaatgtacattcgatggatcacgctccaacaacgggtccttggcttccatatgtcatccatgactcaagaagtcgtgggttaggttgccatctatgaaacacacgaaacaccccatgaggtgtggtcaaacctgcagaagacctacacgtcgctttcgagcccgaatcgtgaacacatggattgccctgacaacttcaagaaaatgtaatatgataatggttgaatatattgtcaagatgaaatctcttgtaggtgagatggcat

SEQ ID NO: 14064 - DNA, 914 bp, Zea Mays
gggaaagaagagaacaaaaataaagcaagaggcgagaggagagagcaacgacgccatcggagggaggaaagagaagaagacgatccgctagcgtgtgcgtggcgacgagatgtggcggaggcgagtgggcgccctcctccgatctccacgaacttcttcctcggcctcctcggcctgccagagccgccgccaccatcttctccccagcgaggaacctcttgctctcaaccgtcttgccaggctcttcacgtcccaggctggaagtgatggtggcgatacccagaagccctttattgcttttgtcttaggtggtcctgggagtggcaaaggaacacagtgcactaagattgcttcggattttggatttgcccatctgagcgctggtgatattctccgacatgaaatagcatctggcagtgagaaaggggagttgatcctagaaatcataaaggaagggaggattgttccgtctgagataactgtggaactcatcagaaaagcgatggaaatgaacaatgctaaaagggttcttattgatggcttcccaaggtgtgaggaaaacagaatcgccttcgaaaggattgttggaacagaaccagacattgtgattttctttgactgtcctgaggatgagatggttaaacgccttctaggccgtaaccaggggagagttgatgataacattgagacaatcaagaagcgtctaaaagtgtttgaaagtttgaacattcctgtcgttgactactactcttcaaggggaaaagttcacaagataaatgccacgggcactgcagatgaaatatttgaagcagtccgtaggctgttttcttccttaaggcatgcctccaccatgatagacgtaggtgtaagcatacccttacatttaggtcgtctccagcagagcgtgcatatgg

SEQ ID NO: 14065 - DNA, 846 bp, Zea Mays
gggaaagaagagaacaaaaataaagcaagaggcgagaggagagagcaacgacgccatcggagggaggaaagagaagaagacgatccgctagcgtgtgcgtggcgacgagatgtggcggaggcgagtgggcgccctcctccgatctccacgaacttcttcctcggcctcctcggcctgccagagccgccgccaccatcttctccccagcgaggaacctcttgctctcaaccgtcttgccaggctcttcacgtcccaggctggaagtgatggtggcgatacccagaagccctttattgcttttgtcttaggtggtcctgggagtggcaaaggaacacagtgcactaagattgcttcggattttggatttgcccatctgagcgctggtgatattctccgacatgaaatagcatctggcagtgagaaaggggagttgatcctagaaatcataaaggaagggaggattgttccgtctgagataactgtggaactcatcagaaaagcgatggaaatgaacaatgctaaaagggttcttattgatggcttcccaaggtgtgaggaaaacagaatcgccttcgaaaggattgttggaacagaaccagacattgtgattttctttgactgtcctgaggatgagatggttaaacgccttctaggccgtaaccaggggagagttgatgataacattgagacaatcaagaagcgtctaaaagtgtttgaaagtttgaacattcctgtcgttgactactactcttcaaggggaaaagttcacaagataaatgccacgggcactgcagatgaaatatttgaagcagtccgtaggctgttttcttccttaaggttatcaag

SEQ ID NO: 14066 - DNA, 993 bp, Zea Mays
gggaaagaagagaacaaaaataaagcaagaggcgagaggagagagcaacgacgccatcggagggaggaaagagaagaagacgatccgctagcgtgtgcgtggcgacgagatgtggcggaggcgagtgggcgccctcctccgatctccacgaacttcttcctcggcctcctcggcctgccagagccgccgccaccatcttctccccagcgaggaacctcttgctctcaaccgtcttgccaggctcttcacgtcccaggctgtgggatctcttctgtctccatgctccagggaagtgatggtggcgatacccagaagccctttattgcttttgtcttaggtggtcctgggagtggcaaaggaacacagtgcactaagattgcttcggattttggatttgcccatctgagcgctggtgatattctccgacatgaaatagcatctggcagtgagaaaggggagttgatcctagaaatcataaaggaagggaggattgttccgtctgagataactgtggaactcatcagaaaagcgatggaaatgaacaatgctaaaagggttcttattgatggcttcccaaggtgtgaggaaaacagaatcgccttcgaaaggattgttggaacagaaccagacattgtgattttctttgactgtcctgaggatgagatggttaaacgccttctaggccgtaaccaggggagagttgatgataacattgagacaatcaagaagcgtctaaaagtgtttgaaagtttgaacattcctgtcgttgactactactcttcaaggggaaaagttcacaagataaatgccacgggcactgcagatgaaatatttgaagcagtccgtaggctgttttcttccttaagcattgattcggcggtgttctgatgctgaagaaaggtgcgctcagaatcagacagatcttgatcaagtatccacgttccttgacggtgcccgagccatgaaaactcttccctaaataccaggcttgac

SEQ ID NO: 14067 - DNA, 2882 bp, Zea Mays
cgtaaactaaaactctgacatgtcatcataagcatctgcattaatgtgcttgttacacctagaatgcatttactaggttaaaattttcttttcaaaagtgtgatgtcgtgtgttgagtataggacttaggttgaaaaccttgcttgaaattgtggataaacaaaataactccgaaatcaaggacttgttcggaaggagctacatatgctaaagttggatcttagactagagagtaactttgtttctaatggatggatcaaagggatgaatccctggaagaatctgaaacacaaatgaaactcatttgaaaccctaaaactagcccaaaaggggaattcaaaatctagaaggatttagctaaaagtctatataccaaggttgtaggacttggaaaagtgaacaaatttcatatttggagattcctaagttgtgtggaagaatttggagttaagtacaaaaattcagttttgggttcattttggaattgctgaaaataatataaactagacaactttggacccttgtaacttctgatctaaaactattttgaagatgatcattataacaaagtcatagagctacatgaggagtacaagtttggttaagtcacctagccctaacactctatggaacttggagaaaaactagtccaatgtagagctgtcagaaattgtagatttcagacttagtgaaattcagattctgaatttcagcaattggagcaaactttgggctattgtagtttggaattcaagaggttttagttaatggttactatatcaaacttgtagaggaactattggagtataaactttattaagcaacttgcccctataaacatttggaacccaggaaaaagagtggttccaagtggtgctgctgtatttctgaattttcagattggaaacagtaactgaaactgaatttcagtgttttgatagcagttttgaagcctatttgtggttgttctataatgttttgtgctatggtatttatagagaagttgaagcccatatgatggtgaacaagtttctttaagtgactttggcttctttccacataaaaagtggataaaaatgcccccaaaatcagctgctaggcattcctataactgaatttggttcagttctgaaaactgaaatttgttgtatggtgccgagtttggagcccttttgtggttgtttataaggttttggactgagatttctatagaggaattgaagaccatatattggtgaacatcttctttaaaggtaatggacatgatcctatacgaaaattggagtaacagctgctccaagtttgactgtcaggtggttggtgacttagtttattcagaactgaatgtctgaaatcaatatttttagtgcagttttggagctgtgtagtgcctattctaggtggttttgaaccaaagtttctgcagcaagttttaagaccatatctaggagaacaaacttgtttaagcactactgggttggtgctacacaaatttgggagagaagttagctccaagatgggctgtcaggttgctttgactgaaatttttgttcagttcactgaaaccgaaattcagtaaaaggtactaattttggagctcatttgtggctaatccatttggttttgggctaaattttctgtatcacatttgaagaccagagtacattgaacaagttttatatagtgaggtggacttgatgctgcacaaaactgggagaaaaaggtgttcaaactacctctgtcagattggtgcagatcaggtctgatgcagtgactgtggttttggtttagtgttttccctagattttagagttaatttgtggttgatccaaggggtataagtctatggcctctgtggagataagttagagggttagttggtgaacaaagttcaccaagattgattccgtgatgttgcttggaagtagaagaaatgaaagggtggaaggaggggttctgttaagctgtggtagttcagtgttggtcaaaaggaatctgaaaaagatcaccccctgctgctctcacctatgagcttggatggggataaggttgaaaggtgtcactaaagatctagagaacattcactagtgcaaaatatccaagttggactgcagtgagcagtggggtgtttaattgtttcagttgtcgcttgcagttggggacaaaggggatatttgtgtgtgtagttgagatgagtatggagtgtaggattgaggtcttaagacaccaccctctgctggacgaaatatcaaggctttgaacctgttggaacctatccacaagtgatatttgggtgctgtaattgggagatgaccacattcaatgtctttgagctgtgctgtgaacctgtgtggcagtgagcatgtgagccacgtaatgaagtgcatgtgtggctggcaccctgagaacacaactccactgcatgctggacaggttcatgggacatctgcccatttcagcaagcttaaaaggcagggtccagtgaggtttcctccctgtctcaagctctattttcagaccacggaaaggagaatagagttcttgtgctcatactagagataactctcttcccagtctctagccttgatctgaaccagagccaagcacgccagccctctgcgtggtgaccattgtccacatcaccgtggccagaaaacgaagaagagatcgaagtgactgaagaaaagacatcaccacctttggaatctcaggcagagacttggctctacttcgacatctgcgagtccgagcctgactcacctactaacaaaggcaagccccggtgcatgcaacccctttccttgtgtttttaaatacttttcgcacactttaagtctagtgaaatgtgcattagggtcataggagttgtttgaaaccctttg

SEQ ID NO: 14068 - DNA, 3135 bp, Zea Mays
cgtaaactaaaactctgacatgtcatcataagcatctgcattaatgtgcttgttacacctagaatgcatttactaggttaaaattttcttttcaaaagtgtgatgtcgtgtgttgagtataggacttaggttgaaaaccttgcttgaaattgtggataaacaaaataactccgaaatcaaggacttgttcggaaggagctacatatgctaaagttggatcttagactagagagtaactttgtttctaatggatggatcaaagggatgaatccctggaagaatctgaaacacaaatgaaactcatttgaaaccctaaaactagcccaaaaggggaattcaaaatctagaaggatttagctaaaagtctatataccaaggttgtaggacttggaaaagtgaacaaatttcatatttggagattcctaagttgtgtggaagaatttggagttaagtacaaaaattcagttttgggttcattttggaattgctgaaaataatataaactagacaactttggacccttgtaacttctgatctaaaactattttgaagatgatcattataacaaagtcatagagctacatgaggagtacaagtttggttaagtcacctagccctaacactctatggaacttggagaaaaactagtccaatgtagagctgtcagaaattgtagatttcagacttagtgaaattcagattctgaatttcagcaattggagcaaactttgggctattgtagtttggaattcaagaggttttagttaatggttactatatcaaacttgtagaggaactattggagtataaactttattaagcaacttgcccctataaacatttggaacccaggaaaaagagtggttccaagtggtgctgctgtatttctgaattttcagattggaaacagtaactgaaactgaatttcagtgttttgatagcagttttgaagcctatttgtggttgttctataatgttttgtgctatggtatttatagagaagttgaagcccatatgatggtgaacaagtttctttaagtgactttggcttctttccacataaaaagtggataaaaatgcccccaaaatcagctgctaggcattcctataactgaatttggttcagttctgaaaactgaaatttgttgtatggtgccgagtttggagcccttttgtggttgtttataaggttttggactgagatttctatagaggaattgaagaccatatattggtgaacatcttctttaaaggtaatggacatgatcctatacgaaaattggagtaacagctgctccaagtttgactgtcaggtggttggtgacttagtttattcagaactgaatgtctgaaatcaatatttttagtgcagttttggagctgtgtagtgcctattctaggtggttttgaaccaaagtttctgcagcaagttttaagaccatatctaggagaacaaacttgtttaagcactactgggttggtgctacacaaatttgggagagaagttagctccaagatgggctgtcaggttgctttgactgaaatttttgttcagttcactgaaaccgaaattcagtaaaaggtactaattttggagctcatttgtggctaatccatttggttttgggctaaattttctgtatcacatttgaagaccagagtacattgaacaagttttatatagtgaggtggacttgatgctgcacaaaactgggagaaaaaggtgttcaaactacctctgtcagattggtgcagatcaggtctgatgcagtgactgtggttttggtttagtgttttccctagattttagagttaatttgtggttgatccaaggggtataagtctatggcctctgtggagataagttagagggttagttggtgaacaaagttcaccaagattgattccgtgatgttgcttggaagtagaagaaatgaaagggtggaaggaggggttctgttaagctgtggtagttcagtgttggtcaaaaggaatctgaaaaagatcaccccctgctgctctcacctatgagcttggatggggataaggttgaaaggtgtcactaaagatctagagaacattcactagtgcaaaatatccaagttggactgcagtgagcagtggggtgtttaattgtttcagttgtcgcttgcagttggggacaaaggggatatttgtgtgtgtagttgagatgagtatggagtgtaggattgaggtcttaagacaccaccctctgctggacgaaatatcaaggctttgaacctgttggaacctatccacaagtgatatttgggtgctgtaattgggagatgaccacattcaatgtctttgagctgtgctgtgaacctgtgtggcagtgagcatgtgagccacgtaatgaagtgcatgtgtggctggcaccctgagaacacaactccactgcatgctggacaggttcatgggacatctgcccatttcagcaagcttaaaaggcagggtccagtgaggtttcctccctgtctcaagctctattttcagaccacggaaaggagaatagagttcttgtgctcatactagagataactctcttcccagtctctagccttgatctgaaccagagccaagcacgccagccctctgcgtggtgaccattgtccacatcaccgtggccagtgtttgtttttattgtgtgagtagacaagcaagtgaccggagaggccggagcacatcaggtggaaaatactgagcaggagctcgctgaagaatctctagcaaatggctaacgacgaagatacccaaccccttgtttgtgacaatggactgtttcagtacaaaagtgttttataattcatcaaaaagaaagaatgtcaggacacaaactcattatgccatttcaatacagttcgttttatccattgtgtcacatgcaagcatgttctatttactttgttagtaaatcttgtttactgtaacattgtgcattgaatataataaatgaaaccaagccagtgacgatataatatcctagaatggcacattttagttataccaattagaacattactggtagtactggcagacgatgctttggaggtcaggaagcatgacgtcgtttccatgacagcgagcaaaggatcctgctggcggacgatgaac

SEQ ID NO: 14069 - DNA, 698 bp, Zea Mays
gttcaatcgctcggcattacctctaaaaatgccaacgtcgccttccagtcggtcggcattgcctccaaaacgctgatttcgtgttcaatcgctcggcattacctctaaaaatgccgacgtcgccttccagtcagtcggcgttacccccaaaacgctgatatagtgttcagccgctcggtgttgcctctaaaacgccgacatcgcctttcagtcactcggtattacctttaaaacgctgacgtcgccctctggcatcatctcaagtcgctcggcattacctctaaaatgccgacgtcgctttccaatcactcggcgttgcttctaaaacactgatacagtcttcggttgctcggtgttacctctaaaacgccgacaccatctacaagttactcggcagcaatttctggaagcatcagtttgatccccaagttattcatctactgtctcaaaggaatcagttttacaaacaagcaagacgagttatcaaggagaagccaacgtcattctttcattaaaagggaagataacaaacttacaaatcaactctttatgagttgacacttccctactattactacattacattactactactactacactacgctatactactctacattactactaccttattctaactatactatactaatatctaaaagaccagtggcatctagccactggccctgttgctg

SEQ ID NO: 14070 - DNA, 928 bp, Zea Mays
atacactcctgctccccgcttaggcggagacccgatgctgccacgtggcatactacatgcggtattagccaatgggctgaacctggcatgacgcctctgggatacgcgcgcctttgcattcattatggataaggcgtgcgcctaaccgttccactgacatgcggcgtgcccagtccacgatacgtgggccacgcaattactcgcacgttactatatcgagggcgatcactcaccattactcgtgcgggttactgcctatcaatgctgcatggactgcggtcatcatgactcccgctgattgctcatacgttactaaggcggaggatccttgtgtattgtcagcatttactattcacataatgtattactactattatacttctgggcccacatgttggggctcaacatccttgtatgtgcctcccttgaactataaaagggaaggcacacagcgttacaaggacagtctcaatcacaccgtcaatacaacttacacacagtggaggtagggtattacgctccggcggcctgaaccactataatccctcgtgtcctctcgtgttcatcccaccttccaacagacaggcaaaccgcttaggccccctcctcatcttaggattagggagggtgcgttctgccacccggccggtggatttccccaccgacaagtgccttcagacgcagcacactaaagcgattagggataagtcgacggctgaaaataagagccgaaacctcctcgataaagtgatggcgctaggaaaggaaaaagaggacctcgaccgccgacttaatgatgaaaaagaggatgtggaaaatgcccacacggaggcttagtctgcccgcaagcgtgttgctgacttggagctagagttgaagaatatgcgcagccaccgcgagaagacagagtctgccacccatgcttttc

SEQ ID NO: 14071 - DNA, 3472 bp, Zea Mays
ctctcgagcaggtcgcccagcttccacggccgccgccctccccccgtcccttgccacatcccggttcgctgacgccgtcctccgcccagcactccagcagctagctaataattcatctcgagatcaaggctgctactgtagggctagctccgcggcttcgtcgccatggatcttgtggccggcgccgtgggcagcatcatccgcaagctcggcgagctgctccaggcagagtacaagctacaggcgggcctgctagagcaaatcgaatctctgaaaaatgagctcgagagcgcgcacgcggctctccgcaccgtgtcggaggtgccgccggagcagcttgatccacaggttcggctctgggctcgtgaggtcagggaagcgtcgtacgacatggaggacatcctcgacaccttcctcgtcgacggcgccccggctgatggcctgggcaaaggtcgtcgtctcctgaagaagatggagaagctgttcagaaagagcaaggagcgccacgccattgctggcgccattcagaagatgaagggacggctccaggaagtggctgaccgccgcgacaggtacgccgttccggtggcagcgccagcgccggtgaggacgctggatcctcgcctcgtgtacatgcacagggaagcggcacagctcgtcggcatcgacaagaccaaggctgagctcatggccatgcttctgccgctgtcgtcatcccgctgccctgaggacgacgtcgatgtctctgccagcgacggtgacaagatgaagatagtttctgtggtcggagctggtggccttggaaagaccactctagccaaggccgtctacgatgagctcaaaccgcgatatgatcatggagcatttgtttcggttggccgaaaacctgacctggtgcaagtctttaccagcatcttcttccatctcgacgaacaaaaatacaatgccattcgtgaagtgaaggacctacagctgttggctggcgaactacgaagatttctacaagacaagaggtacttgatcgttatcgacgacgtttgggatacaaaatcttgggatacaataaaattagcttttgatcaaaagaataagcagagcagagtaatcacaaccactcgcaaccgacaagtagcttccagtgaggaggtttacgagctacatccgctctctcatgacagctcaaagaagctattttatatgaggctgttttggggtgaggacaaatgcccggctaatcatcctgaagaggcatctcaaaggattttggacaaatgtggtggtgtaccattagctatcatcacaatggcaagcttgctagtgggtaaatcgagagaatattggttggaggtgtgcaactcacctggtttctatcgcggtaaagataccaacgaacaagtagacgacaccgtgtggatactgtctctgagctattatgacctaccttcgtatctaaaaacttgcttattgtacctaagtgtgtatccagaagattatgagatcgagaagcatagattgatatggaagtgggtagctgaaggtttcatcgagaagaatgcaggaagcagcagcttgtttgagcagggagaggaatacttccatgagctcataaatagaagcatgatcgaggcgatggagttcgacgaagggtttggcatcataattggttgtcgcgttcatgacatggtgcttgatctcatccgtgacatatcaaacaaagaaaattttgtcactgtctcatatgatgatggtagaagaggcacaacgtcgtcatcgtcacgaaacgtggtgcgtcggctagctcaccaaaatagaagaatgacagaggacaatcctgtggagggcagcatgacacatctaaggtcactggttgcttgtgggtgtgatatggatggttgggtcatgcactcgagctctacgctgctattgcgtgtgctagctttagagcaatgctgcacaccaccatctatggacattggtcatcttggaaaactgcttcatctcagataccttgggctacgtggtactctcgtagacaagctcccagacgaaataggatccctcaagcttctgcaagcactggatttactaggcaccggaatatcacgacttccacggaccgtttgcctactaacgcagctgaagtacctatacggtgatgcatgcacgatagtgcccaatggtttcctcgggaaggtgacgtcactggaagagttgcatatacatcctcctagcgaaggtgacgagtacaaccaacaacagtttatgcaggatttgggcacccaccagggagaaattagggtgctcgatttgatgaggttcagagatgagtttgacgatctgagcatggagtctggtctagtgcaggccctaggaagtctgcacaagctgcagaccctactagtgagcagtgattacacgaagcaacaagtcgcacagtacagctgggacacggcggcccttccgcggtgtctccggatcttggtcttcgttgacctcaggttccatcatgtaccatcgtccatcaatcccgcgagcctccccaacctctcacgactggaattgtctgtgggtcatctagacgaggcaagtctgagagccttgggtgggttgccagggctcacctacctcacactaacggcggctgattggctgaagagctcatgcaaggcttcggtagttgatgtcgttgtcgctgatggcttcttcctcaagttgagatccctcaggctgtatggctggatgctccagttggtgcccagcgaggactcgactagtgtttcgttcaacatctggaaaggagatgaggacgttgtggcccttggtttctgcagaacaagtgtagcagcacctatgacctcctctatcatcatgccagacctcatagacctgtggttctatgtccctgttagagccttgtgtaagagtagaaatggaagcatctgtgacagcctcggctgggagtgcctcccttcgctacacaaaatcgatgcagttgtcgacagtaagggcgcctatatcggcgatgtgaagaaggtcgaggctgagatgaggcaggcagcaaaactgcatcccaaccaacccataattaatattctactactcaatcaatatatttgatgcaacacgaaccattaatcaggtgcctatctctgtatttgagaactagtcatggttcattagacaataatgcaactgattttaggcgtgcctgcctgttgaatataaatcaggttcgtctctagcttgtgcagcctagttttactcaaacacgctgacaccattgatacatagataaagatactgatgactggtttcttggaacagtctcctatatagaagctgtgagcataccaggcactcagccagcacaaaactagttttactcaaacacgctgattgttgtttcgtttagcttttggtgagtccatcgcgggtgtataaataatacctgttaaacatagaagtaaattac

SEQ ID NO: 14072 - DNA, 2284 bp, Zea Mays
gaaaagtgggtttcgccgaattgccattaaatataagggtttcgttcagatgacattatcaactgagacacacacgctgaaatgccatttagctatttaataaaaaggaaaaccgatttaaaacaggcgagctggtagatttgacctccttttctccattcctcctctccttctcaccaggatttgcagctcacgaggttgtgcttcgtcgagcatgacgggtggagtcgcgacctggcagagtcgtggtgaatgaagtccacactgaacccgccttcaccagcaaggtcagaggccatgcaagatgctgccttgatgccccgcgagaaggatggcgaggaggagaagcatcgtcgcttccatggcgtcctgctagctttccactcctacactagaacgcggtcaccccacagtgatctgggctgggtggtctggggccggggcagccaagggcgtcatcgtgcttgcaggcttgcagcagccactaagataacagagggtcaatctgaaactgcaagtgcaccagagggagttagtgtccttagaaggaattcagatgatgtgggatgggagtatggggctcttgttgatctaaacaacaaggacaaggtaaagtgcatactgtgtgacaagcaaaagtgtggaggggtttatcagttgaagcaacatatcgcccagaaaggaaagaatgtgaagaaatgccagtgcatgaagaccaccaaagagaagttgctggaggctcaagaaaagtgcaagaaagcactagatgaagcaaaaaggaaaagggaggagaagactgttcgtgagctagaacttagagaggaagttcatgtgtctagggttggagggtcagaggaagtgacttgtgttggaagcttagagcctcacaaattaggccccatggacaaatggacaaaagctattgatcctacagcaaccaaatctgaatctttgactcaacagaggctgaacaaggaactttggaaagaaagattacatgaggtgcataaatatattgcaagatgggcctttgaccatgcaatatcattcaatgcatgtgacaacgatgagttcaagcaaatgtgtgaagcaattggataatttgggcctagaattgaacctccaactatgtttgacctgcgagggagattgttggaagaagaatatgcaagaaccaagagtttgctgcaagaacgtgaagccgagaagatgaagaatgggtgctctattatgaccaaagtttggtcagataagaggagaagcataatgaatgtgtgcgctaattgtgctgatggaaccagttttatttcctcaaaagagatgtcagatgtatcacacacaagtgaagtgatctttgaactagtggacaaagcaatcgaaggcattggtccaaatgatgtggtgcaagttgtgactgacaatgcttctaacaacatgggagcaaagaagctactgcatgtgaagagaccacatatcttttggacctcttgtgcaactcacacaattaacttgatgctccaaggaattggctgttagaataagtctcgtggtctgtgggaaggacagtagcagtccttggcggtttttgagtgcagggacagcaacatctcaatctctttgactgcaaggacaatgtgggacagcagcagcagcagcatgtcagtcttttgactgcaaggacagcatgctgcaggcatctccttttccgcttttctagcatttggaggacagcagcttgctgcagttttcttttgactagagtacaacagcacctagtggttagtgcagtttgtaggacaggtagtgcagtttgtaggacaccatattcgcatctctaggaagcatatgttgcagccccatgggctataaatatgtatcacaacccttaaacaggtatagcattgtgtagtgtttgagaaaataaacagagaatcgccccaacccatagtgccatcctctcgatgagagtaagagtcatgatgcttacaattggtatcagaggcaggttgtcttgcagcctaaacatctcttgctcatctccttcccgcgcctctccatatactcagtcggcagcaagagctccaactgttccttcatctcctgctcggacgagcagcctttcatctgagagagcctcttccatacgcagcgacccctcgctagcacaccatgtcactacgctcgatcacttcgagtgcgcggcgccagcaggaggccgaggttgccgcggcacaagaacgcgagcgagcggcagcgacggctgcagcgacagcggcgagggcag

SEQ ID NO: 14073 - DNA, 2132 bp, Zea Mays
ggcggcttgcggcgattccgcggcgcccaggtgccccaggcggtgcggaggcgagccaggcgccgcgggtgcgcacgcgcgaataatggcgtcgagggaaagagcgcaaacggagagaataagccgcgcggcgcgcacgagaaagagcgcgcgcgggaataagccgcatggcgcgcgcgggagaggataagggcgctggagagaataagccgcacgccggcgacgcggctacagctcctcctgtcggtgactgcttgtgctgcaagtgtagctcctcccgccgacgacagctcctcccctgcttctccttcctcagtccaagcggccaagccccaagataacagagggtcaatctgaaactgcaagtgcaccagagggagttagtgtccttagaaggaattcagatgatgtgggatgggagtatggggctcttgttgatctaaacaacaaggacaaggtaaagtgcatactgtgtgacaagcaaaagtgtggaggggtttatcagttgaagcaacatatcgcccagaaaggaaagaatgtgaagaaatgccagtgcatgaagaccaccaaagagaagttgctggaggctcaagaaaagtgcaagaaagcactagatgaagcaaaaaggaaaagggaggagaagactgttcgtgagctagaacttagagaggaagttcatgtgtctagggttggagggtcagaggaagtgacttgtgttggaagcttagagcctcacaaattaggccccatggacaaatggacaaaagctattgatcctacagcaaccaaatctgaatctttgactcaacagaggctgaacaaggaactttggaaagaaagattacatgaggtgcataaatatattgcaagatgggcctttgaccatgcaatatcattcaatgcatgtgacaacgatgagttcaagcaaatgtgtgaagcaattggataatttgggcctagaattgaacctccaactatgtttgacctgcgagggagattgttggaagaagaatatgcaagaaccaagagtttgctgcaagaacgtgaagccgagaagatgaagaatgggtgctctattatgaccaaagtttggtcagataagaggagaagcataatgaatgtgtgcgctaattgtgctgatggaaccagttttatttcctcaaaagagatgtcagatgtatcacacacaagtgaagtgatctttgaactagtggacaaagcaatcgaaggcattggtccaaatgatgtggtgcaagttgtgactgacaatgcttctaacaacatgggagcaaagaagctactgcatgtgaagagaccacatatcttttggacctcttgtgcaactcacacaattaacttgatgctccaaggaattggctgttagaataagtctcgtggtctgtgggaaggacagtagcagtccttggcggtttttgagtgcagggacagcaacatctcaatctctttgactgcaaggacaatgtgggacagcagcagcagcagcatgtcagtcttttgactgcaaggacagcatgctgcaggcatctccttttccgcttttctagcatttggaggacagcagcttgctgcagttttcttttgactagagtacaacagcacctagtggttagtgcagtttgtaggacaggtagtgcagtttgtaggacaccatattcgcatctctaggaagcatatgttgcagccccatgggctataaatatgtatcacaacccttaaacaggtatagcattgtgtagtgtttgagaaaataaacagagaatcgccccaacccatagtgccatcctctcgatgagagtaagagtcatgatgcttacaattggtatcagaggcaggttgtcttgcagcctaaacatctcttgctcatctccttcccgcgcctctccatatactcagtcggcagcaagagctccaactgttccttcatctcctgctcggacgagcagcctttcatctgagagagcctcttccatacgcagcgacccctcgctagcacaccatgtcactacgctcgatcacttcgagtgcgcggcgccagcaggaggccgaggttgccgcggcacaagaacgcgagcgagcggcagcgacggctgcagcgacagcggcgagggcag

SEQ ID NO: 14074 - DNA, 1333 bp, Zea Mays
cctccctcgctttccggtgctgagcgtgcatcggcagagctgactgtgactggtgaactgaaggaaaggggaggagaaggggagggaagctttgggcgggagaggaagcctagcagcaacagtaggcagtagcagggttgaccggaggggcagtggagtctggagagtaacccaacaaccccctcctcccctccccttctgtcttattgccacctctccacgtctccaccaaacaaggcaacaagggagaagtagatctgcatctgcgagaggaggcagcgggggtggtgatgatggagagccagccgctgcaggccccgacggccacggctccggcccccggatctgcggagccagccggagctccgccggccgtcacccccggcaaggagttcacgcgcacctgcaagggcctcgtcgtcgtgctcatcggaggatacgtgctgctccagctcctcccttcgtcactcaactacctcgccatcatcccctccaagacaatcccctatgtatggaccgtctttaccgctggttacatcgagcaagtcctcccaggggccattggcagttctcttggtcttctcttttgtggaaaggacattgaaccagcatggggccgcaaggaattcttgaagttcattattttgatcaactccatctgtggcattcttgcattttgctttgctattggactctactacgtcactggaaaggagagcttcctaccagttacggaccctgtggccaacctgtttgataggctgttgtgtgcaaggtccaggcctttggaagtcgccctcccgatatcagatcctaccaaggcttcaagaagaagggagcgtggcgagagggttcttgaggaaaggttggcggctgacaatgctggtgacacagaggcctcgcctcgtggccatggcaccgcggaagactgagaactttcttgtgaccatcagctcctcttataggagccatggctttgctccctccagcgtttatagctctgcacttttgtcttctggagatggagctattcagttcacagcgaacgaataatacgatgttcttagtttctctttttttccgcttctttgtctgcgaggatttattggttaaattgtgtactagtcaattgttatggtacagcgaaaaagagagaagagggtgatggcatttgcagcgaggtgttgagattccgttgtagccatgcatttgcagccgattgtttggtactggtcaaagttctgtagtagtcatatactctgcttaaaatatagaaagaagaatggcttcgtcagtatcagatgttgagatatatatttcttttcttttagtg

SEQ ID NO: 14075 - DNA, 852 bp, Zea Mays
gctgtttttgcatcattcgcgctactaggttacatgtgtcacaccactttctggtttccacggttgccttgctggctttcttgtggccctgaagcaactcttaccaaaccttgagcttcctatgtgctttttctggaaaataaaggcaaagtggatgccattctttgttgtatgtttctcaagtatcatggccttcatcgtgcctgattccattaacttcctgccaactttggtgtccgggatgtacgttagctggctttacctgagatacttccaaaggaacccactgactggacttaagggtgatcccagtgatgacttttccttccccagtttattcccagctgccatgagggagcgtggcgagagggttcttgaggaaaggttggcggctgacaatgctggtgacacagaggcctcgcctcgtggccatggcaccgcggaagactgagaactttcttgtgaccatcagctcctcttataggagccatggctttgctccctccagcgtttatagctctgcacttttgtcttctggagatggagctattcagttcacagcgaacgaataatacgatgttcttagtttctctttttttccgcttctttgtctgcgaggatttattggttaaattgtgtactagtcaattgttatggtacagcgaaaaagagagaagagggtgatggcatttgcagcgaggtgttgagattccgttgtagccatgcatttgcagccgattgtttggtactggtcaaagttctgtagtagtcatatactctgcttaaaatatagaaagaagaatggcttcgtcagtatcagatgttgagatatatatttcttttcttttagtg

SEQ ID NO: 14076 - DNA, 1074 bp, Zea Mays
attcgtctgcctcatctcctctctacgattcgttcagatgctgcagcagaaggggatacccgagcgccccatgtactatccggagttcccactgcaggacccagagccagaagttgttcttgtagatgaagatagggacccggtggaaagagtccatgaagcactgcggtgccttcctcagtatgatccgtcagtgcgttggacaaccgaggagaaccccccttttctttattggaagatccgtgactttgcacacgcttacagctcggggatcacaactccttcagttgttgccgagtatgttattgcaggcattgaagagtggaacaacaagaagcccccaatgccaatgttgatctatttcaatgcagaagatctcaagaagcaagctgaggcttccacaaagagatttcagcgaggaaatccgatatccattttagatgggatcttcgttgccattaaggatgacatcgactgcttcccatatccaacaaagggtgctacaacattctttgaccaaatccatactgtggagagagatgcagtctgtgtggctcggttgcggaaatgtggagttatctttattgggaaagcaaacatgcatgagctaggccttggagtaactggaaacaatccaaattatgggacagcaagaaatccacattcagttgatagatatactggtggttcttcatctggtcctgctgcattagtatcatcaggattatgctcgatagcaattggaacagatggtggaggttcagttagaattccatctgcactttgtggtattgttggtttcaagacaacatatggtaggacagatatgactggggtactatgtgactctgggactgttgaagttgcttctcctcttacatcatcagttgacgatgctatactagtgtaaggtattctgcaatagcaggttcaagacctatggataagcttacacttagaccatcgccactatgtgtcccaaatttgttgtctccagaaaacagcatgtcctggatcagttaaaataggaaagtatacagaggtataacgaatcaagctgattcatcagacgta

SEQ ID NO: 14077 - DNA, 1255 bp, Zea Mays
attcgtctgcctcatctcctctctacgattcgttcagatgctgcagcagaaggggatacccgagcgccccatgtactatccggagttcccactgcaggacccagagccagaagttgttcttgtagatgaagatagggacccggtggaaagagtccatgaagcactgcggtgccttcctcagtatgatccgtcagtgcgttggacaaccgaggagaaccccccttttctttattggaagatccgtgactttgcacacgcttacagctcggggatcacaactccttcagttttgccgagtatgttattgcaggcattgaagagtggaacaacaagaagcccccaatgccaatgttgatctatttcaatgcagaagatctcaagaagcaagctgaggcttccacaaagagatttcagcgaggaaatccgatatccattttagatgggatcttcgttgccattaaggatgacatcgactgcttcccatatccaacaaagggtgctacaacattctttgaccaaatccatactgtggagagagatgcagtctgtgtggctcggttgcggaaatgtggagttatctttattgggaaagcaaacatgcatgagctaggccttggagtaactggaaacaatccaaattatgggacagcaagaaatccacattcagttgatagatatactggtggttcttcatctggtcctgctgcattagtatcatcaggattatgctcgatagcaattggaacagatggtggaggttcagttagaattccatctgcactttgtggtattgttggtttcaagacaacatatggtaggacagatatgactggggtactatgtgactctgggactgttgaagttgcttctcctcttacatcatcagttgacgatgctatactagtgtaaggtgtaagctacttagtgtgctactgctacatgataccatgtcccctgcatagggccgttgagtttagctgtctcattgagaaagaaattttgtcattgcttctttttgtgatactgggtaatatctgcttatcctgttgctaaaactggatatttgttaaactgtattatatggtacttcaggtattctgcaatagcaggttcaagacctatggataagcttacacttagaccatcgccactatgtgtcccaaatttgttgtctccagaaaacagcatgtcctggatcagttaaaataggaaagtatacagaggtataacgaatcaagctgattcatcagacgta

SEQ ID NO: 14078 - DNA, 1368 bp, Zea Mays
attcgtctgcctcatctcctctctacgattcgttcagatgctgcagcagaaggggatacccgagcgccccatgtactatccggagttcccactgcaggacccagagccagaagttgttcttgtagatgaagatagggacccggtggaaagagtccatgaagcactgcggtgccttcctcagtatgatccgtcagtgcgttggacaaccgaggagaaccccccttttctttattggaagatccgtgactttgcacacgcttacagctcggggatcacaactccttcagttgttgccgagtatgttattgcaggcattgaagagtggaacaacaagaagcccccaatgccaatgttgatctatttcaatgcagaagatctcaagaagcaagctgaggcttccacaaagagatttcagcgaggaaatccgatatccattttagatgggatcttcgttgccattaaggatgacatcgactgcttcccatatccaacaaagggtgctacaacattctttgaccaaatccatactgtggagagagatgcagtctgtgtggctcggttgcggaaatgtggagttatctttattgggaaagcaaacatgcatgagctaggccttggagtaactggaaacaatccaaattatgggacagcaagaaatccacattcagttgatagatatactggtggttcttcatctggtcctgctgcattagtatcatcaggattatgctcgatagcaattggaacagatggtggaggttcagttagaattccatctgcactttgtggtattgttggtttcaagacaacatatggtaggacagatatgactgggtaataaaaagaagttcaattgaattaaatatttacaagacttgttcttttatatgtcatatttgttatatatggattggactaccttccaaggttactaagctgctctagtacaagctagcatccactgtattctgaaacagcttattgttttattttgcatggtattgtccaaaatcaaccaagttggactatttagttgctgcatgcagagatgcagttatcttataccgaacctcattagaaatccttcaaagtcttgcaatttcttgttgtatgattagatatcttgtttgcagggtactatgtgactctgggactgttgaagttgcttctcctcttacatcatcagttgacgatgctatactagtgtattctgcaatagcaggttcaagacctatggataagcttacacttagaccatcgccactatgtgtcccaaatttgttgtctccagaaaacagcatgtcctggatcagttaaaataggaaagtatacagaggtataacgaatcaagctgattcatcagacgta

SEQ ID NO: 14079 - DNA, 1076 bp, Zea Mays
attcgtctgcctcatctcctctctacgattcgttcagatgctgcagcagaaggggatacccgagcgccccatgtactatccggagttcccactgcaggacccagagccagaagttgttcttgtagatgaagatagggacccggtggaaagagtccatgaagcactgcggtgccttcctcagtatgatccgtcagtgcgttggacaaccgaggagaaccccccttttctttattggaagatccgtgactttgcacacgcttacagctcggggatcacaactccttcagttgttgccgagtatgttattgcaggcattgaagagtggaacaacaagaagcccccaatgccaatgttgatctatttcaatgcagaagatctcaagaagcaagctgaggcttccacaaagagatttcagcgaggaaatccgatatccattttagatgggatcttcgttgccattaaggatgacatcgactgcttcccatatccaacaaagggtgctacaacattctttgaccaaatccatactgtggagagagatgcagtctgtgtggctcggttgcggaaatgtggagttatctttattgggaaagcaaacatgcatgagctaggccttggagtaactggaaacaatccaaattatgggacagcaagaaatccacattcagttgatagatatactggtggttcttcatctggtcctgctgcattagtatcatcaggattatgctcgatagcaattggaacagatggtggaggttcagttagaattccatctgcactttgtggtattgttggtttcaagacaacatatggtaggacagatatgactggggtactatgtgactctgggactgttgaagttgcttctcctcttacatcatcagttgacgatgctatactagtgtaaggtgtattctgcaatagcaggttcaagacctatggataagcttacacttagaccatcgccactatgtgtcccaaatttgttgtctccagaaaacagcatgtcctggatcagttaaaataggaaagtatacagaggtataacgaatcaagctgattcatcagacgta

SEQ ID NO: 14080 - DNA, 674 bp, Zea Mays
gtgaacagttgacaattcatgattgaaatccgatatccattttagatgggatcttcgttgccattaaggatgacatcgactgcttcccatatccaacaaagggtgctacaacattctttgaccaaatccatactgtggagagagatgcagtctgtgtggctcggttgcggaaatgtggagttatctttattgggaaagcaaacatgcatgagctaggccttggagtaactggaaacaatccaaattatgggacagcaagaaatccacattcagttgatagatatactggtggttcttcatctggtcctgctgcattagtatcatcaggattatgctcgatagcaattggaacagatggtggaggttcagttagaattccatctgcactttgtggtattgttggtttcaagacaacatatggtaggacagatatgactggggtactatgtgactctgggactgttgaagttgcttctcctcttacatcatcagttgacgatgctatactagtgtattctgcaatagcaggttcaagacctatggataagcttacacttagaccatcgccactatgtgtcccaaatttgttgtctccagaaaacagcatgtcctggatcagttaaaataggaaagtatacagaggtataacgaatcaagctgattcatcagacgta

SEQ ID NO: 14081 - DNA, 761 bp, Zea Mays
gaggtcaatgtcatagccactcctacaactggcattactgctccaaaaatacctccaagtgctctgaagtcaggagagtcagattatgttgtgtcagcttacttgatgcgattcatcatagcagggaaccttcttggtctcccagcaataactgtgcctgttggtcatgacaagcaggggcttcctataggtttgcaactgataggtcgtccatggggcgaggcaagcttactgagggtggcttctgcagtggaggagctgtgtctgaagaaacggaagcgaccctctgcattttatgacattttgaaggcctgaatcgtcgttgtatacataatcacggtgttttgcgatgacatgagtatgtatgatgaaaagtgtgggtgagagtgactgaggagagtttcatgtcctcaagttgtaaaatactgtcatcgtcaccatgatgctgatgtcattagagctgaacgtgcaaatagcatataggcgtgaatgttgtcgtgacctttctttctacctgctctcaaggttttttctaaaaaaaaaagtaaatttaaaaaatgctgatcctgatcatatcaatacggaagggcatttccggtactagtaaaaacggacgggtgatgggcatgtgcaaatgcgaaccagccacttgtcctagctagctaccaactctggattcgtacgggcggcgtggcaaccgccctattccacggagacagagcttgcggctggtgccacctccacttccaccattgattggc

SEQ ID NO: 14082 - DNA, 613 bp, Zea Mays
gtcaatgtcatagccactcctacaactgggggcttcctataggtttgcaactgataggtcgtccatggggcgaggcaagcttactgagggtggcttctgcagtggaggagctgtgtctgaagaaacggaagcgaccctctgcattttatgacattttgaaggcctgaatcgtcgttgtatacataatcacggtgttttgcgatgacatgagtatgtatgatgaaaagtgtgggtgagagtgactgaggagagtttcatgtcctcaagttgtaaaatactgtcatcgtcaccatgatgctgatgtcattagagctgaacgtgcaaatagcatataggcgtgaatgttgtcgtgacctttctttctacctgctctcaaggttttttctaaaaaaaaaagtaaatttaaaaaatgctgatcctgatcatatcaatacggaagggcatttccggtactagtaaaaacggacgggtgatgggcatgtgcaaatgcgaaccagccacttgtcctagctagctaccaactctggattcgtacgggcggcgtggcaaccgccctattccacggagacagagcttgcggctggtgccacctccacttccaccattgattggc

SEQ ID NO: 14083 - DNA, 2743 bp, Zea Mays
ttccgttgtgcgcgtgcagctgccacctccaccttttctcgttctgtcgccgcctccacttccaccatcccaggccctctatcgtccctcagtccgctgccggtgccggtgccgcatcgggtagttcagcggcggcggcgctgctgatcaggtggtgcccaggccgtccacggaccgagccctctcgtcctcgtccgacgcgagggcaatcacccacccgggacgccttccgaagcggcatccctcctctggccaacgtcccagcaacgaagctcactgatgcgatatggaacaactgcttcctagacaagctcgccttcaggtatcgaagtcgaaccaaaggaggttgaagccatggccctcatcgtagctgcagctggaggaaaccttcttgtcagaaagttggtcaatttaactccctcgcaaacatgatgaggagcgaagtaattgaggctggaaagctagtgaacctgtggaatgaatgggggctacagatcctggtcattgcaagcttcgggttacaagtattcctcctcgttttcggaggagtccgccgtcatagcaactccactgccctgacgttcttcctctggtcggcatacctactggccgattccacagcgatatacaccctgggccacctatctgttgacagtatgtcagacgagcaccagctggtggcattctgggcgccgttcctattgctgcacctcggtggcccagacaacatcacagcgtatgcactcgaggacaatgcgctctggctacgccacctgcaaactctcgccgtgcaggtcctaggagctgcttatgtgatatacgagtacatcgccagcagaggggcattgctttttctggcctccttgtccatgttctttgccggtcttctcaagtatggcgagaggatatgggctctcaagtgtggcaacatcagcagcatccgcagcagcatcagcatccggaagatcaagactgacccttatcagctattgactttgggtactagcgaagaggatttgctgcttggagcccactcccagtttgatatctgcaaaggtgtcttcgccgatatcataatgctaccaaatcccttagttcgttcacagcctaaaccacgttccgtgatatcttatctgggagaggatctatacaagttggttgagatggagctgtctctgatgtatgacttcctgtacactaaggcagcagtgatccacacatggtatggcttctgcatccatttcatctcgctgtttggcacagccaccacattccttttgtttcagctcagtatcagcaacagtggaaatcggtacagcagagtggatgtggctatcagttatgttttactggttggggctttggtcttggaaatcatatcagtgtgcagagctgtactatccacctggacatgttctttgttgcaccgcaggggcaggggatgggagtggtctctccacattgtcacttcccttggtcagcgtgtccatccagcaagtaggagactctggtcgggctccattgggcagtacaacttgttccacctgtgcacccgcaacaccaacgagatagggagcagactagcaacgaaactggggctcgaggactggtggaacaagatgcacttctccggaactttcccacacgctaactcgtctttgtcaatacaagatatcaagaaattggttctgcaagcactgcgaagcaaagagcaagcactgcaacaccaggatactgatttgaactcaagaggcagctttatactgaaacgtatggaggcctacaaagactttgctcgctggagcgtcaacattgacttcgacgagagcatccttgtttggcacattgcaaccgaggtgttcatcaggaaatccaaggccagacatgcaaaagaactccttgaggctactgagaaggacactgtcgaacgcgatttggtgataaggacaacccagtggcgccatcccctgataccacggagggagaagcttgcagaggtggcctggagtttctcccaatttgcactgggatcagtaaaggcaccaaatccacatggggactccatccgtgacagtgctaatatgtatgcaatcttgctcgccaacgagcttctgagcatagagttgcagtggcaggatcagcgtgacactttggaactgatcctgggggtgtgggtggagatgtcgttgtatgctgcggatcattgcagccaagagtcccatgccaggcagctcagtaatggctgcgaattcattaccatcgtgtcgttgctggcacaccacttcaagtactactctggggccttcaggggcgccgacaaccttggagaagataaacccgctagtgaaaataaacccgttactgtaaataatcccatgagtgaaaattgtgggaacttggtttagatgagttcgcacaattttcatttgaaatgacctctctgtcagttcagggaaaaacctgaggattcatgactccaaacaagagtaaatatatttatctgtcgatgaacatagtaattaaagtgctaggattcatcaatgttagctttggactctacattcaacagtttgtaaggtgagtctgactgtgtgtgtgtgtgacatgctcatatatcttccatgatcaaggtaatgatcggcgttgagtgtgttgctcaaccgccattatacaatatgcaattattattagataattatcaacgagattcctgaattatatttttggatggagggagtagtat

SEQ ID NO: 14084 - DNA, 2828 bp, Zea Mays
gccacctccaccttttctcgttctgtcgccgcctccacttccaccatcccaggccctctatcgtccctcagtccgctgccggtgccggtgccgcatcgggtagttcagcggcggcggcgctgctgatcaggtggtgcccaggccgtccacggaccgagccctctcgtcctcgtccgacgcgagggcaatcacccacccgggacgccttccgaagcggcatccctcctctggccaacgtcccagcaacgaagctcactgatgcgatatggaacaactgcttcctagacaagctcgccttcaggtatcgaagtcgaaccaaaggaggttgaagccatggccctcatcgtagctgcagctggaggaaaccttcttgtcagaaagttggtcaatttaactccctcgcaaacatgatgaggagcgaagtaattgaggctggaaagctagtgaacctgtggaatgaatgggggctacagatcctggtcattgcaagcttcgggttacaagtattcctcctcgttttcggaggagtccgccgtcatagcaactccactgccctgacgttcttcctctggtcggcatacctactggccgattccacagcgatatacaccctgggccacctatctgttgacagtatgtcagacgagcaccagctggtggcattctgggcgccgttcctattgctgcacctcggtggcccagacaacatcacagcgtatgcactcgaggacaatgcgctctggctacgccacctgcaaactctcgccgtgcaggtcctaggagctgcttatgtgatatacgagtacatcgccagcagaggggcattgctttttctggcctccttgtccatgttctttgccggtcttctcaagtatggcgagaggatatgggctctcaagtgtggcaacatcagcagcatccgcagcagcatcagcatccggaagatcaagactgacccttatcagctattgactttgggtactagcgaagaggatttgctgcttggagcccactcccagtttgatatctgcaaaggtgtcttcgccgatatcataatgctaccaaatcccttagttcgttcacagcctaaaccacgttccgtgatatcttatctgggagaggatctatacaagttggttgagatggagctgtctctgatgtatgacttcctgtacactaaggcagcagtgatccacacatggtatggcttctgcatccatttcatctcgctgtttggcacagccaccacattccttttgtttcagctcagtatcagcaacagtggaaatcggtacagcagagtggatgtggctatcagttatgttttactggttggggctttggtcttggaaatcatatcagtgtgcagagctgtactatccacctggacatgttctttgttgcaccgcaggggcaggggatgggagtggtctctccacattgtcacttcccttggtcagcgtgtccatccagcaagtaggagactctggtcgggctccattgggcagtacaacttgttccacctgtgcacccgcaacaccaacgagatagggagcagactagcaacgaaactggggctcgaggactggtggaacaagatgcacttctccggaactttcccacacgctaactcgtctttgtcaatacaagatatcaagaaattggttctgcaagcactgcgaagcaaagagcaagcactgcaacaccaggatactgatttgaactcaagaggcagctttatactgaaacgtatggaggcctacaaagactttgctcgctggagcgtcaacattgacttcgacgagagcatccttgtttggcacattgcaaccgaggtgttcatcaggaaatccaaggccagacatgcaaaagaactccttgaggctactgagaaggacactgtcgaacgcgatttggtgataaggacaacccagtggcgccatcccctgtaagctggaacccgtactatattcttaaggaattgttccaccatgatggtcccagttgctccaggataccacggagggagaagcttgcagaggtggcctggagtttctcccaatttgcactggtataacttccctgatcattcaactgaaacacatttcgttgggatcagtaaaggcaccaaatccacatggggactccatccgtgacagtgctaatatgtatgcaatcttgctcgccaacgagcttctgagcatagagttgcagtggcaggatcagcgtgacactttggaactgatcctgggggtgtgggtggagatgtcgttgtatgctgcggatcattgcagccaagagtcccatgccaggcagctcagtaatggctgcgaattcattaccatcgtgtcgttgctggcacaccacttcaagtactactctggggccttcaggggcgccgacaaccttggagaagataaacccgctagtgaaaataaacccgttactgtaaataatcccatgagtgaaaattgtgggaacttggtttagatgagttcgcacaattttcatttgaaatgacctctctgtcagttcagggaaaaacctgaggattcatgactccaaacaagagtaaatatatttatctgtcgatgaacatagtaattaaagtgctaggattcatcaatgttagctttggactctacattcaacagtttgtaaggtgagtctgactgtgtgtgtgtgtgacatgctcatatatcttccatgatcaaggtaatgatcggcgttgagtgtgttgctcaaccgccattatacaatatgcaattattattagataattatcaacgagattcctgaattatatttttggatggagggagtagtat

SEQ ID NO: 14085 - DNA, 2906 bp, Zea Mays
cgttctgtcgccgcctccacttccaccatcccaggccctctatcgtccctcagtccgctgccggtgccggtgccgcatcgggtagttcagcggcggcggcgctgctgatcaggtggtgcccaggccgtccacggaccgagccctctcgtcctcgtccgacgcgagggcaatcacccacccgggacgccttccgaagcggcatccctcctctggccaacgtcccagcaacgaagctcactgatgcgatatggaacaactgcttcctagacaagctcgccttcaggtatcgaagtcgaaccaaaggaggttgaagccatggccctcatcgtagctgcagctggaggaaaccttcttgtcagaaagttggtcaatttaactccctcgcaaacatgatgaggagcgaagtaattgaggctggaaagctagtgaacctgtggaatgaatgggggctacagatcctggtcattgcaagcttcgggttacaagtattcctcctcgttttcggaggagtccgccgtcatagcaactccactgccctgacgttcttcctctggtcggcatacctactggccgattccacagcgatatacaccctgggccacctatctgttgacagtatgtcagacgagcaccagctggtggcattctgggcgccgttcctattgctgcacctcggtggcccagacaacatcacagcgtatgcactcgaggacaatgcgctctggctacgccacctgcaaactctcgccgtgcaggtcctaggagctgcttatgtgatatacgagtacatcgccagcagaggggcattgctttttctggcctccttgtccatgttctttgccggtcttctcaagtatggcgagaggatatgggctctcaagtgtggcaacatcagcagcatccgcagcagcatcagcatccggaagatcaagactgacccttatcagctattgactttgggtactagcgaagaggatttgctgcttggagcccactcccagtttgatatctgcaaaggtgtcttcgccgatatcataatgctaccaaatcccttagttcgttcacagcctaaaccacgttccgtgatatcttatctgggagaggatctatacaagttggttgagatggagctgtctctgatgtatgacttcctgtacactaaggcagcagtgatccacacatggtatggcttctgcatccatttcatctcgctgtttggcacagccaccacattccttttgtttcagctcagtatcagcaacagtggaaatcggtacagcagagtggatgtggctatcagttatgttttactggttggggctttggtcttggaaatcatatcagtgtgcagagctgtactatccacctggacatgttctttgttgcaccgcaggggcaggggatgggagtggtctctccacattgtcacttcccttggtcagcgtgtccatccagcaagtaggagactctggtcgggctccattgggcagtacaacttgttccacctgtgcacccgcaacaccaacgagatagggagcagactagcaacgaaactggggctcgaggactggtggaacaagatgcacttctccggaactttcccacacgctaactcgtctttgtcaatacaagatatcaagaaattggttctgcaagcactgcgaagcaaagagcaagcactgcaacaccaggatactgatttgaactcaagaggcagctttatactgaaacgtatggaggcctacaaagactttgctcgctggagcgtcaacattgacttcgacgagagcatccttgtttggcacattgcaaccgaggtgttcatcaggaaatccaaggccagacatgcaaaagaactccttgaggctactgaggtactatccaactacttgatgttcttgctggtggtaaaacctaacatgctaccaggcgctgcgcggcataacatacatctcacctcctgcgaacaactagaaggacactgtcgaacgcgatttggtgataaggacaacccagtggcgccatcccctgtaagctggaacccgtactatattcttaaggaattgttccaccatgatggtcccagttgctccaggataccacggagggagaagcttgcagaggtggcctggagtttctcccaatttgcactggtataacttccctgatcattcaactgaaacacatttcggatcagtaaaggcaccaaatccacatggggactccatccgtgacagtgctaatatgtatgcaatcttgctcgccaacgagcttctgagcatagagttgcagtggcaggatcagcgtgacactttggaactgatcctgggggtgtgggtggagatgtcgttgtatgctgcggatcattgcagccaagagtcccatgccaggcagctcagtaatggctgcgaattcattaccatcgtgtcgttgctggcacaccacttcaagtactactctggggccttcaggggcgccgacaaccttggagaagataaacccgctagtgaaaataaacccgttactgtaaataatcccatgagtgaaaattgtgggaacttggtttagatgagttcgcacaattttcatttgaaatgacctctctgtcagttcagggaaaaacctgaggattcatgactccaaacaagagtaaatatatttatctgtcgatgaacatagtaattaaagtgctaggattcatcaatgttagctttggactctacattcaacagtttgtaaggtgagtctgactgtgtgtgtgtgtgacatgctcatatatcttccatgatcaaggtaatgatcggcgttgagtgtgttgctcaaccgccattatacaatatgcaattattattagataattatcaacgagattcctgaattatatttttggatggagggagtagtat

SEQ ID NO: 14086 - DNA, 2701 bp, Zea Mays
cgttctgtcgccgcctccacttccaccatcccaggccctctatcgtccctcagtccgctgccggtgccggtgccgcatcgggtagttcagcggcggcggcgctgctgatcaggtggtgcccaggccgtccacggaccgagccctctcgtcctcgtccgacgcgagggcaatcacccacccgggacgccttccgaagcggcatccctcctctggccaacgtcccagcaacgaagctcactgatgcgatatggaacaactgcttcctagacaagctcgccttcaggtatcgaagtcgaaccaaaggaggttgaagccatggccctcatcgtagctgcagctggaggaaaccttcttgtcagaaagttggtcaatttaactccctcgcaaacatgatgaggagcgaagtaattgaggctggaaagctagtgaacctgtggaatgaatgggggctacagatcctggtcattgcaagcttcgggttacaagtattcctcctcgttttcggaggagtccgccgtcatagcaactccactgccctgacgttcttcctctggtcggcatacctactggccgattccacagcgatatacaccctgggccacctatctgttgacagtatgtcagacgagcaccagctggtggcattctgggcgccgttcctattgctgcacctcggtggcccagacaacatcacagcgtatgcactcgaggacaatgcgctctggctacgccacctgcaaactctcgccgtgcaggtcctaggagctgcttatgtgatatacgagtacatcgccagcagaggggcattgctttttctggcctccttgtccatgttctttgccggtcttctcaagtatggcgagaggatatgggctctcaagtgtggcaacatcagcagcatccgcagcagcatcagcatccggaagatcaagactgacccttatcagctattgactttgggtactagcgaagaggatttgctgcttggagcccactcccagtttgatatctgcaaaggtgtcttcgccgatatcataatgctaccaaatcccttagttcgttcacagcctaaaccacgttccgtgatatcttatctgggagaggatctatacaagttggttgagatggagctgtctctgatgtatgacttcctgtacactaaggcagcagtgatccacacatggtatggcttctgcatccatttcatctcgctgtttggcacagccaccacattccttttgtttcagctcagtatcagcaacagtggaaatcggtacagcagagtggatgtggctatcagttatgttttactggttggggctttggtcttggaaatcatatcagtgtgcagagctgtactatccacctggacatgttctttgttgcaccgcaggggcaggggatgggagtggtctctccacattgtcacttcccttggtcagcgtgtccatccagcaagtaggagactctggtcgggctccattgggcagtacaacttgttccacctgtgcacccgcaacaccaacgagatagggagcagactagcaacgaaactggggctcgaggactggtggaacaagatgcacttctccggaactttcccacacgctaactcgtctttgtcaatacaagatatcaagaaattggttctgcaagcactgcgaagcaaagagcaagcactgcaacaccaggatactgatttgaactcaagaggcagctttatactgaaacgtatggaggcctacaaagactttgctcgctggagcgtcaacattgacttcgacgagagcatccttgtttggcacattgcaaccgaggtgttcatcaggaaatccaaggccagacatgcaaaagaactccttgaggctactgaggacactgtcgaacgcgatttggtgataaggacaacccagtggcgccatcccctgataccacggagggagaagcttgcagaggtggcctggagtttctcccaatttgcactgggatcagtaaaggcaccaaatccacatggggactccatccgtgacagtgctaatatgtatgcaatcttgctcgccaacgagcttctgagcatagagttgcagtggcaggatcagcgtgacactttggaactgatcctgggggtgtgggtggagatgtcgttgtatgctgcggatcattgcagccaagagtcccatgccaggcagctcagtaatggctgcgaattcattaccatcgtgtcgttgctggcacaccacttcaagtactactctggggccttcaggggcgccgacaaccttggagaagataaacccgctagtgaaaataaacccgttactgtaaataatcccatgagtgaaaattgtgggaacttggtttagatgagttcgcacaattttcatttgaaatgacctctctgtcagttcagggaaaaacctgaggattcatgactccaaacaagagtaaatatatttatctgtcgatgaacatagtaattaaagtgctaggattcatcaatgttagctttggactctacattcaacagtttgtaaggtgagtctgactgtgtgtgtgtgtgacatgctcatatatcttccatgatcaaggtaatgatcggcgttgagtgtgttgctcaaccgccattatacaatatgcaattattattagataattatcaacgagattcctgaattatatttttggatggagggagtagtat

SEQ ID NO: 14087 - DNA, 2816 bp, Zea Mays
cgttctgtcgccgcctccacttccaccatcccaggccctctatcgtccctcagtccgctgccggtgccggtgccgcatcgggtagttcagcggcggcggcgctgctgatcaggtggtgcccaggccgtccacggaccgagccctctcgtcctcgtccgacgcgagggcaatcacccacccgggacgccttccgaagcggcatccctcctctggccaacgtcccagcaacgaagctcactgatgcgatatggaacaactgcttcctagacaagctcgccttcaggtatcgaagtcgaaccaaaggaggttgaagccatggccctcatcgtagctgcagctggaggaaaccttcttgtcagaaagttggtcaatttaactccctcgcaaacatgatgaggagcgaagtaattgaggctggaaagctagtgaacctgtggaatgaatgggggctacagatcctggtcattgcaagcttcgggttacaagtattcctcctcgttttcggaggagtccgccgtcatagcaactccactgccctgacgttcttcctctggtcggcatacctactggccgattccacagcgatatacaccctgggccacctatctgttgacagtatgtcagacgagcaccagctggtggcattctgggcgccgttcctattgctgcacctcggtggcccagacaacatcacagcgtatgcactcgaggacaatgcgctctggctacgccacctgcaaactctcgccgtgcaggtcctaggagctgcttatgtgatatacgagtacatcgccagcagaggggcattgctttttctggcctccttgtccatgttctttgccggtcttctcaagtatggcgagaggatatgggctctcaagtgtggcaacatcagcagcatccgcagcagcatcagcatccggaagatcaagactgacccttatcagctattgactttgggtactagcgaagaggatttgctgcttggagcccactcccagtttgatatctgcaaaggtgtcttcgccgatatcataatgctaccaaatcccttagttcgttcacagcctaaaccacgttccgtgatatcttatctgggagaggatctatacaagttggttgagatggagctgtctctgatgtatgacttcctgtacactaaggcagcagtgatccacacatggtatggcttctgcatccatttcatctcgctgtttggcacagccaccacattccttttgtttcagctcagtatcagcaacagtggaaatcggtacagcagagtggatgtggctatcagttatgttttactggttggggctttggtcttggaaatcatatcagtgtgcagagctgtactatccacctggacatgttctttgttgcaccgcaggggcaggggatgggagtggtctctccacattgtcacttcccttggtcagcgtgtccatccagcaagtaggagactctggtcgggctccattgggcagtacaacttgttccacctgtgcacccgcaacaccaacgagatagggagcagactagcaacgaaactggggctcgaggactggtggaacaagatgcacttctccggaactttcccacacgctaactcgtctttgtcaatacaagatatcaagaaattggttctgcaagcactgcgaagcaaagagcaagcactgcaacaccaggatactgatttgaactcaagaggcagctttatactgaaacgtatggaggcctacaaagactttgctcgctggagcgtcaacattgacttcgacgagagcatccttgtttggcacattgcaaccgaggtgttcatcaggaaatccaaggccagacatgcaaaagaactccttgaggctactgagaactagaaggacactgtcgaacgcgatttggtgataaggacaacccagtggcgccatcccctgtaagctggaacccgtactatattcttaaggaattgttccaccatgatggtcccagttgctccaggataccacggagggagaagcttgcagaggtggcctggagtttctcccaatttgcactggtataacttccctgatcattcaactgaaacacatttcgttgggatcagtaaaggcaccaaatccacatggggactccatccgtgacagtgctaatatgtatgcaatcttgctcgccaacgagcttctgagcatagagttgcagtggcaggatcagcgtgacactttggaactgatcctgggggtgtgggtggagatgtcgttgtatgctgcggatcattgcagccaagagtcccatgccaggcagctcagtaatggctgcgaattcattaccatcgtgtcgttgctggcacaccacttcaagtactactctggggccttcaggggcgccgacaaccttggagaagataaacccgctagtgaaaataaacccgttactgtaaataatcccatgagtgaaaattgtgggaacttggtttagatgagttcgcacaattttcatttgaaatgacctctctgtcagttcagggaaaaacctgaggattcatgactccaaacaagagtaaatatatttatctgtcgatgaacatagtaattaaagtgctaggattcatcaatgttagctttggactctacattcaacagtttgtaaggtgagtctgactgtgtgtgtgtgtgacatgctcatatatcttccatgatcaaggtaatgatcggcgttgagtgtgttgctcaaccgccattatacaatatgcaattattattagataattatcaacgagattcctgaattatatttttggatggagggagtagtat

SEQ ID NO: 14088 - DNA, 3103 bp, Zea Mays
cgttctgtcgccgcctccacttccaccatcccaggccctctatcgtccctcagtccgctgccggtgccggtgccgcatcgggtagttcagcggcggcggcgctgctgatcaggtggtgcccaggccgtccacggaccgagccctctcgtcctcgtccgacgcgagggcaatcacccacccgggacgccttccgaagcggcatccctcctctggccaacgtcccagcaacgaagctcactgatgcgatatggaacaactgcttcctagacaagctcgccttcaggtatcgaagtcgaaccaaaggaggttgaagccatggccctcatcgtagctgcagctggaggaaaccttcttgtcagaaagttggtcaatttaactccctcgcaaacatgatgaggagcgaagtaattgaggctggaaagctagtgaacctgtggaatgaatgggggctacagatcctggtcattgcaagcttcgggttacaagtattcctcctcgttttcggaggagtccgccgtcatagcaactccactgccctgacgttcttcctctggtcggcatacctactggccgattccacagcgatatacaccctgggccacctatctgttgacagtatgtcagacgagcaccagctggtggcattctgggcgccgttcctattgctgcacctcggtggcccagacaacatcacagcgtatgcactcgaggacaatgcgctctggctacgccacctgcaaactctcgccgtgcaggtcctaggagctgcttatgtgatatacgagtacatcgccagcagaggggcattgctttttctggcctccttgtccatgttctttgccggtcttctcaagtatggcgagaggatatgggctctcaagtgtggcaacatcagcagcatccgcagcagcatcagcatccggaagatcaagactgacccttatcagctattgactttgggtactagcgaagaggatttgctgcttggagcccactcccagtttgatatctgcaaaggtgtcttcgccgatatcataatgctaccaaatcccttagttcgttcacagcctaaaccacgttccgtgatatcttatctgggagaggatctatacaagttggttgagatggagctgtctctgatgtatgacttcctgtacactaaggcagcagtgatccacacatggtatggcttctgcatccatttcatctcgctgtttggcacagccaccacattccttttgtttcagctcagtatcagcaacagtggaaatcggtacagcagagtggatgtggctatcagttatgttttactggttggggctttggtcttggaaatcatatcagtgtgcagagctgtactatccacctggacatgttctttgttgcaccgcaggggcaggggatgggagtggtctctccacattgtcacttcccttggtcagcgtgtccatccagcaagtaggagactctggtcgggctccattgggcagtacaacttgttccacctgtgcacccgcaacaccaacgagatagggagcagactagcaacgaaactggggctcgaggactggtggaacaagatgcacttctccggaactttcccacacgctaactcgtctttgtcaatacaagatatcaagaaattggttctgcaagcactgcgaagcaaagagcaagcactgcaacaccaggatactgatttgaactcaagaggcagctttatactgaaacgtatggaggcctacaaagactttgctcgctggagcgtcaacattgacttcgacgagagcatccttgtttggcacattgcaaccgaggtgttcatcaggaaatccaaggccagacatgcaaaagaactccttgaggctactgaggacactgtcgaacgcgatttggtgataaggacaacccagtggcgccatcccctgtaagctggaacccgtactatattcttaaggaattgttccaccatgatggtcccagttgctccaggataccacggagggagaagcttgcagaggtggcctggagtttctcccaatttgcactggtataacttccctgatcattcaactgaaacacatttcgttggtaaatatgtttgaagatatagaacatgttaaacaaccttttgttttcatacttgctgatttcactaatagaaccagcacatgcctttattcagagctgcaccaaattgattctcttcgagtgaaattccattcatagtggatcatctgaattttatttcttgacttcatttgactattctacaatgaatttcaaagaaggcaatatctgtttttttagatagaccttggtctaacaaagttcatactaaagttcagggtgcattagttttatttaattctccttatttgtctcagggatcagtaaaggcaccaaatccacatggggactccatccgtgacagtgctaatatgtatgcaatcttgctcgccaacgagcttctgagcatagagttgcagtggcaggatcagcgtgacactttggaactgatcctgggggtgtgggtggagatgtcgttgtatgctgcggatcattgcagccaagagtcccatgccaggcagctcagtaatggctgcgaattcattaccatcgtgtcgttgctggcacaccacttcaagtactactctggggccttcaggggcgccgacaaccttggagaagataaacccgctagtgaaaataaacccgttactgtaaataatcccatgagtgaaaattgtgggaacttggtttagatgagttcgcacaattttcatttgaaatgacctctctgtcagttcagggaaaaacctgaggattcatgactccaaacaagagtaaatatatttatctgtcgatgaacatagtaattaaagtgctaggattcatcaatgttagctttggactctacattcaacagtttgtaaggtgagtctgactgtgtgtgtgtgtgacatgctcatatatcttccatgatcaaggtaatgatcggcgttgagtgtgttgctcaaccgccattatacaatatgcaattattattagataattatcaacgagattcctgaattatatttttggatggagggagtagtat

SEQ ID NO: 14089 - DNA, 3151 bp, Zea Mays
cgttctgtcgccgcctccacttccaccatcccaggccctctatcgtccctcagtccgctgccggtgccggtgccgcatcgggtagttcagcggcggcggcgctgctgatcaggtggtgcccaggccgtccacggaccgagccctctcgtcctcgtccgacgcgagggcaatcacccacccgggacgccttccgaagcggcatccctcctctggccaacgtcccagcaacgaagctcactgatgcgatatggaacaactgcttcctagacaagctcgccttcaggtatcgaagtcgaaccaaaggaggttgaagccatggccctcatcgtagctgcagctggaggaaaccttcttgtcagaaagttggtcaatttaactccctcgcaaacatgatgaggagcgaagtaattgaggctggaaagctagtgaacctgtggaatgaatgggggctacagatcctggtcattgcaagcttcgggttacaagtattcctcctcgttttcggaggagtccgccgtcatagcaactccactgccctgacgttcttcctctggtcggcatacctactggccgattccacagcgatatacaccctgggccacctatctgttgacagtatgtcagacgagcaccagctggtggcattctgggcgccgttcctattgctgcacctcggtggcccagacaacatcacagcgtatgcactcgaggacaatgcgctctggctacgccacctgcaaactctcgccgtgcaggtcctaggagctgcttatgtgatatacgagtacatcgccagcagaggggcattgctttttctggcctccttgtccatgttctttgccggtcttctcaagtatggcgagaggatatgggctctcaagtgtggcaacatcagcagcatccgcagcagcatcagcatccggaagatcaagactgacccttatcagctattgactttgggtactagcgaagaggatttgctgcttggagcccactcccagtttgatatctgcaaaggtgtcttcgccgatatcataatgctaccaaatcccttagttcgttcacagcctaaaccacgttccgtgatatcttatctgggagaggatctatacaagttggttgagatggagctgtctctgatgtatgacttcctgtacactaaggcagcagtgatccacacatggtatggcttctgcatccatttcatctcgctgtttggcacagccaccacattccttttgtttcagctcagtatcagcaacagtggaaatcggtacagcagagtggatgtggctatcagttatgttttactggttggggctttggtcttggaaatcatatcagtgtgcagagctgtactatccacctggacatgttctttgttgcaccgcaggggcaggggatgggagtggtctctccacattgtcacttcccttggtcagcgtgtccatccagcaagtaggagactctggtcgggctccattgggcagtacaacttgttccacctgtgcacccgcaacaccaacgagatagggagcagactagcaacgaaactggggctcgaggactggtggaacaagatgcacttctccggaactttcccacacgctaactcgtctttgtcaatacaagatatcaagaaattggttctgcaagcactgcgaagcaaagagcaagcactgcaacaccaggatactgatttgaactcaagaggcagctttatactgaaacgtatggaggcctacaaagactttgctcgctggagcgtcaacattgacttcgacgagagcatccttgtttggcacattgcaaccgaggtgttcatcaggaaatccaaggccagacatgcaaaagaactccttgaggctactgaggcgctgcgcggcataacatacatctcacctcctgcgaacaactagaaggacactgtcgaacgcgatttggtgataaggacaacccagtggcgccatcccctgtaagctggaacccgtactatattcttaaggaattgttccaccatgatggtcccagttgctccaggataccacggagggagaagcttgcagaggtggcctggagtttctcccaatttgcactggtataacttccctgatcattcaactgaaacacatttcgttggtaaatatgtttgaagatatagaacatgttaaacaaccttttgttttcatacttgctgatttcactaatagaaccagcacatgcctttattcagagctgcaccaaattgattctcttcgagtgaaattccattcatagtggatcatctgaattttatttcttgacttcatttgactattctacaatgaatttcaaagaaggcaatatctgtttttttagatagaccttggtctaacaaagttcatactaaagttcagggtgcattagttttatttaattctccttatttgtctcagggatcagtaaaggcaccaaatccacatggggactccatccgtgacagtgctaatatgtatgcaatcttgctcgccaacgagcttctgagcatagagttgcagtggcaggatcagcgtgacactttggaactgatcctgggggtgtgggtggagatgtcgttgtatgctgcggatcattgcagccaagagtcccatgccaggcagctcagtaatggctgcgaattcattaccatcgtgtcgttgctggcacaccacttcaagtactactctggggccttcaggggcgccgacaaccttggagaagataaacccgctagtgaaaataaacccgttactgtaaataatcccatgagtgaaaattgtgggaacttggtttagatgagttcgcacaattttcatttgaaatgacctctctgtcagttcagggaaaaacctgaggattcatgactccaaacaagagtaaatatatttatctgtcgatgaacatagtaattaaagtgctaggattcatcaatgttagctttggactctacattcaacagtttgtaaggtgagtctgactgtgtgtgtgtgtgacatgctcatatatcttccatgatcaaggtaatgatcggcgttgagtgtgttgctcaaccgccattatacaatatgcaattattattagataattatcaacgagattcctgaattatatttttggatggagggagtagtat

SEQ ID NO: 14090 - DNA, 3106 bp, Zea Mays
cgttctgtcgccgcctccacttccaccatcccaggccctctatcgtccctcagtccgctgccggtgccggtgccgcatcgggtagttcagcggcggcggcgctgctgatcaggtggtgcccaggccgtccacggaccgagccctctcgtcctcgtccgacgcgagggcaatcacccacccgggacgccttccgaagcggcatccctcctctggccaacgtcccagcaacgaagctcactgatgcgatatggaacaactgcttcctagacaagctcgccttcaggtatcgaagtcgaaccaaaggaggttgaagccatggccctcatcgtagctgcagctggaggaaaccttcttgtcagaaagttggtcaatttaactccctcgcaaacatgatgaggagcgaagtaattgaggctggaaagctagtgaacctgtggaatgaatgggggctacagatcctggtcattgcaagcttcgggttacaagtattcctcctcgttttcggaggagtccgccgtcatagcaactccactgccctgacgttcttcctctggtcggcatacctactggccgattccacagcgatatacaccctgggccacctatctgttgacagtatgtcagacgagcaccagctggtggcattctgggcgccgttcctattgctgcacctcggtggcccagacaacatcacagcgtatgcactcgaggacaatgcgctctggctacgccacctgcaaactctcgccgtgcaggtcctaggagctgcttatgtgatatacgagtacatcgccagcagaggggcattgctttttctggcctccttgtccatgttctttgccggtcttctcaagtatggcgagaggatatgggctctcaagtgtggcaacatcagcagcatccgcagcagcatcagcatccggaagatcaagactgacccttatcagctattgactttgggtactagcgaagaggatttgctgcttggagcccactcccagtttgatatctgcaaaggtgtcttcgccgatatcataatgctaccaaatcccttagttcgttcacagcctaaaccacgttccgtgatatcttatctgggagaggatctatacaagttggttgagatggagctgtctctgatgtatgacttcctgtacactaaggcagcagtgatccacacatggtatggcttctgcatccatttcatctcgctgtttggcacagccaccacattccttttgtttcagctcagtatcagcaacagtggaaatcggtacagcagagtggatgtggctatcagttatgttttactggttggggctttggtcttggaaatcatatcagtgtgcagagctgtactatccacctggacatgttctttgttgcaccgcaggggcaggggatgggagtggtctctccacattgtcacttcccttggtcagcgtgtccatccagcaagtaggagactctggtcgggctccattgggcagtacaacttgttccacctgtgcacccgcaacaccaacgagatagggagcagactagcaacgaaactggggctcgaggactggtggaacaagatgcacttctccggaactttcccacacgctaactcgtctttgtcaatacaagatatcaagaaattggttctgcaagcactgcgaagcaaagagcaagcactgcaacaccaggatactgatttgaactcaagaggcagctttatactgaaacgtatggaggcctacaaagactttgctcgctggagcgtcaacattgacttcgacgagagcatccttgtttggcacattgcaaccgaggtgttcatcaggaaatccaaggccagacatgcaaaagaactccttgaggctactgagaaggacactgtcgaacgcgatttggtgataaggacaacccagtggcgccatcccctgtaagctggaacccgtactatattcttaaggaattgttccaccatgatggtcccagttgctccaggataccacggagggagaagcttgcagaggtggcctggagtttctcccaatttgcactggtataacttccctgatcattcaactgaaacacatttcgttggtaaatatgtttgaagatatagaacatgttaaacaaccttttgttttcatacttgctgatttcactaatagaaccagcacatgcctttattcagagctgcaccaaattgattctcttcgagtgaaattccattcatagtggatcatctgaattttatttcttgacttcatttgactattctacaatgaatttcaaagaaggcaatatctgtttttttagatagaccttggtctaacaaagttcatactaaagttcagggtgcattagttttatttaattctccttatttgtctcagggatcagtaaaggcaccaaatccacatggggactccatccgtgacagtgctaatatgtatgcaatcttgctcgccaacgagcttctgagcatagagttgcagtggcaggatcagcgtgacactttggaactgatcctgggggtgtgggtggagatgtcgttgtatgctgcggatcattgcagccaagagtcccatgccaggcagctcagtaatggctgcgaattcattaccatcgtgtcgttgctggcacaccacttcaagtactactctggggccttcaggggcgccgacaaccttggagaagataaacccgctagtgaaaataaacccgttactgtaaataatcccatgagtgaaaattgtgggaacttggtttagatgagttcgcacaattttcatttgaaatgacctctctgtcagttcagggaaaaacctgaggattcatgactccaaacaagagtaaatatatttatctgtcgatgaacatagtaattaaagtgctaggattcatcaatgttagctttggactctacattcaacagtttgtaaggtgagtctgactgtgtgtgtgtgtgacatgctcatatatcttccatgatcaaggtaatgatcggcgttgagtgtgttgctcaaccgccattatacaatatgcaattattattagataattatcaacgagattcctgaattatatttttggatggagggagtagtat

SEQ ID NO: 14091 - DNA, 1472 bp, Zea Mays
gtggaagggggaaaatcataggttctccacgacgcggccatctccgccaccgccagcgccacctgctagggtcaacacccgctctctgcggactgcgtgaagcaccagcggcggccaccgggcaggacgagccccctccccaaacagagaggggcggggatcagtgcgtgcgctcctggtggagggcgtggaagagcttggcaggcggcaagcaggggtttgggaggatggtttcgctctcgacttggttccgctatgccgcacaaaagttcgagtactgcgtttccctctcgttgaagaaatataatgacgtgggccggatcagcagcacacagctaactgatgtgttaaacaaaaatttattccaaggcaagctcacctacgtgtgtccgaccaaaggggaagaagccatggctcccatcgcatctccaactggaggagccgtccttgtcagaaaactcgcaaatttgagccccacgcaagtgtttgtcggggacgttgtgttgttaaaagacccagagaaatctgatgatttaattattcgacgactggctgccttggaaggctatgagatggtctctaatgatgagaaggatgagccgtttgtgcttgagaaagaccaatgctgggtcctggcagacaacctagccctcaagccaaaggaagctagagatagccgcttgtttggacctgtcccaatgactgacatccttggcagagtgatttactctttaagaaccgctgttgatcacggtctagtcgagaacagcggcatggccatgaaacaggatggtccagtactggcagttgagcttgatgtggaagagatggcgaagaacattaagccctagacagttgatgttttcgacatgctgcgctgtaactcaccgtcacaatggatctttttttgttgttgtttatgatctgttgcttcaagtagaactgcattggaatgttttttcacggtttgcctttggagcagtcaataatggtcttgacagataatccagaggccgctggaccgtgttcactcagaatggctgtttttagggtttcttattcatgaacttgctgtgaatcttgtatctgcttgtgttcatggagccacgcctgacggttctacaggtgccaaaggttcacaataaaccaatacaaagccaaaagaaagggttcaacaagaaaggagcaaggcacccgaaggctgccctggtctggcgcatcggactgtccggtgtgcaccggacagtgtccgttgcaccagggagtccaactccgaactgctcagcttcgggaattctgagagccactccgctataattcaccggactatccggtgtgccagcggagtaacggctaaccagcgccaacggtcgtctgcaactgctacaggaacagtgaacagtgcgcgactgcgcgcacagagtcagagcaggcgccagaaggcgcaccagacagtgtacagtgactgtccg

SEQ ID NO: 14092 - DNA, 958 bp, Zea Mays
atattttgggggtgagcttgactaaattcagtattctaagtgtggctgtgcacctgtgagtaatttgagcatggcagtcacgtagatgtgtccaggtattgctggcaccatgggaatacgaccttgctgcatgttgaacaggttttaggggcatctgtccattccagttgcttaaaaggcaaaattaattgaaggtcgccctccctgccttgagttccacctacagaccactgcaaagtgtggagctacttgtattctattttgtgtagcctctccccagtccctaggtttgcctgaccctgaaccgagcacagcaatccctgagtggtgaccacaaccagcagttcacctatatcaccgtggccagaacggagtcaagtcatcgtggaactagtgctgcgggcagcctcaccgtggaccgatcgactggagtcatccctggtcaatctcacgcacgcaccgagactttggaaggtcagtgaagctctctacgccattaatttgaactcgaccacgagattaggatcgtcagagcaactgtccgtcaccgctgacagtagagtggttccaaagtctctgcgggtaaattgagtgcacggccgagtttgccgtagcctggagagttggttggtaccatcgtcgtcgtctgcgatgtgtgatcatggcggatccggtgccggttcaccggagaactgtgcggcggtgtcggggccgaggcgttgtgaaagaaggaaagccgaggggcttaggtgcatctgtcagtgacccgagaattcaatcggagtgcggggtcctttttacaaaacctcaggcatgggctcctcagcgtgggccggctgtgcctgggatttaggacgtgtcaacggtttggctccgggactgtttaggattttgccttttcttttataagagatcttggaaattataccaaaaatcatagaaaaatccaaaaatcacg

SEQ ID NO: 14093 - DNA, 1277 bp, Zea Mays
atggccggcatatatggttgcattgagctgggccttgtgattctaatgttgttgcaaaaacgaaagggtgtgggtggatggttgggcggcatgcgcggtggggaagaggaagaggaagagaaagagagagggggagacatagcaggccgccttgagctggcataggatgcgacggtccggcaggggcagggctgggcggtcgacggaggccaattctttaacttccttcctccgtcgatcatccagcaccagcaggagaatcccgtcgaatcccccaacccaagggagcgcgcgcgtatgcctcctccagatccaaagcaacaagcaacagacagcgagggggcaccggggtccgccgcatgtgtgtggttcatggaggatcatgctttcctgcttactgcattagctcctgacgcgccaccctcccctcgcgttcattgatttctgttataattactcacattattattggtaaagaaagaaagggcacctcttctaatttgatgggcattccgttaccgtctcaacttcaacgtcaacaacaggtcttttcagcggctcgggcaaaaggcgacaagtcagtgcagagaagatagtgcttgatctaacccctctacaggaacagaggctgcaaagtctgaaggaaaggctaaatgtgccatatgacgaaactcggacagatcatcaagaatcgcttagggctctatggaatgcatcctttcccgatacagagctcactagcttagtttcagaacagtggaaagacatggggtggcagggcgtgaacccagcaactgatttcaggggctgtgggtttgtttcgctcgagaaccttttgttttttgcaagaacatacccggcttctttcaagaggctgatgctgaagcagcaaggaatgcgaactacatgggagtacccctttgcggtcgcgggtgtaaatatctcatacatgttgattcaactgctggagctcaactcaggtcacattgcaagtatagtatcaggttttgttttctttctcaagatgtggaatctttggatttgatcacgactgttggacgatgagcatgcattatattataataggcacatggtggacacagctggttgctgataactgctaaccgatgcgcaaccgtctcgtcccgttgcatgtatgcctgccttgtgctgccacccatgattgccctgcctgatcatcatccatataccagcacacagaacaagccaatttgcgccagaaccgtcatgtggtttcaaacagaaaaagaaagaaa

SEQ ID NO: 14094 - DNA, 1159 bp, Zea Mays
atggccggcatatatggttgcattgagctgggccttgtgattctaatgttgttgcaaaaacgaaagggtgtgggtggatggttgggcggcatgcgcggtcttttcagcggctcgggcaaaaggcgacaagtcagtgcagagaagatagtgcttgatctaacccctctacaggaacagaggctgcaaagtctgaaggaaaggctaaatgtgccatatgacgaaactcggacagatcatcaagaatcgcttagggctctatggaatgcatcctttcccgatacagagctcactagcttagtttcagaacagtggaaagacatggggtggcagggcgtgaacccagcaactgatttcaggggctgtgggtttgtttcgctcgagaaccttttgttttttgcaagaacatacccggcttctttcaagaggctgatgctgaagcagcaaggaatgcgaactacatgggagtacccctttgcggtcgcgggtgtaaatatctcatacatgttgattcaactgctggagctcaactcagtgcgccccgaagtctttgccagggattaacttcatcaaagtgttgacagaacacgaggatgcattcgacgtgctgtactgcatagcgttcgagatgatggacgcccagtggctagcaatgcgagcctcgtacatgcagttcaaagaggtgctggaggccacaaggcagcagctcgagagggagctctccctggaggatctcaatggcatccatgacctccctgcctgcaacctcttgtacaaatagtgctactggtagttagattatattactgggatgcagtcaaaggaaaatttgatcaggttacatcgtaaccagcatcatcagcctgtaaaaaagaaaaaggaaaagaaaaagagagaagggagacacacatctctggttgtcagtaattcacatacgccacagttttgcccaggatcgatccagcctacagtagggatacacacacaccacgaccacgtatatgtgaaaattgaattaagctggtcaaaaggttgtgtttgcgtttgcacgttttgcggtcatgtcatgtgaagaggaggcgcttgctgtgtgctttttgactggatccgcccgggagtataggccaactgctagctgccgatcgcatgcaatgaatgatca

SEQ ID NO: 14095 - DNA, 1863 bp, Zea Mays
atggccggcatatatggttgcattgagctgggccttgtgattctaatgttgttgcaaaaacgaaagggtgtgggtggatggttgggcggcatgcgcggtggggaagaggaagaggaagagaaagagagagggggagacatagcaggccgccttgagctggcataggatgcgacggtccggcaggggcagggctgggcggtcgacggaggccaattctttaacttccttcctccgtcgatcatccagcaccagcaggagaatcccgtcgaatcccccaacccaagggagcgcgcgcgtatgcctcctccagatccaaagcaacaagcaacagacagcgagggggcaccggggtccgccgcatgtgtgtggttcatggaggatcatgctttcctgcttactgcattagctcctgacgcgccaccctcccctcgcgttcattgatttctgttataattactcacattattattggtaaagaaagaaagggcacctcttctaatttgatgggcattccgttaccgtctcaacttcaacgtcaacaacaggtaggacggagtaccattcttttcttttgtacatttgttgtcgactctataatcgctctatgtttctcaacaaggttgcatagagaaaaaggtccatttcatgttcaggaatattgaatgtctatatatgtttctgaacaaggttgcatagagaataagatccatttttcatgttgaggaatattgaatcgagagttttataatgacctcattgcagttgatgctactatggttggaaatcgggcatggtttgcaggtcttttcagcggctcgggcaaaaggcgacaagtcagtgcagagaagatagtgcttgatctaacccctctacaggaacagaggctgcaaagtctgaaggaaaggctaaatgtgccatatgacgaaactcggacagatcatcaagaatcgcttagggctctatggaatgcatcctttcccgatacagagctcactagcttagtttcagaacagtggaaagacatggggtggcagggcgtgaacccagcaactgatttcaggggctgtgggtttgtttcgctcgagaaccttttgttttttgcaagaacatacccggcttctttcaagaggctgatgctgaagcagcaaggaatgcgaactacatgggagtacccctttgcggtcgcgggtgtaaatatctcatacatgttgattcaactgctggagctcaactcagtgcgccccgaagtctttgccagggattaacttcatcaaagtgttgacagaacacgaggatgcattcgacgtgctgtactgcatagcgttcgagatgatggacgcccagtggctagcaatgcgagcctcgtacatgcagttcaaagaggtgctggaggccacaaggcagcagctcgagagggagctctccctggaggatctcaatggcatccatgacctccctgcctgcaacctcttgtacaaatagtgctactggtagttagattatattactgggatgcagtcaaaggaaaatttgatcaggttacatcgtaaccagcatcatcagcctgtaaaaaagaaaaaggaaaagaaaaagagagaagggagacacacatctctggttgtcagtaattcacatacgccacagttttgcccaggatcgatccagcctacagtagggatacacacacaccacgaccacgtatatgtgaaaattgaattaagctggtcaaaaggttgtgtttgcgtttgcacgttttgcggtcatgtcatgtgaagaggaggcgcttgctgtgtgctttttgactggatccgcccgggagtataggccaactgctagctgccgatcgcatgcaatgaatgatca

SEQ ID NO: 14096 - DNA, 1486 bp, Zea Mays
atggccggcatatatggttgcattgagctgggccttgtgattctaatgttgttgcaaaaacgaaagggtgtgggtggatggttgggcggcatgcgcggtggggaagaggaagaggaagagaaagagagagggggagacatagcaggccgccttgagctggcataggatgcgacggtccggcaggggcagggctgggcggtcgacggaggccaattctttaacttccttcctccgtcgatcatccagcaccagcaggagaatcccgtcgaatcccccaacccaagggagcgcgcgcgtatgcctcctccagatccaaagcaacaagcaacagacagcgagggggcaccggggtccgccgcatgtgtgtggttcatggaggatcatgctttcctgcttactgcattagctcctgacgcgccaccctcccctcgcgttcattgatttctgttataattactcacattattattggtaaagaaagaaagggcacctcttctaatttgatgggcattccgttaccgtctcaacttcaacgtcaacaacaggtcttttcagcggctcgggcaaaaggcgacaagtcagtgcagagaagatagtgcttgatctaacccctctacaggaacagaggctgcaaagtctgaaggaaaggctaaatgtgccatatgacgaaactcggacagatcatcaagaatcgcttagggctctatggaatgcatcctttcccgatacagagctcactagcttagtttcagaacagtggaaagacatggggtggcagggcgtgaacccagcaactgatttcaggggctgtgggtttgtttcgctcgagaaccttttgttttttgcaagaacatacccgtgcgccccgaagtctttgccagggattaacttcatcaaagtgttgacagaacacgaggatgcattcgacgtgctgtactgcatagcgttcgagatgatggacgcccagtggctagcaatgcgagcctcgtacatgcagttcaaagaggtgctggaggccacaaggcagcagctcgagagggagctctccctggaggatctcaatggcatccatgacctccctgcctgcaacctcttgtacaaatagtgctactggtagttagattatattactgggatgcagtcaaaggaaaatttgatcaggttacatcgtaaccagcatcatcagcctgtaaaaaagaaaaaggaaaagaaaaagagagaagggagacacacatctctggttgtcagtaattcacatacgccacagttttgcccaggatcgatccagcctacagtagggatacacacacaccacgaccacgtatatgtgaaaattgaattaagctggtcaaaaggttgtgtttgcgtttgcacgttttgcggtcatgtcatgtgaagaggaggcgcttgctgtgtgctttttgactggatccgcccgggagtataggccaactgctagctgccgatcgcatgcaatgaatgatca

SEQ ID NO: 14097 - DNA, 1525 bp, Zea Mays
atggccggcatatatggttgcattgagctgggccttgtgattctaatgttgttgcaaaaacgaaagggtgtgggtggatggttgggcggcatgcgcggtggggaagaggaagaggaagagaaagagagagggggagacatagcaggccgccttgagctggcataggatgcgacggtccggcaggggcagggctgggcggtcgacggaggccaattctttaacttccttcctccgtcgatcatccagcaccagcaggagaatcccgtcgaatcccccaacccaagggagcgcgcgcgtatgcctcctccagatccaaagcaacaagcaacagacagcgagggggcaccggggtccgccgcatgtgtgtggttcatggaggatcatgctttcctgcttactgcattagctcctgacgcgccaccctcccctcgcgttcattgatttctgttataattactcacattattattggtaaagaaagaaagggcacctcttctaatttgatgggcattccgttaccgtctcaacttcaacgtcaacaacagttgatgctactatggttggaaatcgggcatggtttgcaggtcttttcagcggctcgggcaaaaggcgacaagtcagtgcagagaagatagtgcttgatctaacccctctacaggaacagaggctgcaaagtctgaaggaaaggctaaatgtgccatatgacgaaactcggacagatcatcaagaatcgcttagggctctatggaatgcatcctttcccgatacagagctcactagcttagtttcagaacagtggaaagacatggggtggcagggcgtgaacccagcaactgatttcaggggctgtgggtttgtttcgctcgagaaccttttgttttttgcaagaacatacccgtgcgccccgaagtctttgccagggattaacttcatcaaagtgttgacagaacacgaggatgcattcgacgtgctgtactgcatagcgttcgagatgatggacgcccagtggctagcaatgcgagcctcgtacatgcagttcaaagaggtgctggaggccacaaggcagcagctcgagagggagctctccctggaggatctcaatggcatccatgacctccctgcctgcaacctcttgtacaaatagtgctactggtagttagattatattactgggatgcagtcaaaggaaaatttgatcaggttacatcgtaaccagcatcatcagcctgtaaaaaagaaaaaggaaaagaaaaagagagaagggagacacacatctctggttgtcagtaattcacatacgccacagttttgcccaggatcgatccagcctacagtagggatacacacacaccacgaccacgtatatgtgaaaattgaattaagctggtcaaaaggttgtgtttgcgtttgcacgttttgcggtcatgtcatgtgaagaggaggcgcttgctgtgtgctttttgactggatccgcccgggagtataggccaactgctagctgccgatcgcatgcaatgaatgatca

SEQ ID NO: 14098 - DNA, 2289 bp, Zea Mays
tatttgtataaaataatatttattcattaagccttgaacgatctttgtacatatatctaggatgtacattttgtataaaataataatatttacggaggcgaaagctgagagcgtgagatcacgcgcgtactaaatcaatctatcagggcgcagtgtttcctaattcttttcattctgctgtaagcgagtcaagccactactatctcttctacctgcatacccaccaccattaaatcagtctggtgtgtggccagcacaaattctttgctgtcagtcagaatcagaagaggaactagagctgcgtgccgctgcactcctccgatctttaattgcgggcaccagctgctgccgaggatcacggaacgacgaagaagactgcgacggttgccttcccttcgatcctgatcctgccgcagatggtttcttgttattagcagcagccttggcagccgcctctttcacctctctgcacaccttgtccaggatccccaggaagtcgcggacaacgacgaacagccgcaggccctcatctttccccgtgctcccatggaagtagtctacagttgtgcgtaccagcgcccgtagcttcttttcctcctccagaagctgggtcacgcgcacctgggactgctcgatgaactcgccaagcttgcgatggaacccactgtcctcgtctaagctcttcatgcccgtgttcaagaactcgttcgccttcaccagcttgtgccccaggctcgccaccgagatggtcagcgcatcggcgtccaggattgccgccttccgcacgttctggaggtcgtctcccaggctggaaacgacgcccaggcctagctgcttgtagtgctccgtgtcgtcgctgacatcctcggtgagatcgtcagaagtcacgctggatatgctgctgttgctctgctctttggcggcccgaaccgcacgcacgccctctgaccgaatgatctcctggacaacaaagtgaagcagcgtcgtcttgccgtcgacccccttcacgtctgagagcttcaggagggtgtccagcttgaacgcctgggccccacctcgaaaggtgccatcgttcatccggttcccagtcttgagtacagcctctagcagcttcttgaatagacggctgttccgaagctcatggcaggccacctgttttcgaccaagaaaagcttcttccggcaaactggacatgaaaagcaacacatccaggcgctgatagaggtaaggtatgtcaatgatggtcctcaagaattgctctgcaggaccaagttgagtgagctccccggtgtatagccgaagccttagctcctcgtcgctgcttggagtccaccttatcaaggaggacctgcaacattccctgctttcttcaacggtggcggaccacgcgcttttggaccaccaggcattgctggtggtggaggtccagctccacctctacttggtgggggtggaggtccgggtccgggtccagctctacttggcggtggtggaggtccgggtccggctgcaggcctaggagcaggaggcgttgggggtcctggtgggggtggattgctcgaactagcagctgtaggcatctttggaggaggtggtactggtggtgctggtgctggtgcaagtggtgcatgaggagcctttgggagaggatgacctagaggtggtggcggtggtggtggtgctggaccagctgcaggtttacatatgttgccagtggcattactagaaggaactgcagctttcacttcctcagaattagtagaggctgacggacgtccagcaatggaggtaatttaaattctttacgctggctctctgatgaactggttgataatgcccccaacctgttgacatcaattggggtagagcatgatttacgcgaagaacctgttgcattaatgaacagggcatgaattgacaggtaaataagctgagtaagaattcctctctgtctattttttttgtgtgtgcgaaagcatccatgcaagagagaaattggatgagctagaaaaaaaaacacaaaagcagctttgttttcttttgtagcacctgataaatcactcatattcagactcagcagtggattgccatcatatgatgattctgggtcttcgcttccacgacaagcacagtagcacagacatataagagccaccaatgctacacaagccactgacaaagcagcaataatagtgccactgttgtccttgctcttgtgtttgggctctggtttaccagactttttcacagtagcaactagcaggagacaacctacgaactgcaaacctt

SEQ ID NO: 14099 - DNA, 2262 bp, Zea Mays
tatttgtataaaataatatttattcattaagccttgaacgatctttgtacatatatctaggatgtacattttgtataaaataataatatttacggaggcgaaagctgagagcgtgagatcacgcgcgtactaaatcaatctatcagggcgcagtgtttcctaattcttttcattctgctgtaagcgagtcaagccactactatctcttctacctgcatacccaccaccattaaatcagtctggtgtgtggccagcacaaattctttgctgtcagtcagaatcagaagaggaactagagctgcgtgccgctgcactcctccgatctttaattgcgggcaccagctgctgccgaggatcacggaacgacgaagaagactgcgacggttgccttcccttcgatcctgatcctgccgcagatggtttcttgttattagcagcagccttggcagccgcctctttcacctctctgcacaccttgtccaggatccccaggaagtcgcggacaacgacgaacagccgcaggccctcatctttccccgtgctcccatggaagtagtctacagttgtgcgtaccagcgcccgtagcttcttttcctcctccagaagctgggtcacgcgcacctgggactgctcgatgaactcgccaagcttgcgatggaacccactgtcctcgtctaagctcttcatgcccgtgttcaagaactcgttcgccttcaccagcttgtgccccaggctcgccaccgagatggtcagcgcatcggcgtccaggattgccgccttccgcacgttctggaggtcgtctcccaggctggaaacgacgcccaggcctagctgcttgtagtgctccgtgtcgtcgctgacatcctcggtgagatcgtcagaagtcacgctggatatgctgctgttgctctgctctttggcggcccgaaccgcacgcacgccctctgaccgaatgatctcctggacaacaaagtgaagcagcgtcgtcttgccgtcgacccccttcacgtctgagagcttcaggagggtgtccagcttgaacgcctgggccccacctcgaaaggtgccatcgttcatccggttcccagtcttgagtacagcctctagcagcttcttgaatagacggctgttccgaagctcatggcaggccacctgttttcgaccaagaaaagcttcttccggcaaactggacatgaaaagcaacacatccaggcgctgatagaggtaaggtatgtcaatgatggtcctcaagaattgctctgcaggaccaagttgagtgagctccccggtgtatagccgaagccttagctcctcgtcgctgcttggagtccaccttatcaaggaggacctgcaacattccctgctttcttcaacggtggcggaccacgcgcttttggaccaccaggcattgctggtggtggaggtccagctccacctctacttggtgggggtggaggtccgggtccgggtccagctctacttggcggtggtggaggtccgggtccggctgcaggcctaggagcaggaggcgttgggggtcctggtgggggtggattgctcgaactagcagctgtaggcatctttggaggaggtggtactggtggtgctggtgctggtgcaagtggtgcatgaggagcctttgggagaggatgacctagaggtggtggcggtggtggtggtgctggaccagctgcaggtttacatatgttgccagtggcattactagaaggaactgcagctttcacttcctcagaattagtagaggctgacggacgtccagcaatggaggtaatttaaattctttacgctggctctctgatgaactggttgataatgcccccaacctgttgacatcaattggggtagagcatgatttacgcgaagaacctgttgcattaatgaacagggcatgaattgacagactcagcagtggattgccatcatatgatgattctgggtcttcgcttccacgacaagcacagtagcacagacatataagagccaccaatgctacacaagccactgacaaagcagcaataatagtgccactgttgtccttgctcttgtgtttgggctctggtttaccagactttttcacagtagcaactagcaggagacggcagctggcaagctggtggccagaacaagctagtcctgatcgcaccagccagctgcagcagcagacaaatgagctcaatggatgaccaaattaaccggccattggtacctcatccaatagggataaccacagctgcctcaagg

SEQ ID NO: 14100 - DNA, 641 bp, Zea Mays
gctagatccagcaggggagggaggtagaggaggaggggagggaactgctggtggtcgacagcgggcgaaggcgccaacgacaatccaggatatggattcctgagtacaccagaggtcctgcagcgggtcacaaccactgagatattgcagggcaatgacagtcttgggttgaaatatgtggaagattataatgggaaattggtggactgcatggaagatacccgtaggacccacgatgccgcgtgtgcagcagcagcaggacaccccgccgcggggaggcgccaccccaagaagcgtcgtcgcagggacatggattccccatcactaactctgacccctaatgcatcatgctggtcatcctcattcaggccgctgcggcggagtgcgcgacaggtgaaggcagcagcgaggatgatggtgacgccgcgtggaaggcagccattgactccatcgtctccgttggattcagcgtcccttcgtccaacggcatggtgaaggcagcctctagcggcaacgacgaggtgaacaaccacgtggatctggaagagccgcgtgagaggaaactaaagggtcctggcttaagttgtatcaggtgtgtattaaactctaacacctttataattgttgcattagtagcttag

SEQ ID NO: 14101 - DNA, 1400 bp, Zea Mays
gcccttcccttggctacctctgtctgtctgtgtcttgtccagtccgggtctccagggctccggcaccggcaggcagagagctaccaaaccccaccaccacgaacggccgccgccgacgagacgggggcgcatggcgactgcatcctccttcaccgccatcttcttcagcagcgccttcgcggcctgcttcgcggagccaaagtgcggctccagctgcaaaggaaggcaccactaccgtcgccaccagtggctgcagcagctgctgctggaggcacgctagccacaatcatgtgcatcgccagggaggaaggggttgccgcgctctggaagggcgtcatccccggcctccaccgtcagttcctctatggcggcctccgcatcggcttgtatgagcctgtgaaggctttcttcgtcggaggcgctgttgtgggtgatgtcagtttactaagcaagatccttgctgcacttaccacaggtgtgatagcgattgttgtggcaaatccaactgatcttgtcaaagttaggttgcaagctgatggaaaagctaacactatcaagaggagttattctggagcccttaatgcatacgctacaataatcagacaggaaggtattggagctttgtggactggccttggtccaaatgtcgcacgcaatgccataattaacgctgccgagttggccagctatgatcagttcaaacagatgtttctaaaacttcctgggtttactgataacgtttttacgcatcttttagctggacttggtgctgggttttttgctgtttgcattggctctccggtggatgtggtgaaatcaagaatgatgggtgattcaacgtacagaagtactcttgactgttttaccaagacattaaagaatgatctgcagcagtccaaacagtcggctttaatccgaagcgtattgtgctttgaccattaattcagttgaaaagttggttacagggacctggtgctttctacaagggattcattgcaaacttttgtcggattgggtcatggaatgtgataatgttcttaactctggaacaggtcaaaagattctttctatgaagagatgtctgcactgcaagtagggattgtgtgggacaagggtatgctgatatatatgggcggcataattgcatgattatttgaagctacaggtttgtcaaccaacagaaagcagccatatatgccatactgccacctacgtctggctcttagattacatatgacaatatgttctcatgttgcattttgattattatgtggcgatgctgtaatatttttgtatcacaaattgatcatacagaccactgtgttggtatattgtagagagcgacactgttcactacttcactgcaagttgacgttcatgccgaaacacttatgaagttt

SEQ ID NO: 14102 - DNA, 1320 bp, Zea Mays
gcccttcccttggctacctctgtctgtctgtgtcttgtccagtccgggtctccagggctccggcaccggcaggcagagagctaccaaaccccaccaccacgaacggccgccgccgacgagacgggggcgcatggcgactgcatcctccttcaccgccatcttcttcagcagcgccttcgcggcctgcttcgcggagccaaagtgcggctccagctgcaaaggaaggcaccactaccgtcgccaccagtggctgcagcagctgctgctggaggcacgctagccacaatcatgtgcatcgccagggaggaaggggttgccgcgctctggaagggcgtcatccccggcctccaccgtcagttcctctatggcggcctccgcatcggcttgtatgagcctgtgaaggctttcttcgtcggaggcgctgttgtgggtgatgtcagtttactaagcaagatccttgctgcacttaccacaggtgtgatagcgattgttgtggcaaatccaactgatcttgtcaaagttaggttgcaagctgatggaaaagctaacactatcaagaggagttattctggagcccttaatgcatacgctacaataatcagacaggaaggtattggagctttgtggactggccttggtccaaatgtcgcacgcaatgccataattaacgctgccgagttggccagctatgatcagttcaaacagatgtttctaaaacttcctgggtttactgataacgtttttacgcatcttttagctggacttggtgctgggttttttgctgtttgcattggctctccggtggatgtggtgaaatcaagaatgatgggtgattcaacgtacagaagtactcttgactgttttaccaagacattaaagaatgatggacctggtgctttctacaagggattcattgcaaacttttgtcggattgggtcatggaatgtgataatgttcttaactctggaacaggtcaaaagattctttctatgaagagatgtctgcactgcaagtagggattgtgtgggacaagggtatgctgatatatatgggcggcataattgcatgattatttgaagctacaggtttgtcaaccaacagaaagcagccatatatgccatactgccacctacgtctggctcttagattacatatgacaatatgttctcatgttgcattttgattattatgtggcgatgctgtaatatttttgtatcacaaattgatcatacagaccactgtgttggtatattgtagagagcgacactgttcactacttcactgcaagttgacgttcatgccgaaacacttatgaagttt

SEQ ID NO: 14103 - DNA, 1373 bp, Zea Mays
gcccttcccttggctacctctgtctgtctgtgtcttgtccagtccgggtctccagggctccggcaccggcaggcagagagctaccaaaccccaccaccacgaacggccgccgccgacgagacgggggcgcatggcgactgcatcctccttcaccgccatcttcttcagcagcgccttcgcggcctgcttcgcggaggtgtgcaccattcctttggacacagccaaagtgcggctccagctgcaaaggaaggcaccactaccgtcgccaccagtggctgcagcagctgctgctggaggcacgctagccacaatcatgtgcatcgccagggaggaaggggttgccgcgctctggaagggcgtcatccccggcctccaccgtcagttcctctatggcggcctccgcatcggcttgtatgagcctgtgaaggctttcttcgtcggaggcgctgttgtgggtgatgtcagtttactaagcaagatccttgctgcacttaccacaggtgtgatagcgattgttgtggcaaatccaactgatcttgtcaaagttaggttgcaagctgatggaaaagctaacactatcaagaggagttattctggagcccttaatgcatacgctacaataatcagacaggaaggtattggagctttgtggactggccttggtccaaatgtcgcacgcaatgccataattaacgctgccgagttggccagctatgatcagttcaaacagctggacttggtgctgggttttttgctgtttgcattggctctccggtggatgtggtgaaatcaagaatgatgggtgattcaacgtacagaagtactcttgactgttttaccaagacattaaagaatgatctgcagcagtccaaacagtcggctttaatccgaagcgtattgtgctttgaccattaattcagttgaaaagttggttacagggacctggtgctttctacaagggattcattgcaaacttttgtcggattgggtcatggaatgtgataatgttcttaactctggaacaggtcaaaagattctttctatgaagagatgtctgcactgcaagtagggattgtgtgggacaagggtatgctgatatatatgggcggcataattgcatgattatttgaagctacaggtttgtcaaccaacagaaagcagccatatatgccatactgccacctacgtctggctcttagattacatatgacaatatgttctcatgttgcattttgattattatgtggcgatgctgtaatatttttgtatcacaaattgatcatacagaccactgtgttggtatattgtagagagcgacactgttcactacttcactgcaagttgacgttcatgccgaaacacttatgaagttt

SEQ ID NO: 14104 - DNA, 1265 bp, Zea Mays
cttcccttggctacctctgtctgtctgtgtcttgtccagtccgggtctccagggctccggcaccggcaggcagagagctaccaaaccccaccaccacgaacggccgccgccgacgagacgggggcgcatggcgactgcatcctccttcaccgccatcttcttcagcagcgccttcgcggcctgcttcgcggagccaaagtgcggctccagctgcaaaggaaggcaccactaccgtcgccaccagtggctgcagcagctgctgctggaggcacgctagccacaatcatgtgcatcgccagggaggaaggggttgccgcgctctggaagggcgtcatccccggcctccaccgtcagttcctctatggcggcctccgcatcggcttgtatgagcctgtgaaggctttcttcgtcggaggcgctgttgtgggtgatgtcagtttactaagcaagatccttgctgcacttaccacaggtgtgatagcgattgttgtggcaaatccaactgatcttgtcaaagttaggttgcaagctgatggaaaagctaacactatcaagaggagttattctggagcccttaatgcatacgctacaataatcagacaggaaggtattggagctttgtggactggccttggtccaaatgtcgcacgcaatgccataattaacgctgccgagttggccagctatgatcagttcaaacagctggacttggtgctgggttttttgctgtttgcattggctctccggtggatgtggtgaaatcaagaatgatgggtgattcaacgtacagaagtactcttgactgttttaccaagacattaaagaatgatggacctggtgctttctacaagggattcattgcaaacttttgtcggattgggtcatggaatgtgataatgttcttaactctggaacaggtcaaaagattctttctatgaagagatgtctgcactgcaagtagggattgtgtgggacaagggtatgctgatatatatgggcggcataattgcatgattatttgaagctacaggtttgtcaaccaacagaaagcagccatatatgccatactgccacctacgtctggctcttagattacatatgacaatatgttctcatgttgcattttgattattatgtggcgatgctgtaatatttttgtatcacaaattgatcatacagaccactgtgttggtatattgtagagagcgacactgttcactacttcactgcaagttgacgttcatgccgaaacacttatgaagttt

SEQ ID NO: 14105 - DNA, 1338 bp, Zea Mays
cttcccttggctacctctgtctgtctgtgtcttgtccagtccgggtctccagggctccggcaccggcaggcagagagctaccaaaccccaccaccacgaacggccgccgccgacgagacgggggcgcatggcgactgcatcctccttcaccgccatcttcttcagcagcgccttcgcggcctgcttcgcggaggtgtgcaccattcctttggacacagccaaagtgcggctccagctgcaaaggaaggcaccactaccgtcgccaccagtggctgcagcagctgctgctggaggcacgctagccacaatcatgtgcatcgccagggaggaaggggttgccgcgctctggaagggcgtcatccccggcctccaccgtcagttcctctatggcggcctccgcatcggcttgtatgagcctgtgaaggctttcttcgtcggaggcgctgttgtgggtgatgtcagtttactaagcaagatccttgctgcacttaccacaggtgtgatagcgattgttgtggcaaatccaactgatcttgtcaaagttaggttgcaagctgatggaaaagctaacactatcaagaggagttattctggagcccttaatgcatacgctacaataatcagacaggtattggagctttgtggactggccttggtccaaatgtcgcacgcaatgccataattaacgctgccgagttggccagctatgatcagttcaaacagatgtttctaaaacttcctgggtttactgataacgtttttacgcatcttttagctggacttggtgctgggttttttgctgtttgcattggctctccggtggatgtggtgaaatcaagaatgatgggtgattcaacgtacagaagtactcttgactgttttaccaagacattaaagaatgatggacctggtgctttctacaagggattcattgcaaacttttgtcggattgggtcatggaatgtgataatgttcttaactctggaacaggtcaaaagattctttctatgaagagatgtctgcactgcaagtagggattgtgtgggacaagggtatgctgatatatatgggcggcataattgcatgattatttgaagctacaggtttgtcaaccaacagaaagcagccatatatgccatactgccacctacgtctggctcttagattacatatgacaatatgttctcatgttgcattttgattattatgtggcgatgctgtaatatttttgtatcacaaattgatcatacagaccactgtgttggtatattgtagagagcgacactgttcactacttcactgcaagttgacgttcatgccgaaacacttatgaagttt

SEQ ID NO: 14106 - DNA, 1422 bp, Zea Mays
cttcccttggctacctctgtctgtctgtgtcttgtccagtccgggtctccagggctccggcaccggcaggcagagagctaccaaaccccaccaccacgaacggccgccgccgacgagacgggggcgcatggcgactgcatcctccttcaccgccatcttcttcagcagcgccttcgcggcctgcttcgcggaggtgtgcaccattcctttggacacagccaaagtgcggctccagctgcaaaggaaggcaccactaccgtcgccaccagtggctgcagcagctgctgctggaggcacgctagccacaatcatgtgcatcgccagggaggaaggggttgccgcgctctggaagggcgtcatccccggcctccaccgtcagttcctctatggcggcctccgcatcggcttgtatgagcctgtgaaggctttcttcgtcggaggcgctgttgtgggtgatgtcagtttactaagcaagatccttgctgcacttaccacaggtgtgatagcgattgttgtggcaaatccaactgatcttgtcaaagttaggttgcaagctgatggaaaagctaacactatcaagaggagttattctggagcccttaatgcatacgctacaataatcagacaggaaggtattggagctttgtggactggccttggtccaaatgtcgcacgcaatgccataattaacgctgccgagttggccagctatgatcagttcaaacagatgtttctaaaacttcctgggtttactgataacgtttttacgcatcttttagctggacttggtgctgggttttttgctgtttgcattggctctccggtggatgtggtgaaatcaagaatgatgggtgattcaacgtacagaagtactcttgactgttttaccaagacattaaagaatgatctgcagcagtccaaacagtcggctttaatccgaagcgtattgtgctttgaccattaattcagttgaaaagttggttacagggacctggtgctttctacaagggattcattgcaaacttttgtcggattgggtcatggaatgtgataatgttcttaactctggaacaggtcaaaagattctttctatgaagagatgtctgcactgcaagtagggattgtgtgggacaagggtatgctgatatatatgggcggcataattgcatgattatttgaagctacaggtttgtcaaccaacagaaagcagccatatatgccatactgccacctacgtctggctcttagattacatatgacaatatgttctcatgttgcattttgattattatgtggcgatgctgtaatatttttgtatcacaaattgatcatacagaccactgtgttggtatattgtagagagcgacactgttcactacttcactgcaagttgacgttcatgccgaaacacttatgaagttt

SEQ ID NO: 14107 - DNA, 1255 bp, Zea Mays
cttcccttggctacctctgtctgtctgtgtcttgtccagtccgggtctccagggctccggcaccggcaggcagagagctaccaaaccccaccaccacgaacggccgccgccgacgagacgggggcgcatggcgactgcatcctccttcaccgccatcttcttcagcagcgccttcgcggcctgcttcgcggagccaaagtgcggctccagctgcaaaggaaggcaccactaccgtcgccaccagtggctgcagcagctgctgctggaggcacgctagccacaatcatgtgcatcgccagggaggaaggggttgccgcgctctggaagggcgtcatccccggcctccaccgtcagttcctctatggcggcctccgcatcggcttgtgaaggctttcttcgtcggaggcgctgttgtgggtgatgtcagtttactaagcaagatccttgctgcacttaccacaggtgtgatagcgattgttgtggcaaatccaactgatcttgtcaaagttaggttgcaagctgatggaaaagctaacactatcaagaggagttattctggagcccttaatgcatacgctacaataatcagacaggaaggtattggagctttgtggactggccttggtccaaatgtcgcacgcaatgccataattaacgctgccgagttggccagctatgatcagttcaaacagctggacttggtgctgggttttttgctgtttgcattggctctccggtggatgtggtgaaatcaagaatgatgggtgattcaacgtacagaagtactcttgactgttttaccaagacattaaagaatgatggacctggtgctttctacaagggattcattgcaaacttttgtcggattgggtcatggaatgtgataatgttcttaactctggaacaggtcaaaagattctttctatgaagagatgtctgcactgcaagtagggattgtgtgggacaagggtatgctgatatatatgggcggcataattgcatgattatttgaagctacaggtttgtcaaccaacagaaagcagccatatatgccatactgccacctacgtctggctcttagattacatatgacaatatgttctcatgttgcattttgattattatgtggcgatgctgtaatatttttgtatcacaaattgatcatacagaccactgtgttggtatattgtagagagcgacactgttcactacttcactgcaagttgacgttcatgccgaaacacttatgaagttt

SEQ ID NO: 14108 - DNA, 1290 bp, Zea Mays
cttcccttggctacctctgtctgtctgtgtcttgtccagtccgggtctccagggctccggcaccggcaggcagagagctaccaaaccccaccaccacgaacggccgccgccgacgagacgggggcgcatggcgactgcatcctccttcaccgccatcttcttcagcagcgccttcgcggcctgcttcgcggaggtgtgcaccattcctttggacacagccaaagtgcggctccagctgcaaaggaaggcaccactaccgtcgccaccagtggctgcagcagctgctgctggaggcacgctagccacaatcatgtgcatcgccagggaggaaggggttgccgcgctctggaagggcgtcatccccggcctccaccgtcagttcctctatggcggcctccgcatcggcttgtatgagcctgtgaaggctttcttcgtcggaggcgctgttgtgggtgatgtcagtttactaagcaagatccttgctgcacttaccacaggtgtgatagcgattgttgtggcaaatccaactgatcttgtcaaagttaggttgcaagctgatggaaaagctaacactatcaagaggagttattctggagcccttaatgcatacgctacaataatcagacaggaaggtattggagctttgtggactggccttggtccaaatgtcgcacgcaatgccataattaacgctgccgagttggccagctatgatcagttcaaacagctggacttggtgctgggttttttgctgtttgcattggctctccggtggatgtggtgaaatcaagaatgatgggtgattcaacgtacagaagtactcttgactgttttaccaagacattaaagaatgatggacctggtgctttctacaagggattcattgcaaacttttgtcggattgggtcatggaatgtgataatgttcttaactctggaacaggtcaaaagattctttctatgaagagatgtctgcactgcaagtagggattgtgtgggacaagggtatgctgatatatatgggcggcataattgcatgattatttgaagctacaggtttgtcaaccaacagaaagcagccatatatgccatactgccacctacgtctggctcttagattacatatgacaatatgttctcatgttgcattttgattattatgtggcgatgctgtaatatttttgtatcacaaattgatcatacagaccactgtgttggtatattgtagagagcgacactgttcactacttcactgcaagttgacgttcatgccgaaacacttatgaagttt

SEQ ID NO: 14109 - DNA, 1414 bp, Zea Mays
cttcccttggctacctctgtctgtctgtgtcttgtccagtccgggtctccagggctccggcaccggcaggcagagagctaccaaaccccaccaccacgaacggccgccgccgacgagacgggggcgcatggcgactgcatcctccttcaccgccatcttcttcagcagcgccttcgcggcctgcttcgcggaggtgtgcaccattcctttggacacagccaaagtgcggctccagctgcaaaggaaggcaccactaccgtcgccaccagtggctgcagcagctgctgctggaggcacgctagccacaatcatgtgcatcgccagggaggaaggggttgccgcgctctggaagggcgtcatccccggcctccaccgtcagttcctctatggcggcctccgcatcggcttgtatgagcctgtgaaggctttcttcgtcggaggcgctgttgtgggtgatgtcagtttactaagcaagatccttgctgcacttaccacaggtgtgatagcgattgttgtggcaaatccaactgatcttgtcaaagttaggttgcaagctgatggaaaagctaacactatcaagaggagttattctggagcccttaatgcatacgctacaataatcagacaggaaggtattggagctttgtggactggccttggtccaaatgtcgcacgcaatgccataattaacgctgccgagttggccagctatgatcagttcaaacagatgtttctaaaacttcctgggtttactgataacgtttttacgcatcttttagctggacttggtgctgggttttttgctgtttgcattggctctccggtggatgtggtgaaatcaagaatgatgggtgattcaacgtacagaagtactcttgactgttttaccaagacattaaagaatgatctgcagcagtccaaacagtcggctttaatccgaagcgtattgtgctttgaccattaattcagttgaaaagttggttacagggacctggtgctttctacaagggattcattgcaaacttttgtcggattgggtcatggaatgtgataatgttcttaactctggaacagattctttctatgaagagatgtctgcactgcaagtagggattgtgtgggacaagggtatgctgatatatatgggcggcataattgcatgattatttgaagctacaggtttgtcaaccaacagaaagcagccatatatgccatactgccacctacgtctggctcttagattacatatgacaatatgttctcatgttgcattttgattattatgtggcgatgctgtaatatttttgtatcacaaattgatcatacagaccactgtgttggtatattgtagagagcgacactgttcactacttcactgcaagttgacgttcatgccgaaacacttatgaagttt

SEQ ID NO: 14110 - DNA, 1418 bp, Zea Mays
cttcccttggctacctctgtctgtctgtgtcttgtccagtccgggtctccagggctccggcaccggcaggcagagagctaccaaaccccaccaccacgaacggccgccgccgacgagacgggggcgcatggcgactgcatcctccttcaccgccatcttcttcagcagcgccttcgcggcctgcttcgcggaggtgtgcaccattcctttggacacagccaaagtgcggctccagctgcaaaggaaggcaccactaccgtcgccaccagtggctgcagcagctgctgctggaggcacgctagccacaatcatgtgcatcgccagggaggaaggggttgccgcgctctggaagggcgtcatccccggcctccaccgtcagttcctctatggcggcctccgcatcggcttgtatgagcctgtgaaggctttcttcgtcggaggcgctgttgtgggtgatgtcagtttactaagcaagatccttgctgcacttaccacaggtgtgatagcgattgttgtggcaaatccaactgatcttgtcaaagttaggttgcaagctgatggaaaagctaacactatcaagaggagttattctggagcccttaatgcatacgctacaataatcagacaggtattggagctttgtggactggccttggtccaaatgtcgcacgcaatgccataattaacgctgccgagttggccagctatgatcagttcaaacagatgtttctaaaacttcctgggtttactgataacgtttttacgcatcttttagctggacttggtgctgggttttttgctgtttgcattggctctccggtggatgtggtgaaatcaagaatgatgggtgattcaacgtacagaagtactcttgactgttttaccaagacattaaagaatgatctgcagcagtccaaacagtcggctttaatccgaagcgtattgtgctttgaccattaattcagttgaaaagttggttacagggacctggtgctttctacaagggattcattgcaaacttttgtcggattgggtcatggaatgtgataatgttcttaactctggaacaggtcaaaagattctttctatgaagagatgtctgcactgcaagtagggattgtgtgggacaagggtatgctgatatatatgggcggcataattgcatgattatttgaagctacaggtttgtcaaccaacagaaagcagccatatatgccatactgccacctacgtctggctcttagattacatatgacaatatgttctcatgttgcattttgattattatgtggcgatgctgtaatatttttgtatcacaaattgatcatacagaccactgtgttggtatattgtagagagcgacactgttcactacttcactgcaagttgacgttcatgccgaaacacttatgaagttt

SEQ ID NO: 14111 - DNA, 265 bp, Zea Mays
atccaatgatgcatcaagtgaataccatccatcagttaattcaatatttgcagacatgtttctattagtggcagagaagctttggttgccactgttgtcttcattagtatctaccttgttaacctccaacttattgttattttggtaaggacaagagtaaatagctgaaatgcacaagaccatcattaaagatggtgaagaattcccttctaaaattttctttattgctgatcgatgaccatgattcacttctctgtcataccta

SEQ ID NO: 14112 - DNA, 806 bp, Zea Mays
gaaggaaaaaaacttgtccgggctcgcgtttctgattcccgtggatctctcatctcgcttgtctcctccatagcagccaggcagccagcatggcggcggctagggtttgcatcgccggtgcatcttgagatccgctgctgctcacgtgtccacgttgcatcgcctttaatccccacatgctccatccatacgctgctggtgctcgtcgctattctcttcatcgtcgggacttgtcggcactactaccatcgccatctgaaccgagctcatgtgcatttacagcggtgaccgagcttggatcctagcgaggacaaaacaacccaaaatttttatgaatgaacccaatgagacaactaagtcagcatgtgactattctatcaagcggtgtttggatcttctagaatcgattctttcagatgaggaaaggacacaggcaacaatgtgctaaagtatgagatcaatagagaattttttatgaacttcaagaattaaaaaggttcatttgttatgggtcaagggcaaaagcactccgaaggcctaatctacattttgacttctttgaatcatgtctgctgatggtcgtcatccatttttgggacattgttgtgaagattggcatgagaaccacctgtatgaactttggaatcgttaactttggagtgccttctgccttgtggcaatttatgtaatttgaatttgtatggaatgttttgttcgattcacgtatttataccgaacaaagtttatccttgctaccaattttgtggattgtaacaacattttagaattctttgttttttcctgtt

SEQ ID NO: 14113 - DNA, 1130 bp, Zea Mays
gaaggaaaaaaacttgtccgggctcgcgtttctgattcccgtggatctctcatctcgcttgtctcctccatagcagccaggcagccagcatggcggcggctagggtttgcatcgccggtgcatcttgagatccgctgctgctcacgtgtccacgttgcatcgcctttaatccccacatgctccatccatacgctgctggtgctcgtcgctattctcttcatcgtcgggacttgtcggcactactaccatcgccatctgaaccgagctcatgtgcatttacagcggtgaccgagcttggatcctagcgaggacaaaacaacccaaaatttttatgaatgaacccaatgagacaactaagtcagcatgtgactattctatcaagcggtgtttggatcttctagaatcgattctttcagatgaggaaaggacacaggcaacaatgtgctaaagtatgagatcaatagagaattttttatgaacttcaagaattaaaaaggttcatttgttatgggtcaagggcaaaagcactccgaaggtaacttactttcatgtgtttgtatttctagtcaattaacatatttaccatgttttatatttgaatttcatagaaaataaaaaaactcatagaaacttgaaaagtattcaattgaaaaacatcaatacatctacacaaggatctatgagcagtatagcaaactctacctacagtcgatgctacctgttgctgctttagttttctgtttgcacaattttatgtaattgtttgaattttatctaattgtaggcctaatctacattttgacttctttgaatcatgtctgctgatggtacttacaaggtgtctgctgatggtacttacaaggtggacatattgtactggatttacactagcctgcttgcaggtcgtcatccatttttgggacattgttgtgaagattggcatgagaaccacctgtatgaactttggaatcgttaactttggagtgccttctgccttgtggcaatttatgtaatttgaatttgtatggaatgttttgttcgattcacgtatttataccgaacaaagtttatccttgctaccaattttgtggattgtaacaacattttagaattctttgttttttcctgtt

SEQ ID NO: 14114 - DNA, 827 bp, Zea Mays
gaaggaaaaaaacttgtccgggctcgcgtttctgattcccgtggatctctcatctcgcttgtctcctccatagcagccaggcagccagcatggcggcggctagggtttgcatcgccggtgcatcttgagatccgctgctgctcacgtgtccacgttgcatcgcctttaatccccacatgctccatccatacgctgctggtgctcgtcgctattctcttcatcgtcgggacttgtcggcactactaccatcgccatctgaaccgagctcatgtgcatttacagcggtgaccgagcttggatcctagcgaggacaaaacaacccaaaatttttatgaatgaacccaatgagacaactaagtcagcatgtgactattctatcaagcggtgtttggatcttctagaatcgattctttcagatgaggaaaggacacaggcaacaatgtgctaaagtatgagatcaatagagaattttttatgaacttcaagaattaaaaaggttcatttgttatgggtcaagggcaaaagcactccgaaggtgtctgctgatggtacttacaaggtggacatattgtactggatttacactagcctgcttgcaggtcgtcatccatttttgggacattgttgtgaagattggcatgagaaccacctgtatgaactttggaatcgttaactttggagtgccttctgccttgtggcaatttatgtaatttgaatttgtatggaatgttttgttcgattcacgtatttataccgaacaaagtttatccttgctaccaattttgtggattgtaacaacattttagaattctttgttttttcctgtt

SEQ ID NO: 14115 - DNA, 720 bp, Zea Mays
gaaggaaaaaaacttgtccgggctcgcgtttctgattcccgtggatctctcatctcgcttgtctcctccatagcagccaggcagccagcatggcggcggctagggtttgcatcgccggtgcatcttgagatccgctgctgctcacgtgtccacgttgcatcgcctttaatccccacatgctccatccatacgctgctggtgctcgtcgctattctcttcatcgtcgggacttgtcggcactactaccatcgccatctgaaccgagctcatgtgcatttacagcggtgaccgagcttggatcctagcgagatgaggaaaggacacaggcaacaatgtgctaaagtatgagatcaatagagaattttttatgaacttcaagaattaaaaaggttcatttgttatgggtcaagggcaaaagcactccgaaggtgtctgctgatggtacttacaaggtggacatattgtactggatttacactagcctgcttgcaggtcgtcatccatttttgggacattgttgtgaagattggcatgagaaccacctgtatgaactttggaatcgttaactttggagtgccttctgccttgtggcaatttatgtaatttgaatttgtatggaatgttttgttcgattcacgtatttataccgaacaaagtttatccttgctaccaattttgtggattgtaacaacattttagaattctttgttttttcctgtt

SEQ ID NO: 14116 - DNA, 1023 bp, Zea Mays
gaaggaaaaaaacttgtccgggctcgcgtttctgattcccgtggatctctcatctcgcttgtctcctccatagcagccaggcagccagcatggcggcggctagggtttgcatcgccggtgcatcttgagatccgctgctgctcacgtgtccacgttgcatcgcctttaatccccacatgctccatccatacgctgctggtgctcgtcgctattctcttcatcgtcgggacttgtcggcactactaccatcgccatctgaaccgagctcatgtgcatttacagcggtgaccgagcttggatcctagcgagatgaggaaaggacacaggcaacaatgtgctaaagtatgagatcaatagagaattttttatgaacttcaagaattaaaaaggttcatttgttatgggtcaagggcaaaagcactccgaaggtaacttactttcatgtgtttgtatttctagtcaattaacatatttaccatgttttatatttgaatttcatagaaaataaaaaaactcatagaaacttgaaaagtattcaattgaaaaacatcaatacatctacacaaggatctatgagcagtatagcaaactctacctacagtcgatgctacctgttgctgctttagttttctgtttgcacaattttatgtaattgtttgaattttatctaattgtaggcctaatctacattttgacttctttgaatcatgtctgctgatggtacttacaaggtgtctgctgatggtacttacaaggtggacatattgtactggatttacactagcctgcttgcaggtcgtcatccatttttgggacattgttgtgaagattggcatgagaaccacctgtatgaactttggaatcgttaactttggagtgccttctgccttgtggcaatttatgtaatttgaatttgtatggaatgttttgttcgattcacgtatttataccgaacaaagtttatccttgctaccaattttgtggattgtaacaacattttagaattctttgttttttcctgtt

SEQ ID NO: 14117 - DNA, 603 bp, Zea Mays
agtacaaattcttggttccagtttatttcaaaatcgactaatatgatgtggtatttacaattacatagtgccgtgaccacatcttattctgctggaaaccagcacgccgattttcacagccatgcgtagaaatgtggaaacgaaacctttctgcattcgcaggctcactcttgtatcggagcctgcttgtgcatgtgtaaaatcaacacttattcagaaaactgcatattcggtcatgaacgtcctgcacatgacgagataaaattgaaacataaattggatgcggagaaaaggagcacattaatgaacctcttcttaccattatgcttcccatcatggaattgggcgttcttagatgacttgaatgtttccaagaactctctacccttctgcagctccgccttcttccttgccttgtcccacttgtgctctgaagctaaaatttcaatgattcggggcaatgctctaccagcagcatctgtgtcaaggaaagcaagccggcatctccttgcaacaaaatccacggcagattcacagtactcataacgagcacagtatgctacttcagcttccaaaaatgggtatccatgagcaaggcgcttt

SEQ ID NO: 14118 - DNA, 1887 bp, Zea Mays
gttttggacagataaatggttaaatggccaaagcctacaacagttggcacctcatcttgtcagcttggtatcttcaagggctaggaaacggagtgttcaggatgccctcactactggaagctgggttcaggacattagaggggctattactgttaatgtgttgactgaattttttcaagtctgggacctcgctgccagctggattttgcacccggaacaggaagataagcacatatggctgctctctagttcaggaatttataccgccaagtcggcttatgatggtttctttattggctcaacaacctttaggtcatggaggaggatttggaagagttgggctcctggaaaatgtaaattcttcatgtggctggtggcgcacggccgctgctggaccgctgaccggctggcaaggagaggcctgcctcaccctcaaagttgtctgttatgtgaccaggaggaagaaactatgaatcatctgctagtttcctgtgtcttctcaagggaagtctggtttaatatcctgaaaacagtcggtttgcagcacctctctcccagtctcgattcttcttcctttgatgattggtgggagaatgtaagcatgacccttataagcccctccaataagaagctgcgcaaggggctgaactcccttatcattttaggagcttgggccatttggattcatcgcaatcaatgtgtcttcaacggagagcagcctagggctagcaaggtcataaattgggtcatgactgagtctcatctttggtgtagggctagggctcgcggattatctgatatccttttacctcggcatattatttgaggagttggtctctagtatgcttagtgtactggtgctcctgttcattttcttttgttgggtggtgtgtagagttgtatgaggttctttaacacctcaccccatcttattctacttaatataatgatacgcagctctcctgcgtattcgagaaaaagatcaatctcaacatgcttcgtgtgttggtgttggacaggattgatggagagataaattgcactgattttatcacagtagacgagggtatactcttggtccgagggttgtggagttcatgcaacaatagacgcaaccagtaggcctcaacaactctatttgcgactgcacgatactcggcttctgcactggaccgagaaacaacattctggcgcttggaggaccaagaaacaagattgtcaccaatgaaaaccgcatacccagaagtagatcgtcgtgtgtcaggactgccagcccaatcagcatcaatgtatacggtaaggtggccacaagaacgttgaagtagtaagctgttgtcagaagtaccttggagatacaggagaatgcacttgagtgctgtgaagtggggctctcgtgggtcatgcatgtggagaatcaataaatccccgacacaggcgagagccccactgcacgatatactgtctcggataatgtgtcgtgtaggaaagcattcttcacatccaactgatgaataggccaatcccgggaaagagcgagagacagaactggacgtactgtagttggtttgacgacagggctgaaagtctcatcctagtcaatgcccggtcactgggtgaatccacggcatatctagcgagccttgtaacgctcaagagatccgtctgcattgaactcgtgcttgaagtcccacttgccagtaataagatcaacaccgggggacctaggtaccaaatcccaagtacagttgtgttagagtggacgcactaaccagttcaacccagaagcttaagttgatgggagaaggtagtcaattcacttatagacttcaacacccccactcacgtgcagccagagagatgtgcaaacgtggaaataaatggatggag

SEQ ID NO: 14119 - DNA, 5738 bp, Zea Mays
cgcaggccttcgtcaaagtgccgagtcctgcgaagggtgtccctgcccgctttgtctctgtcggaccagcggctgcagcgaaggcctcgagcgaagggtagcgtctttgccttcgccccaacactatcatcataagtaatagctaccagggagctacttatccttagaactcatctaaccatccaaaacttgctaaacaacttcattccttactaagacactaggtgtcctaaataccctagggtaaaactcttttcctttactgaggaataattaatttgctaagcaaatcttgtccaaacagttccaaactttacccaagggttcacatgctcaagataagcttacacaatttttagtgctctatttttataactaaaactcatataatcctataaaaaccaagttttaattatccaaaattaaggacttgcctgagaatccctaaaactattttaacctagagaacccatttttgtgagcctaacagaatttacctcacaactgttacttcttcatgtagctctaggaaaaattcacaaggtatatctttattagataaatgaaaaaaaatcttcttaatccgatttggacccggctcggcccacacggtaggctgcaccaggcaaaacttgcctgcgacggccaacaacaaaccctcttaatcccaggacaatcacaacacgtcgagcaccatatcgacatacacaactatggtaaatgtgctaaattgattggaaacagcaaaatgaagatcaggatcaacgccaactcaccactaggtagggactagggagtagggagcaccacacgacaatgcagcaggacaacaatttgccgaagctccaaaagaccaggacgttgtaacagcgaggtgaaactcgacgacgccgaatccgtaaaacgatggcgaggagacgagcgccaggaccgaagaagagtttgctgtgacacacggtacggacgaggaagagctagggatgactgagacggcacgacagcgtgggacactgagatccgaacgcgaggacagaaaggcatgcatccgccgccggtctaagctggagtggaggtcggcgcggcttggtcggaggaccctaaacccggtgaggtaaagctgtagtgctgcagcgccggcgtggtcgcggctacgcaaggcaaggcgatctgctagagctcgaagacagcaggttgcactggaccaacacctaagcaaagggataaggaagcaagtgttattgctcggccagaacctcgcgatcaagaaatttggggactccatcactgcatggaatggacacgtggttttccaaactcagccccacgcaggttccaagcggatgagatcaagggtgaattgttagagagcaagcagacagcacagccatctatagtggataggttttaggtccttctaggcttagatatttgaggcttaaagtctatccttacccacagcgccaaaacttgtccacatacaaaaaaataaattgagagaaccagagcacatagtggtggagatccagttctgtttcctaaattaaccattgcgactgaaactattttcagccttggacaagtctgaacccaccacttttaactccattacccctcacgattccaaacggtaacagggaaccgaccataacataaattgctctcccaacatccttatacatctttgctgcagaaaccccagtccaaaaccccatggatttggtactacagacctccaaagtcgagcacaaattcacaaaaactcagtttgcagctaactgaaccagagttcagaccatacccaactgacagaggatgtttaggtgcagtttattctcagatttgtacagcactaagcctacctctccttagaaaacttgctcaccttactttggtctccaagttctctacagaaactacggcctaaaagaacatggattgatcaccaaggatgtccaaactgagcatcatactgaactttcagttccagctatttgaacaaaaattcagttagtgcacactgacaatccatttttgggcaaattttactttcctttttgtttgtgatcaagcccaactcacttaaaggactttgttcaatataatatgttcttcaactactctacataaatcatagtccaaaacttcttaaattagctacaatagagctccaaaactgcactaacaacactaatttcagacttaggctactattcaaaatctgaagatctagaagtctgacagccccactttgaacacctttttctcctagtttcatatggttttagggtttccacatttcataaacattgttatcctttagttactctacaggtttgttatagcaactgtttccaaaatactcatggattaaaagttacagggatccaaaaagatataaacaaaactgttttgggcttattccaactgacccaaatctgaacttttgcagattacttcaaattctcccacatcacttggagagctccaaatatgaaaattgttcactttttcaagctccacaactttgatatatggacttttagtaaaacatagctagatcttaaaatccactttttggctagtttagagttgaaaatggacttgatctgcttcaagggtttgatcaatttattgcatcctactaaaaacaaggttaaccttaagctcaaacccaactttggtgtatagagctcatgtccaaatttccattggtttaaaagttgtttgtttgtactagatttcaaacaaggtctctgaacttctcttgctctctttgaaacgacacaacctcacccttttctccaagttccaaatgcttctgaggccaagttgctcaatcaaattggtgctccacatgttgctccacaagtttggtacaatgacccttagctagaaccctatggattccaaaccatcaaagcccaaagttggcattaaacacataaattcagactttggtttttcactaagtctgaaaatccagaattaaacactacatttttggaccactgtttctactagttccaaatagtttcaggggtatgaaccttaaccaaacttataccccaacatgtggtctttcactttggtgcataaactgtaacccatagctgtatggatcagccaccaacaggcttccaaagctgcttcagcatataaaatcttcagtttcagatattgcagtttgaaattcagattctgacattcccactttggaccagttttccacctagttccatatgaatttagggttaagtagcttaaacaaaattacacatctagtgtagctctacagctttgctactgtgaccatcttcaaatttcctatatatcaaatgttatgaagattcaaagatagctacttgatattgtttccagccatccaaccttaggtccaaaaagttaatttttgagttttctccacttcttcctataaatcatggaaatctctatacctgaaagttgtttgggttggagaactctataaatttggtaatttgaccttttggaaaattattgccaaatcacaattttcacttttggagctctaaactgagatttttaaaactaggtccttcactcttcactaatcacaacatcatacttagattattttggatcctagtgaatgcattctaagtgtatcaaacaagttaatgcgagtgtatatgatgacatgccaaatttttagttatcgtaacacctggggtgttacaatttggcagatggatgtcaaaacaactttctttaatggaaacttgatgaggacatatatatgatacagcccgagggttttgtcgatccgatcaatgctggaaagatatgcaaacttcagaaatccatttatgggttgaagcaagcatctccgagttggaacatttgttttgatgaagtggtcaaagggtttgtttttcatcagaatgaagaagaagcttgtgtttacaagaaggaaagtgggagcgctgttgtatttttgatcttgtatgtggatggcatattattggttgggaatgacattcctattttggagttcgttaaggcttcactgaaaaatagttttctatgaagaacttaggggaagcagcatatattttgggcataagaatctatagagataggtcaaagaggcttataggattaagtcaagatacgtacattgacaaggtgttgaaacggttcaacatggaatagtccaagaaagggttcttacctgtgtcacatggtatacacctagccagaagcaatgtcctacgatggcaaatgagcgggagcgcatgagtaaggtaccatacgcctcagaaattggatcaatcatgtatgccatgataagtacaagcccagatgtttcatatgctataagtgctacgagtaggtaccaggctgatccaggtgaaggtcactggacagaggtaaaagacattcttaagtactttagaaggactaaagatatgttcctagtatatgggggtaaggaggagctcgttgtaactggttacaccgatgctagcttccaaactgacccagacaagttaaaatcgcaatcaagttttgtgttcacaataaatggtggtgctgttagttggaagagttccaaacaggagactgtgactgattctacaacagaagccgagtacattgcagcttctgaatctacgaaggaaggtgtttggataaggaagttgctcatcgatcttggtgtgtttcctaatgcctctagtccattgaacctctactgtgacaacaatggggcaattgcgcaagcaaaggagccaaggaaccaccagaaaagcaaacacgtactgcggaaatttcacctcatacgggaattcgttagacggggtgagataaagatatgcaagatacatacggatttgaatgttgctgatcctttgataaaacctcttccaaaacctaagcatgaggcacacatgagatctatgggtattagatatcttctagattaactctagtgcaagtgggagactgttagaaatatgtcctagagataatcatagagatgagcatatttctttgtatccatgatatatattgcttaattgaatatccatgaaaggcaccttgtattgattagcaattatgtgaattgtttgtgagattctttacttgtatggttattctaaatgatgtccctggtcagagtcgatgactagcacatatattagttgatgactacatttcacaagtcatggacatggagatgtcgaactaataatgtgggcgcatgtatgacatgaggctggaccgacccaatgtgagatattgtaatatagttctctttttgcaacatgtatactgtgtccttagacctgagattgtcgcatgttctcaagatgtggattgacctacttagggactatcaaacgctactatgtaattgggtagttataaaggcaattttgggtttgtcaggaagcatgatgtgaggcatggtcagtcaagatggaatttgtgtaacaccccgtccaatccctggaccggcggtacttactcctggcagctgtctagaataatatattgtccccacaaaccaacacgagtattttgtgcacactttgtcctcactcgtgcgcacccgagaaaacttcccagtcggtcacccgtcctaaattgctccaagccaagcacgcttaacttggaggttctttcgagacaggcttccaaaaaagaagatgcaccttgttggtatggatactctattaattctattaagccttggg

SEQ ID NO: 14120 - DNA, 1597 bp, Zea Mays
gtaaaacttgccctacaacaacaatcatgaccacttattaaaaatcaaatggactgacaagttacaacaacaaaaggtgcacaattcatttgctcaccctgattaaccttatccctaatgtaacccattagtcctctcccaacacaagaaactttcagatttcttacgcctttccaagcccaaatcctcagaaacaatccaagcatttttttcaaaattattatggtcctcccaatattttgtaatcaataaaaaataatcaaagtatatagactacatattaacaacatgtaggaactaagattaatgccaactataaagcactgttcaccattgcgctaaacattgtcgttcagttctccacttttccgatatttattatcatgttatttggggaaattatgtatattaggaattaacaatatacgaaaataaacaaagaacaagcattcacagtagtatattaggaaacaacaattataaacagtgaaaaagaatacatagcgggctcagtttcatcctgaagaatgcaacaaacatgtgactggtttgttgattacaaattctatttcagggacaagcacttagcttatcaggaactgaacgggacgaagttccagtggtataaatagaaaactaaacttcagctgttgcatcaaacctcaaagatcctaatgaagttttaagagaattcaagaaatatcactcactgattgaaaagaaacaatacataaagccatgtgccacgcatatcactcacccagcaaaaagcaactaccatgtacctgcaagtagcttaatttcaaagtaaaactgagtcactgatcatactgccatgtgccatgcataagacaatgcaagaccagtgtaagattcgaaccaaacatattaaataggggtctgctaattactaactttgtatggagatgcagcttaggcaatagaagcatacattatccaggtgtgctaattcatttgctcatctataactagtatatataattcctaaaaagcagtaacaaattccttagggctaacagatcagccataacaaaaattgttttatcccctgcccaaaagtactacaatcacaatatcttaaactgaatcatgccattacaaaggcaaaacaattagtaactttgtgtggagatgcagcttaggcaatatcacacgttacctaggtttgctaattcagttgctcatctatacgacgacaggggaaggagatggcggcaggtgtacgcctcaggggcatgctaggctggacacagggggagttcgtagccacagagaatttcacataagccagcgaccattcttagcgctttgattggaatcagatccgaatacaaatagccaaatagattaagttagggtttgggtgctcggtttcgtacagcacctagggagtggggatgagaatggatggacgtacctggtgggtgctcggcgccggcgacgggcccagcgaagacctgggggaggcggcggcggtcgcccaatcgacgccgagagagagagagagcaggagcagagcacgagcggagcggagcggagcggccctggctccttgccctgtcgctgtcggtttttt

SEQ ID NO: 14121 - DNA, 1545 bp, Zea Mays
cgagtttcgagacccctctccacacttctcgagtcaatcaccacgctagtcgtcgcctttctcccaccgctcggcaattccccgccagtgccctctcgaatcaatcaccacgctcccctgcgacgacgtcctctttgagcacatcctctgccacctctcctccccatccaatacctcacgcatcgtcaccctcgacgacctcaagaccggcaccctaccctgctgctgcgttcctgccatcggcgactcgctcccgcttctccacgacatctccgtcgacaagggcgagcgcgccacccttctcgctggagccagccaccaacgtcgccatcccagttgagtacctaccctgtattgacgcgcagattgtcgcccccgtggcagggaaaagggtcgccgctgatctagactaatcaagtcaggcggacgtctcctgcctccccactgcactaatcaagtcatagcaggttagcagccccaaaaattcccagagacatcgatattctcttagttgaaggtgcagggggtataaagccgacgagaagaataccaaaaagggcagaagatctcaggtttcgcgaagcaatactgaaggccgatttctagcttctttttgcaatatgctttattgggattggatctggaatcattgttgttaataatctagcacaaatatgaattgttggagttgttgccgatagaaccactgaggcactgactctctatctacagtttctgcaattttttgggtggctaggagggggtgttgcttcttagtatcttgtcaggtaacaaaatgtcctatatttatccatctatttactctttgaaataattgcttttgaatgatggaccattcttggctttaagaaatagaccttccctctagccgtattgcttttgaataatgtcctatcaatttcacattgtttttggcctagccgtatatgtctgcggtctcgaagtggaaaagcaacatgcacacagccagccatattgacattgcatcatcttaagaaacagaccttccctctagcaaaatttgaccactaaatcactgaaatttgccccctaggtcaagcaatcaagcctcgcagtgatttagacgcacttcagtttgttattcgccttttcaccacatcaaagtagcctaccggcctaagaaaaaatggaacaaggcttcaacttgaatcctcttctctaggaagttcaaaattaatacagtcctatcttctattatgaaagtgcaagcattcaactcttgccaagtccagtgaaaagttgaactattttaaagtcacctgcattgcagatcctaagtactagccgtggtccttcctcttgggttgcatttcttccggtcgctttacttggaatggctgcgcagtattgtgagaaataaggatacaacattcatgcatgcccaagtctataccaatcatattcagaactgagctaaagcagaccagaaaacagtcaatggagtaaaatgtgatgttcccatgccatttgtcgttgcaagaactgaaaactgaaaggtgcatg

SEQ ID NO: 14122 - DNA, 6290 bp, Zea Mays
cacacttctcgagtcaatcaccacgctagtcgtcgcctttctcccaccgctcggcaattccccgccagtgccctctcgaatcaatcaccacgctcccctgcgacgacgtcctctttgagcacatcctctgccacctctcctccccatccaatacctcacgcatcgtcaccctcgacgacctcaagaccggcaccctaccctgctgctgcgttcctgccatcggcgactcgctcccgcttctccacgacatctccgtcgacaagggcgagcgcgccacccttctcgctggagccagccaccaacgtcgccatcccagttagcagccccaaaaattcccagagacatcgatattctcttagttgaaggtgcagggggtataaagccgacgagaagaataccaaaaagggcagaagatctcaggtttcgcgaagcaatactgaaggccgatttctagcttctttttgcaatatgctttattgggattggatctggaatcattgttgttaataatctagcacaaatatgaattgttggagttgttgccgatagaaccactgaggcactgactctctatctacagtttctgcaattttttgggtggctaggagggggtgttgcttcttagtatcttgtcagcgacccggcaggaaaagaaaaataaatgaaatgaaatgcaggtccgtcctggttttccagttcatatcctcgtctctctctggccgtctcctcacctcacggatcaacaggcggacatagcagccgtcctcgttctgcctcaggttgattccttgttacatctcccatctgcatgcagttccgcaatgtcataggatgcctacatcaacaccaagcaagcaagcagctagctagcgtggttagttatatcttcaaatcagtctacagggatggatctagtgacaggtccgctagccattctcccgtccaagctgcaggagctactccaaatccaagatgagtataggctccagaaggaagtgaggggcagagtggagatgatctgccgggagctgcaaagtatgcacgctgccctccgtaaggtggctgatgtgccgcgggatcagatcgacctccagaccaaggtgtggagacgcgatgtcagagaggcatcctatgacattgaggatgccatcgacacctttctcatgcgcatcagagaccgcgcgccaagtgacccaaacaggtttcgacttgccatgaagaagatgaccaagctgtcaagaaaggttaaggctatccatgaaattggtgctgccatcggagacatcgtgaggaaaatccaggagttggtggaccggcgtgtcaggtacaaacttgatgttgctgcagacaggtcaatcagcatggttagtgttgatcctcgccttgcagctttgtacaaagaagcgacacaactcattggcatcgaccaatcaatgtctgaaataatatccatgctgctctcggatgagtcgggccagcaacacattaagaagatttctattgtcggagctggaggactaggcaagaccacccttgctaaagaaacatatgaaaggcttagaagtgaatacgagtttgcaacttttgtttcagttggccaaaatcctgacttggtgagagttttcaagaacatcctcgttaagcttgacatataccagcaagtggacactatcaacagaacagatacgcgagcgctcatcgatgaaatcagacagcgccttagctatgtgaggtgcaggtatctcattgttatcgatgatgtatgggatctggagtcttggcatacactagaattggcatttgttgaaaataacaatgggagtggaataatcataactactcgtaattttgctgttgccacaatagctggtcgtgtttacaagttaaggccactttcgtaccatcactccaaagaattattctacagatcgttatttggtgaaggagtatgccttgatgatcaaataatcaataaggcatcagataaatttctaaagaaatgtgatggtataccgttagctctcatcacaatggctagtttgttcatgggaaaaccaacacaaatgtggtctgagctagccaataatgcttttggacataaaggtcgtaacagtcatttagaagaaacgactatgaggatattatcacttagctactctgatttgccattgaatttgaggacttgctttgtatatttgagtagatatccagatgattatgttattaataaaagttctttgatatggaaatggatagctgaaggttttatccaagaggagcaaggaaaacagttatttgagctcggggaagaattcttcaacgagctcgtaagtagaagcattatacaagtggtccaatcaaaatttgataacacagtgcaaggctttcgtattcatagtatggttcttggtcttattcgcctgttgtcatccgaagaaaactttgtttctgtattggacgaagaagggcaaatatctatatcaggcaaacttcgtcggttagccatccataacagaaaagaagagcacaaccttggagacaatatggacctcctcccatggttgaggtcgtttactgcaattgaatgtcctatatacatgatacctccggttttcatcttcaaattgttacgtgttctggatttagagagttgtgggtctatggaaggttatgatctcaagcagcttggaaatttacataatctcaggtttatcggtctatgtaatacatatgtccggacgctcccacaggaattagggcatctaaagtttctgcagacgcttgaattgaaaggaagtggcgttgaagaactaccttcgagtatgggtgagcttgcagggttaatgtgcctcaacgctgactggacaacaagagtgcccaagtggattgggatgcttacttccctgcaacagttggtgatgtacccttgtggtggctactcggcaaggtggtttgtcaaggggctgggacacctgagggaactaaggatgctccgtttgttgataaaagcagatgacgagaagcagcttgcacaattgctggagtctgttttaaaactgcccaagatcgaggctttacatcttgattactatggcggcgtacagttaaacaggcttgttaagttggaacctagtgattttgcctgcagtggacgtcttcgttccttagaattgcagttgttggaattctcaaggctgcctgtgtggcttaatgcttactatcttccacagatccgtgacttgtcgctgttgatgtttgatgtggataaacaggatctgaaaaaccttggggacttcaaggagctccgtcatctccatctgctaattgttaacactgaacgcagagatgctattacttgtgccagtggtggattccggaatttgagattcttcagtatcactaaaccattcaagtttcaacagggagatctgcctaggcttgaaatccttgattttcatttcaatgtgccactccaaagtggtgccaatagtggcctggattttgacttcggtttggaaaatatcccttcgcttcagcaagtcattgttcaaatcaactgtctagatgcctttcctcttccagaggaggtggagacagccctaaggcacgcaatcggcgtccatcccaaccgtcccatcgttgacatcagtttgcctcgacgaaaattagacaaggcagacaacgacggggccgaagggcgtagtaagttggctcattattcaaaatcattatcatcggcacatgataagccaatggatgagctaataaagaggttatatgtggtggacaatgaggcctacgataaaaagatgaagattgtgcctattgttagatctgaagggctggggaaaactactcttgcccaaaaagtatttgacaagcttagtccacattttgactgtgcagcatttgttctggtaggccaaaatccggacatgaggaaagttttcactgacattctcataggtctagacaaccaaaagtaccaagatttccctatgactatattggatataattgagctgattgggttagtccgtaaatcgctcataaacaaaaggttctttgttgtagttgacgatgtatgggatttgaaagcatgggacataataaagtctgcattgatcgaaaacactaatggcagtgcagttctaacaacgacaagtcgtcagatctgggaacatgagaactggaggccatctggggatgacaagtcggattctgacgcagagcagttagagcctcatttggacgtcacaacccccgcggatgtcctcccagcgtcttccccgagcaagagcaaggtggtggcccatgtggaactccgccacgacgacccagattcctctgcatttggaatcccgcaagtagcaggggatactcaacctgagctccgccttttccccgaggcggatgcggatcttaaagggttcttctacgaaaacctatttggatcggaagacaagtgccctgatgatctgaaagatatatgtaaagatctcatacaaatatctgctggtgtcctatcagatgcctatgagaccgtggaagagctcagaggttacgagatcagtgcagaacgcttagtttgggcgtggatagctcaaggtttcgtaaaggagactcagggacagaatgatttggagaaagtcggaaagaagtaccttattgaccttataagcagaaagatgatcgaagcagtggaggttcatgctgatggtatggccctctcatgccgtgcgtacgatttgttgcatggcttgatcgtttcattgtcaacagaagaaaaattcgttgaaattctaaatgactcgcagtcgcaggagagagcttcgaatccgaatacagaagttcaccggctgtccatccaaatccagagaaataatatgctacaccccctgccaaaagcttggatgaaacaagtgcagtcacttgttgtctcgtctgataccgtgccagacctctcagattttcagggtcttcatgccatggacttaggaggctgcgattcattgcaggttgatcatctcaagggtataagtaaaacaacatctttgatatatctggccataggaggaaaatatatcgctgacgtcccgaaagaagtttcttggctcaaaaagctgcggacattggatttaactgcaagtggtctgagtgaattgccacgatgtattttaacgctaactaatttggagcggctatttgttaatagccatatgaagattcctggtaagatctcaaaaatgtcaggtttacaagaactgggcgacatcaatattgttaagccagagttacttaaaaggctccgtaaattaagtaagttaagggttctcagaattgccatgtggtcttgggatgagggttctaagagctctgttaaactatggtgggagaccctgcactcattaatcgggtcctgcaaaaaaattgagagtctctgcatactgaccttctgctcccttgatttcatggatggttccggtgatgataataaatggccgcctcaaactctcaaaaacctcgagataagtcacagcgcatttctggataagctcccaagttggtttgactcactttccaccatctcctcgttgacaatcgaggtcaacaagttatcaaagaacatcactgacactctggcaaagctgtctgctctaagatccctttccctgacatccatagaaaagccagaaccagaagtacgctttgtcatcggctctgctggtagattcgagaatctagaaagcttaaagtttgtgtgtaatgaaatggtaaatttgcttgaaagaccggaatcgaatgctacccaacagttaacagggcttactatcgtgtttcatgcttcacgaacagaacgcagccgaaacaaagatttcaggtttggtttggacaaactgctgtccctacagcacgttcgtgttgaaataaactgttccaatgcgacgcagcggacggtgaaaaatgcagaagctgcaattggggaagaaatatcaaaaatacgcagggatgacgggagtcagccaatcctggaaatacgaagactccaggaagaaagtatgatagcagggaaggaccaaacccaggatgctaataagacaccgtcttcttcgtctactatggaaactacattgcgagcccaacctattggggaatcattaatgcctagtgttgagactgtttcttccaaggtcttcgtctctcagaacagctccaacgacacattttttaataatgtaggtatcctcacaagctccacgaaaataaagacattgaaagagagagcgctt

SEQ ID NO: 14123 - DNA, 6240 bp, Zea Mays
cttctcgagtcaatcaccacgctagtcgtcgcctttctcccaccgctcggcaattccccgccagtgccctctcgaatcaatcaccacgctcccctgcgacgacgtcctctttgagcacatcctctgccacctctcctccccatccaatacctcacgcatcgtcaccctcgacgacctcaagaccggcaccctaccctgctgctgcgttcctgccatcggcgactcgctcccgcttctccacgacatctccgtcgacaagggcgagcgcgccacccttctcgctggagccagccaccaacgtcgccatcccatttctgcaattttttgggtggctaggagggggtgttgcttcttagtatcttgtcaggtccgtcctggttttccagttcatatcctcgtctctctctggccgtctcctcacctcacggatcaacaggcggacatagcagccgtcctcgttctgcctcaggttgattccttgttacatctcccatctgcatgcagttccgcaatgtcataggatgcctacatcaacaccaagcaagcaagcagctagctagcgtggttagttatatcttcaaatcagtctacagggatggatctagtgacaggtccgctagccattctcccgtccaagctgcaggagctactccaaatccaagatgagtataggctccagaaggaagtgaggggcagagtggagatgatctgccgggagctgcaaagtatgcacgctgccctccgtaaggtggctgatgtgccgcgggatcagatcgacctccagaccaaggtgtggagacgcgatgtcagagaggcatcctatgacattgaggatgccatcgacacctttctcatgcgcatcagagaccgcgcgccaagtgacccaaacaggtttcgacttgccatgaagaagatgaccaagctgtcaagaaaggttaaggctatccatgaaattggtgctgccatcggagacatcgtgaggaaaatccaggagttggtggaccggcgtgtcaggtacaaacttgatgttgctgcagacaggtcaatcagcatggttagtgttgatcctcgccttgcagctttgtacaaagaagcgacacaactcattggcatcgaccaatcaatgtctgaaataatatccatgctgctctcggatgagtcgggccagcaacacattaagaagatttctattgtcggagctggaggactaggcaagaccacccttgctaaagaaacatatgaaaggcttagaagtgaatacgagtttgcaacttttgtttcagttggccaaaatcctgacttggtgagagttttcaagaacatcctcgttaagcttgacatataccagcaagtggacactatcaacagaacagatacgcgagcgctcatcgatgaaatcagacagcgccttagctatgtgaggtatctcattgttatcgatgatgtatgggatctggagtcttggcatacactagaattggcatttgttgaaaataacaatgggagtggaataatcataactactcgtaattttgctgttgccacaatagctggtcgtgtttacaagttaaggccactttcgtaccatcactccaaagaattattctacagatcgttatttggtgaaggagtatgccttgatgatcaaataatcaataaggcatcagataaatttctaaagaaatgtgatggtataccgttagctctcatcacaatggctagtttgttcatgggaaaaccaacacaaatgtggtctgagctagccaataatgcttttggacataaaggtcgtaacagtcatttagaagaaacgactatgaggatattatcacttagctactctgatttgccattgaatttgaggacttgctttgtatatttgagtagatatccagatgattatgttattaataaaagttctttgatatggaaatggatagctgaaggttttatccaagaggagcaaggaaaacagttatttgagctcggggaagaattcttcaacgagctcgtaagtagaagcattatacaagtggtccaatcaaaatttgataacacagtgcaaggctttcgtattcatagtatggttcttggtcttattcgcctgttgtcatccgaagaaaactttgtttctgtattggacgaagaagggcaaatatctatatcaggcaaacttcgtcggttagccatccataacagaaaagaagagcacaaccttggagacaatatggacctcctcccatggttgaggtcgtttactgcaattgaatgtcctatatacatgatacctccggttttcatcttcaaattgttacgtgttctggatttagagagttgtgggtctatggaaggttatgatctcaagcagcttggaaatttacataatctcaggtttatcggtctatgtaatacatatgtccggacgctcccacaggaattagggcatctaaagtttctgcagacgcttgaattgaaaggaagtggcgttgaagaactaccttcgagtatgggtgagcttgcagggttaatgtgcctcaacgctgactggacaacaagagtgcccaagtggattgggatgcttacttccctgcaacagttggtgatgtacccttgtggtggctactcggcaaggtggtttgtcaaggggctgggacacctgagggaactaaggatgctccgtttgttgataaaagcagatgacgagaagcagcttgcacaattgctggagtctgttttaaaactgcccaagatcgaggctttacatcttgattactatggcggcgtacagttaaacaggcttgttaagttggaacctagtgattttgcctgcagtggacgtcttcgttccttagaattgcagttgttggaattctcaaggctgcctgtgtggcttaatgcttactatcttccacagatccgtgacttgtcgctgttgatgtttgatgtggataaacaggatctgaaaaaccttggggacttcaaggagctccgtcatctccatctgctaattgttaacactgaacgcagagatgctattacttgtgccagtggtggattccggaatttgagattcttcagtatcactaaaccattcaagtttcaacagggagatctgcctaggcttgaaatccttgattttcatttcaatgtgccactccaaagtggtgccaatagtggcctggattttgacttcggtttggaaaatatcccttcgcttcagcaagtcattgttcaaatcaactgtctagatgcctttcctcttccagaggaggtggagacagccctaaggcacgcaatcggcgtccatcccaaccgtcccatcgttgacatcagtttgcctcgacgaaaattagacaaggcagacaacgacggggccgaagggcgtagtaagttggctcattattcaaaatcattatcatcggcacatgataagccaatggatgagctaataaagaggttatatgtggtggacaatgaggcctacgataaaaagatgaagattgtgcctattgttagatctgaagggctggggaaaactactcttgcccaaaaagtatttgacaagcttagtccacattttgactgtgcagcatttgttctggtaggccaaaatccggacatgaggaaagttttcactgacattctcataggtctagacaaccaaaagtaccaagatttccctatgactatattggatataattgagctgattgggttagtccgtaaatcgctcataaacaaaagctgcgcctcggattaaaacagagctatctatcatccacattgcacagccttctctcaagcttcgtaacttaatgaatcgtcactattgaacaatgcaatcctcctccagcctgcataagataaataagcgacacacgttcaggttctttgttgtagttgacgatgtatgggatttgaaagcatgggacataataaagtctgcattgatcgaaaacactaatggcagtgcagttctaacaacgacaagtcgtcagatctgggaacatgagaactggaggccatctggggatgacaagtcggattctgacgcagagcagttagagcctcatttggacgtcacaacccccgcggatgtcctcccagcgtcttccccgagcaagagcaaggtggtggcccatgtggaactccgccacgacgacccagattcctctgcatttggaatcccgcaagtagcaggggatactcaacctgagctccgccttttccccgaggcggatgcggatcttaaagggttcttctacgaaaacctatttggatcggaagacaagtgccctgatgatctgaaagatatatgtaaagatctcatacaaatatctgctggtgtcctatcagatgcctatgagaccgtggaagagctcagaggtattacctacgacactggaaagctggcagcctgtgtatcagagaagaaaattcgagctctcttatcccaaactacctggccatctaaaggattgcttaagatattttagtatgtttccaaaaggttacgagatcagtgcagaacgcttagtttgggcgtggatagctcaaggtttcgtaaaggagactcagggacagaatgatttggagaaagtcggaaagaagtaccttattgaccttataagcagaaagatgatcgaagcagtggaggttcatgctgatggtatggccctctcatgccgtgcgtacgatttgttgcatggcttgatcgtttcattgtcaacagaagaaaaattcgttgaaattctaaatgactcgcagtcgcaggagagagcttcgaatccgaatacagaagttcaccggctgtccatccaaatccagagaaataatatgctacaccccctgccaaaagcttggatgaaacaagtgcagtcacttgttgtctcgtctgataccgtgccagacctctcagattttcagggtcttcatgccatggacttaggaggctgcgattcattgcaggttgatcatctcaagggtataagtaaaacaacatctttgatatatctggccataggaggaaaatatatcgctgacgtcccgaaagaagtttcttggctcaaaaagctgcggacattggatttaactgcaagtggtctgagtgaattgccacgatgtattttaacgctaactaatttggagcggctatttgttaatagccatatgaagattcctggtaagatctcaaaaatgtcaggtttacaagaactgggcgacatcaatattgttaagccagagttacttaaaaggctccgtaaattaagtaagttaagggttctcagaattgccatgtggtcttgggatgagggttctaagagctctgttaaactatggtgggagaccctgcactcattaatcgggtcctgcaaaaaaattgagagtctctgcatactgaccttctgctcccttgatttcatggatggttccggtgatgataataaatggccgcctcaaactctcaaaaacctcgagataagtcacagcgcatttctggataagctcccaagttggtttgactcactttccaccatctcctcgttgacaatcgaggtcaacaagttatcaaagaacatcactgacactctggcaaagctgtctgctctaagatccctttccctgacatccatagaaaagccagaaccagaagtacgctttgtcatcggctctgctggtagattcgagaatctagaaagcttaaagtttgtgtgtaatgaaatggtaaatttgcttgaaagaccggaatcgaatgctacccaacagttaacagggcttactatcgtgtttcatgcttcacgaacagaacgcagccgaaacaaagatttcaggtttggtttggacaaactgctgtccctacagcacgttcgtgttgaaataaactgttccaatgcgacgcagcggacggtgaaaaatgcagaagctgcaattggggaagaaatatcaaaaatacgcagggatgacgggagtcagccaatcctggaaatacgaagactccaggaagaaagtatgatagcagggaaggaccaaacccaggatgctaataagacaccgtcttcttcgtctactatggaaactacattgcgagcccaacctattggggaatcattaatgcctagtgttgagactgtttcttccaaggtcttcgtctctcagaacagctccaacgacacattttttaataatgtaggtatcctcacaagctccacgaaaataaagacattgaaagagagagcgctt

SEQ ID NO: 14124 - DNA, 6659 bp, Zea Mays
ctcgagtcaatcaccacgctagtcgtcgcctttctcccaccgctcggcaattccccgccagtgccctctcgaatcaatcaccacgctcccctgcgacgacgtcctctttgagcacatcctctgccacctctcctccccatccaatacctcacgcatcgtcaccctcgacgacctcaagaccggcaccctaccctgctgctgcgttcctgccatcggcgactcgctcccgcttctccacgacatctccgtcgacaagggcgagcgcgccacccttctcgctggagccagccaccaacgtcgccatcccagttgagtacctaccctgtattgacgcgcagattgtcgcccccgtggcagggaaaagggtcgccgctgatctagactaatcaagtcaggcggacgtctcctgcctccccactgcactaatcaagtcatagcaggttagcagccccaaaaattcccagagacatcgatattctcttagttgaaggtgcagggggtataaagccgacgagaagaataccaaaaagggcagaagatctcaggtttcgcgaagcaatactgaaggccgatttctagcttctttttgcaatatgctttattgggattggatctggaatcattgttgttaataatctagcacaaatatgaattgttggagttgttgccgatagaaccactgaggcactgactctctatctacagtttctgcaattttttgggtggctaggagggggtgttgcttcttagtatcttgtcaggtccgtcctggttttccagttcatatcctcgtctctctctggccgtctcctcacctcacggatcaacaggcggacatagcagccgtcctcgttctgcctcaggtccttgtctttcaaacttgttgattccttgttacatctcccatctgcatgcagttccgcaatgtcataggatgcctacatcaacaccaagcaagcaagcagctagctagcgtggttagttatatcttcaaatcagtctacagggatggatctagtgacaggtccgctagccattctcccgtccaagctgcaggagctactccaaatccaagatgagtataggctccagaaggaagtgaggggcagagtggagatgatctgccgggagctgcaaagtatgcacgctgccctccgtaaggtggctgatgtgccgcgggatcagatcgacctccagaccaaggtgtggagacgcgatgtcagagaggcatcctatgacattgaggatgccatcgacacctttctcatgcgcatcagagaccgcgcgccaagtgacccaaacaggtttcgacttgccatgaagaagatgaccaagctgtcaagaaaggttaaggctatccatgaaattggtgctgccatcggagacatcgtgaggaaaatccaggagttggtggaccggcgtgtcaggtacaaacttgatgttgctgcagacaggtcaatcagcatggttagtgttgatcctcgccttgcagctttgtacaaagaagcgacacaactcattggcatcgaccaatcaatgtctgaaataatatccatgctgctctcggatgagtcgggccagcaacacattaagaagatttctattgtcggagctggaggactaggcaagaccacccttgctaaagaaacatatgaaaggcttagaagtgaatacgagtttgcaacttttgtttcagttggccaaaatcctgacttggtgagagttttcaagaacatcctcgttaagcttgacatataccagcaagtggacactatcaacagaacagatacgcgagcgctcatcgatgaaatcagacagcgccttagctatgtgaggtgcaggtatctcattgttatcgatgatgtatgggatctggagtcttggcatacactagaattggcatttgttgaaaataacaatgggagtggaataatcataactactcgtaattttgctgttgccacaatagctggtcgtgtttacaagttaaggccactttcgtaccatcactccaaagaattattctacagatcgttatttggtgaaggagtatgccttgatgatcaaataatcaataaggcatcagataaatttctaaagaaatgtgatggtataccgttagctctcatcacaatggctagtttgttcatgggaaaaccaacacaaatgtggtctgagctagccaataatgcttttggacataaaggtcgtaacagtcatttagaagaaacgactatgaggatattatcacttagctactctgatttgccattgaatttgaggacttgctttgtatatttgagtagatatccagatgattatgttattaataaaagttctttgatatggaaatggatagctgaaggttttatccaagaggagcaaggaaaacagttatttgagctcggggaagaattcttcaacgagctcgtaagtagaagcattatacaagtggtccaatcaaaatttgataacacagtgcaaggctttcgtattcatagtatggttcttggtcttattcgcctgttgtcatccgaagaaaactttgtttctgtattggacgaagaagggcaaatatctatatcaggcaaacttcgtcggttagccatccataacagaaaagaagagcacaaccttggagacaatatggacctcctcccatggttgaggtcgtttactgcaattgaatgtcctatatacatgatacctccggttttcatcttcaaattgttacgtgttctggatttagagagttgtgggtctatggaaggttatgatctcaagcagcttggaaatttacataatctcaggtttatcggtctatgtaatacatatgtccggacgctcccacaggaattagggcatctaaagtttctgcagacgcttgaattgaaaggaagtggcgttgaagaactaccttcgagtatgggtgagcttgcagggttaatgtgcctcaacgctgactggacaacaagagtgcccaagtggattgggatgcttacttccctgcaacagttggtgatgtacccttgtggtggctactcggcaaggtggtttgtcaaggggctgggacacctgagggaactaaggatgctccgtttgttgataaaagcagatgacgagaagcagcttgcacaattgctggagtctgttttaaaactgcccaagatcgaggctttacatcttgattactatggcggcgtacagttaaacaggcttgttaagttggaacctagtgattttgcctgcagtggacgtcttcgttccttagaattgcagttgttggaattctcaaggctgcctgtgtggcttaatgcttactatcttccacagatccgtgacttgtcgctgttgatgtttgatgtggataaacaggatctgaaaaaccttggggacttcaaggagctccgtcatctccatctgctaattgttaacactgaacgcagagatgctattacttgtgccagtggtggattccggaatttgagattcttcagtatcactaaaccattcaagtttcaacagggagatctgcctaggcttgaaatccttgattttcatttcaatgtgccactccaaagtggtgccaatagtggcctggattttgacttcggtttggaaaatatcccttcgcttcagcaagtcattgttcaaatcaactgtctagatgcctttcctcttccagaggaggtggagacagccctaaggcacgcaatcggcgtccatcccaaccgtcccatcgttgacatcagtttgcctcgacgaaaattagacaaggcagacaacgacggggccgaagggcgtagtaagttggctcattattcaaaatcattatcatcggcacatgataagccaatggatgagctaataaagaggttatatgtggtggacaatgaggcctacgataaaaagatgaagattgtgcctattgttagatctgaagggctggggaaaactactcttgcccaaaaagtatttgacaagcttagtccacattttgactgtgcagcatttgttctggtaggccaaaatccggacatgaggaaagttttcactgacattctcataggtctagacaaccaaaagtaccaagatttccctatgactatattggatataattgagctgattgggttagtccgtaaatcgctcataaacaaaagctgcgcctcggattaaaacagagctatctatcatccacattgcacagccttctctcaagcttcgtaacttaatgaatcgtcactattgaacaatgcaatcctcctccagcctgcataagataaataagcgacacacgttcaggttctttgttgtagttgacgatgtatgggatttgaaagcatgggacataataaagtctgcattgatcgaaaacactaatggcagtgcagttctaacaacgacaagtcgtcagatctgggaacatgagaactggaggccatctggggatgacaagtcggattctgacgcagagcagttagagcctcatttggacgtcacaacccccgcggatgtcctcccagcgtcttccccgagcaagagcaaggtggtggcccatgtggaactccgccacgacgacccagattcctctgcatttggaatcccgcaagtagcaggggatactcaacctgagctccgccttttccccgaggcggatgcggatcttaaagggttcttctacgaaaacctatttggatcggaagacaagtgccctgatgatctgaaagatatatgtaaagatctcatacaaatatctgctggtgtcctatcagatgcctatgagaccgtggaagagctcagaggtattacctacgacactggaaagctggcagcctgtgtatcagagaagaaaattcgagctctcttatcccaaactacctggccatctaaaggattgcttaagatattttagtatgtttccaaaaggttacgagatcagtgcagaacgcttagtttgggcgtggatagctcaaggtttcgtaaaggagactcagggacagaatgatttggagaaagtcggaaagaagtaccttattgaccttataagcagaaagatgatcgaagcagtggaggttcatgctgatggtatggccctctcatgccgtgcgtacgatttgttgcatggcttgatcgtttcattgtcaacagaagaaaaattcgttgaaattctaaatgactcgcagtcgcaggagagagcttcgaatccgaatacagaagttcaccggctgtccatccaaatccagagaaataatatgctacaccccctgccaaaagcttggatgaaacaagtgcagtcacttgttgtctcgtctgataccgtgccagacctctcagattttcagggtcttcatgccatggacttaggaggctgcgattcattgcaggttgatcatctcaagggtataagtaaaacaacatctttgatatatctggccataggaggaaaatatatcgctgacgtcccgaaagaagtttcttggctcaaaaagctgcggacattggatttaactgcaagtggtctgagtgaattgccacgatgtattttaacgctaactaatttggagcggctatttgttaatagccatatgaagattcctggtaagatctcaaaaatgtcaggtttacaagaactgggcgacatcaatattgttaagccagagttacttaaaaggctccgtaaattaagtaagttaagggttctcagaattgccatgtggtcttgggatgagggttctaagagctctgttaaactatggtgggagaccctgcactcattaatcgggtcctgcaaaaaaattgagagtctctgcatactgaccttctgctcccttgatttcatggatggttccggtgatgataataaatggccgcctcaaactctcaaaaacctcgagataagtcacagcgcatttctggataagctcccaagttggtttgactcactttccaccatctcctcgttgacaatcgaggtcaacaagttatcaaagaacatcactgacactctggcaaagctgtctgctctaagatccctttccctgacatccatagaaaagccagaaccagaagtacgctttgtcatcggctctgctggtagattcgagaatctagaaagcttaaagtttgtgtgtaatgaaatggtaaatttgcttgaaagaccggaatcgaatgctacccaacagttaacagggcttactatcgtgtttcatgcttcacgaacagaacgcagccgaaacaaagatttcaggtttggtttggacaaactgctgtccctacagcacgttcgtgttgaaataaactgttccaatgcgacgcagcggacggtgaaaaatgcagaagctgcaattggggaagaaatatcaaaaatacgcagggatgacgggagtcagccaatcctggaaatacgaagactccaggaagaaagtatgatagcagggaaggaccaaacccaggatgctaataagacaccgtcttcttcgtctactatggaaactacattgcgagcccaacctattggggaatcattaatgcctagtgttgagactgtttcttccaaggtcttcgtctctcagaacagctccaacgacacattttttaataatgtaggtatcctcacaagctccacgaaaataaagacattgaaagagagagcgctt

SEQ ID NO: 14125 - DNA, 6369 bp, Zea Mays
cgagtcaatcaccacgctagtcgtcgcctttctcccaccgctcggcaattccccgccagtgccctctcgaatcaatcaccacgctcccctgcgacgacgtcctctttgagcacatcctctgccacctctcctccccatccaatacctcacgcatcgtcaccctcgacgacctcaagaccggcaccctaccctgctgctgcgttcctgccatcggcgactcgctcccgcttctccacgacatctccgtcgacaagggcgagcgcgccacccttctcgctggagccagccaccaacgtcgccatcccagttgagtacctaccctgtattgacgcgcagattgtcgcccccgtggcagggaaaagggtcgccgctgatctagactaatcaagtcaggcggacgtctcctgcctccccactgcactaatcaagtcatagcaggttagcagccccaaaaattcccagagacatcgatattctcttagttgaaggtgcagggggtataaagccgacgagaagaataccaaaaagggcagaagatctcaggtttcgcgaagcaatactgaaggccgatttctagcttctttttgcaatatgctttattgggattggatctggaatcattgttgttaataatctagcacaaatatgaattgttggagttgttgccgatagaaccactgaggcactgactctctatctacagtttctgcaattttttgggtggctaggagggggtgttgcttcttagtatcttgtcaggtccgtcctggttttccagttcatatcctcgtctctctctggccgtctcctcacctcacggatcaacaggcggacatagcagccgtcctcgttctgcctcaggttgattccttgttacatctcccatctgcatgcagttccgcaatgtcataggatgcctacatcaacaccaagcaagcaagcagctagctagcgtggttagttatatcttcaaatcagtctacagggatggatctagtgacaggtccgctagccattctcccgtccaagctgcaggagctactccaaatccaagatgagtataggctccagaaggaagtgaggggcagagtggagatgatctgccgggagctgcaaagtatgcacgctgccctccgtaaggtggctgatgtgccgcgggatcagatcgacctccagaccaaggtgtggagacgcgatgtcagagaggcatcctatgacattgaggatgccatcgacacctttctcatgcgcatcagagaccgcgcgccaagtgacccaaacaggtttcgacttgccatgaagaagatgaccaagctgtcaagaaaggttaaggctatccatgaaattggtgctgccatcggagacatcgtgaggaaaatccaggagttggtggaccggcgtgtcaggtacaaacttgatgttgctgcagacaggtcaatcagcatggttagtgttgatcctcgccttgcagctttgtacaaagaagcgacacaactcattggcatcgaccaatcaatgtctgaaataatatccatgctgctctcggatgagtcgggccagcaacacattaagaagatttctattgtcggagctggaggactaggcaagaccacccttgctaaagaaacatatgaaaggcttagaagtgaatacgagtttgcaacttttgtttcagttggccaaaatcctgacttggtgagagttttcaagaacatcctcgttaagcttgacatataccagcaagtggacactatcaacagaacagatacgcgagcgctcatcgatgaaatcagacagcgccttagctatgtgaggtgcaggtatctcattgttatcgatgatgtatgggatctggagtcttggcatacactagaattggcatttgttgaaaataacaatgggagtggaataatcataactactcgtaattttgctgttgccacaatagctggtcgtgtttacaagttaaggccactttcgtaccatcactccaaagaattattctacagatcgttatttggtgaaggagtatgccttgatgatcaaataatcaataaggcatcagataaatttctaaagaaatgtgatggtataccgttagctctcatcacaatggctagtttgttcatgggaaaaccaacacaaatgtggtctgagctagccaataatgcttttggacataaaggtcgtaacagtcatttagaagaaacgactatgaggatattatcacttagctactctgatttgccattgaatttgaggacttgctttgtatatttgagtagatatccagatgattatgttattaataaaagttctttgatatggaaatggatagctgaaggttttatccaagaggagcaaggaaaacagttatttgagctcggggaagaattcttcaacgagctcgtaagtagaagcattatacaagtggtccaatcaaaatttgataacacagtgcaaggctttcgtattcatagtatggttcttggtcttattcgcctgttgtcatccgaagaaaactttgtttctgtattggacgaagaagggcaaatatctatatcaggcaaacttcgtcggttagccatccataacagaaaagaagagcacaaccttggagacaatatggacctcctcccatggttgaggtcgtttactgcaattgaatgtcctatatacatgatacctccggttttcatcttcaaattgttacgtgttctggatttagagagttgtgggtctatggaaggttatgatctcaagcagcttggaaatttacataatctcaggtttatcggtctatgtaatacatatgtccggacgctcccacaggaattagggcatctaaagtttctgcagacgcttgaattgaaaggaagtggcgttgaagaactaccttcgagtatgggtgagcttgcagggttaatgtgcctcaacgctgactggacaacaagagtgcccaagtggattgggatgcttacttccctgcaacagttggtgatgtacccttgtggtggctactcggcaaggtggtttgtcaaggggctgggacacctgagggaactaaggatgctccgtttgttgataaaagcagatgacgagaagcagcttgcacaattgctggagtctgttttaaaactgcccaagatcgaggctttacatcttgattactatggcggcgtacagttaaacaggcttgttaagttggaacctagtgattttgcctgcagtggacgtcttcgttccttagaattgcagttgttggaattctcaaggctgcctgtgtggcttaatgcttactatcttccacagatccgtgacttgtcgctgttgatgtttgatgtggataaacaggatctgaaaaaccttggggacttcaaggagctccgtcatctccatctgctaattgttaacactgaacgcagagatgctattacttgtgccagtggtggattccggaatttgagattcttcagtatcactaaaccattcaagtttcaacagggagatctgcctaggcttgaaatccttgattttcatttcaatgtgccactccaaagtggtgccaatagtggcctggattttgacttcggtttggaaaatatcccttcgcttcagcaagtcattgttcaaatcaactgtctagatgcctttcctcttccagaggaggtggagacagccctaaggcacgcaatcggcgtccatcccaaccgtcccatcgttgacatcagtttgcctcgacgaaaattagacaaggcagacaacgacggggccgaagggcgtagtaagttggctcattattcaaaatcattatcatcggcacatgataagccaatggatgagctaataaagaggttatatgtggtggacaatgaggcctacgataaaaagatgaagattgtgcctattgttagatctgaagggctggggaaaactactcttgcccaaaaagtatttgacaagcttagtccacattttgactgtgcagcatttgttctggtaggccaaaatccggacatgaggaaagttttcactgacattctcataggtctagacaaccaaaagtaccaagatttccctatgactatattggatataattgagctgattgggttagtccgtaaatcgctcataaacaaaaggttctttgttgtagttgacgatgtatgggatttgaaagcatgggacataataaagtctgcattgatcgaaaacactaatggcagtgcagttctaacaacgacaagtcgtcagatctgggaacatgagaactggaggccatctggggatgacaagtcggattctgacgcagagcagttagagcctcatttggacgtcacaacccccgcggatgtcctcccagcgtcttccccgagcaagagcaaggtggtggcccatgtggaactccgccacgacgacccagattcctctgcatttggaatcccgcaagtagcaggggatactcaacctgagctccgccttttccccgaggcggatgcggatcttaaagggttcttctacgaaaacctatttggatcggaagacaagtgccctgatgatctgaaagatatatgtaaagatctcatacaaatatctgctggtgtcctatcagatgcctatgagaccgtggaagagctcagaggtattacctacgacactggaaagctggcagcctgtgtatcagagaagaaaattcgagctctcttatcccaaactacctggccatctaaaggattgcttaagatattttagtatgtttccaaaaggttacgagatcagtgcagaacgcttagtttgggcgtggatagctcaaggtttcgtaaaggagactcagggacagaatgatttggagaaagtcggaaagaagtaccttattgaccttataagcagaaagatgatcgaagcagtggaggttcatgctgatggtatggccctctcatgccgtgcgtacgatttgttgcatggcttgatcgtttcattgtcaacagaagaaaaattcgttgaaattctaaatgactcgcagtcgcaggagagagcttcgaatccgaatacagaagttcaccggctgtccatccaaatccagagaaataatatgctacaccccctgccaaaagcttggatgaaacaagtgcagtcacttgttgtctcgtctgataccgtgccagacctctcagattttcagggtcttcatgccatggacttaggaggctgcgattcattgcaggttgatcatctcaagggtataagtaaaacaacatctttgatatatctggccataggaggaaaatatatcgctgacgtcccgaaagaagtttcttggctcaaaaagctgcggacattggatttaactgcaagtggtctgagtgaattgccacgatgtattttaacgctaactaatttggagcggctatttgttaatagccatatgaagattcctggtaagatctcaaaaatgtcaggtttacaagaactgggcgacatcaatattgttaagccagagttacttaaaaggctccgtaaattaagtaagttaagggttctcagaattgccatgtggtcttgggatgagggttctaagagctctgttaaactatggtgggagaccctgcactcattaatcgggtcctgcaaaaaaattgagagtctctgcatactgaccttctgctcccttgatttcatggatggttccggtgatgataataaatggccgcctcaaactctcaaaaacctcgagataagtcacagcgcatttctggataagctcccaagttggtttgactcactttccaccatctcctcgttgacaatcgaggtcaacaagttatcaaagaacatcactgacactctggcaaagctgtctgctctaagatccctttccctgacatccatagaaaagccagaaccagaagtacgctttgtcatcggctctgctggtagattcgagaatctagaaagcttaaagtttgtgtgtaatgaaatggtaaatttgcttgaaagaccggaatcgaatgctacccaacagttaacagggcttactatcgtgtttcatgcttcacgaacagaacgcagccgaaacaaagatttcaggtttggtttggacaaactgctgtccctacagcacgttcgtgttgaaataaactgttccaatgcgacgcagcggacggtgaaaaatgcagaagctgcaattggggaagaaatatcaaaaatacgcagggatgacgggagtcagccaatcctggaaatacgaagactccaggaagaaagtatgatagcagggaaggaccaaacccaggatgctaataagacaccgtcttcttcggtatcctcacaagctccacgaaaataaagacattgaaagagagagcgctt

SEQ ID NO: 14126 - DNA, 5927 bp, Zea Mays
ctttctcccaccgctcggcaattccccgccagtgccctctcgaatcaatcaccacgctcccctgcgacgacgtcctctttgagcacatcctctgccacctctcctccccatccaatacctcacgcatcgtcaccctcgacgacctcaagaccggcaccctaccctgctgctgcgttcctgccatcggcgactcgctcccgcttctccacgacatctccgtcgacaagggcgagcgcgccacccttctcgctggagccagccaccaacgtcgccatcccacgacccggcaggaaaagaaaaataaatgaaatgaaatgcaggtccgtcctggttttccagttcatatcctcgtctctctctggccgtctcctcacctcacggatcaacaggcggacatagcagccgtcctcgttctgcctcaggttgattccttgttacatctcccatctgcatgcagttccgcaatgtcataggatgcctacatcaacaccaagcaagcaagcagctagctagcgtggttagttatatcttcaaatcagtctacagggatggatctagtgacaggtccgctagccattctcccgtccaagctgcaggagctactccaaatccaagatgagtataggctccagaaggaagtgaggggcagagtggagatgatctgccgggagctgcaaagtatgcacgctgccctccgtaaggtggctgatgtgccgcgggatcagatcgacctccagaccaaggtgtggagacgcgatgtcagagaggcatcctatgacattgaggatgccatcgacacctttctcatgcgcatcagagaccgcgcgccaagtgacccaaacaggtttcgacttgccatgaagaagatgaccaagctgtcaagaaaggttaaggctatccatgaaattggtgctgccatcggagacatcgtgaggaaaatccaggagttggtggaccggcgtgtcaggtacaaacttgatgttgctgcagacaggtcaatcagcatggttagtgttgatcctcgccttgcagctttgtacaaagaagcgacacaactcattggcatcgaccaatcaatgtctgaaataatatccatgctgctctcggatgagtcgggccagcaacacattaagaagatttctattgtcggagctggaggactaggcaagaccacccttgctaaagaaacatatgaaaggcttagaagtgaatacgagtttgcaacttttgtttcagttggccaaaatcctgacttggtgagagttttcaagaacatcctcgttaagcttgacatataccagcaagtggacactatcaacagaacagatacgcgagcgctcatcgatgaaatcagacagcgccttagctatgtgaggtatctcattgttatcgatgatgtatgggatctggagtcttggcatacactagaattggcatttgttgaaaataacaatgggagtggaataatcataactactcgtaattttgctgttgccacaatagctggtcgtgtttacaagttaaggccactttcgtaccatcactccaaagaattattctacagatcgttatttggtgaaggagtatgccttgatgatcaaataatcaataaggcatcagataaatttctaaagaaatgtgatggtataccgttagctctcatcacaatggctagtttgttcatgggaaaaccaacacaaatgtggtctgagctagccaataatgcttttggacataaaggtcgtaacagtcatttagaagaaacgactatgaggatattatcacttagctactctgatttgccattgaatttgaggacttgctttgtatatttgagtagatatccagatgattatgttattaataaaagttctttgatatggaaatggatagctgaaggttttatccaagaggagcaaggaaaacagttatttgagctcggggaagaattcttcaacgagctcgtaagtagaagcattatacaagtggtccaatcaaaatttgataacacagtgcaaggctttcgtattcatagtatggttcttggtcttattcgcctgttgtcatccgaagaaaactttgtttctgtattggacgaagaagggcaaatatctatatcaggcaaacttcgtcggttagccatccataacagaaaagaagagcacaaccttggagacaatatggacctcctcccatggttgaggtcgtttactgcaattgaatgtcctatatacatgatacctccggttttcatcttcaaattgttacgtgttctggatttagagagttgtgggtctatggaaggttatgatctcaagcagcttggaaatttacataatctcaggtttatcggtctatgtaatacatatgtccggacgctcccacaggaattagggcatctaaagtttctgcagacgcttgaattgaaaggaagtggcgttgaagaactaccttcgagtatgggtgagcttgcagggttaatgtgcctcaacgctgactggacaacaagagtgcccaagtggattgggatgcttacttccctgcaacagttggtgatgtacccttgtggtggctactcggcaaggtggtttgtcaaggggctgggacacctgagggaactaaggatgctccgtttgttgataaaagcagatgacgagaagcagcttgcacaattgctggagtctgttttaaaactgcccaagatcgaggctttacatcttgattactatggcggcgtacagttaaacaggcttgttaagttggaacctagtgattttgcctgcagtggacgtcttcgttccttagaattgcagttgttggaattctcaaggctgcctgtgtggcttaatgcttactatcttccacagatccgtgacttgtcgctgttgatgtttgatgtggataaacaggatctgaaaaaccttggggacttcaaggagctccgtcatctccatctgctaattgttaacactgaacgcagagatgctattacttgtgccagtggtggattccggaatttgagattcttcagtatcactaaaccattcaagtttcaacagggagatctgcctaggcttgaaatccttgattttcatttcaatgtgccactccaaagtggtgccaatagtggcctggattttgacttcggtttggaaaatatcccttcgcttcagcaagtcattgttcaaatcaactgtctagatgcctttcctcttccagaggaggtggagacagccctaaggcacgcaatcggcgtccatcccaaccgtcccatcgttgacatcagtttgcctcgacgaaaattagacaaggcagacaacgacggggccgaagggcgtagtaagttggctcattattcaaaatcattatcatcggcacatgataagccaatggatgagctaataaagaggttatatgtggtggacaatgaggcctacgataaaaagatgaagattgtgcctattgttagatctgaagggctggggaaaactactcttgcccaaaaagtatttgacaagcttagtccacattttgactgtgcagcatttgttctggtaggccaaaatccggacatgaggaaagttttcactgacattctcataggtctagacaaccaaaagtaccaagatttccctatgactatattggatataattgagctgattgggttagtccgtaaatcgctcataaacaaaaggttctttgttgtagttgacgatgtatgggatttgaaagcatgggacataataaagtctgcattgatcgaaaacactaatggcagtgcagttctaacaacgacaagtcgtcagatctgggaacatgagaactggaggccatctggggatgacaagtcggattctgacgcagagcagttagagcctcatttggacgtcacaacccccgcggatgtcctcccagcgtcttccccgagcaagagcaaggtggtggcccatgtggaactccgccacgacgacccagattcctctgcatttggaatcccgcaagtagcaggggatactcaacctgagctccgccttttccccgaggcggatgcggatcttaaagggttcttctacgaaaacctatttggatcggaagacaagtgccctgatgatctgaaagatatatgtaaagatctcatacaaatatctgctggtgtcctatcagatgcctatgagaccgtggaagagctcagaggttacgagatcagtgcagaacgcttagtttgggcgtggatagctcaaggtttcgtaaaggagactcagggacagaatgatttggagaaagtcggaaagaagtaccttattgaccttataagcagaaagatgatcgaagcagtggaggttcatgctgatggtatggccctctcatgccgtgcgtacgatttgttgcatggcttgatcgtttcattgtcaacagaagaaaaattcgttgaaattctaaatgactcgcagtcgcaggagagagcttcgaatccgaatacagaagttcaccggctgtccatccaaatccagagaaataatatgctacaccccctgccaaaagcttggatgaaacaagtgcagtcacttgttgtctcgtctgataccgtgccagacctctcagattttcagggtcttcatgccatggacttaggaggctgcgattcattgcaggttgatcatctcaagggtataagtaaaacaacatctttgatatatctggccataggaggaaaatatatcgctgacgtcccgaaagaagtttcttggctcaaaaagctgcggacattggatttaactgcaagtggtctgagtgaattgccacgatgtattttaacgctaactaatttggagcggctatttgttaatagccatatgaagattcctggtaagatctcaaaaatgtcaggtttacaagaactgggcgacatcaatattgttaagccagagttacttaaaaggctccgtaaattaagtaagttaagggttctcagaattgccatgtggtcttgggatgagggttctaagagctctgttaaactatggtgggagaccctgcactcattaatcgggtcctgcaaaaaaattgagagtctctgcatactgaccttctgctcccttgatttcatggatggttccggtgatgataataaatggccgcctcaaactctcaaaaacctcgagataagtcacagcgcatttctggataagctcccaagttggtttgactcactttccaccatctcctcgttgacaatcgaggtcaacaagttatcaaagaacatcactgacactctggcaaagctgtctgctctaagatccctttccctgacatccatagaaaagccagaaccagaagtacgctttgtcatcggctctgctggtagattcgagaatctagaaagcttaaagtttgtgtgtaatgaaatggtaaatttgcttgaaagaccggaatcgaatgctacccaacagttaacagggcttactatcgtgtttcatgcttcacgaacagaacgcagccgaaacaaagatttcaggtttggtttggacaaactgctgtccctacagcacgttcgtgttgaaataaactgttccaatgcgacgcagcggacggtgaaaaatgcagaagctgcaattggggaagaaatatcaaaaatacgcagggatgacgggagtcagccaatcctggaaatacgaagactccaggaagaaagtatgatagcagggaaggaccaaacccaggatgctaataagacaccgtcttcttcgtctactatggaaactacattgcgagcccaacctattggggaatcattaatgcctagtgttgagactgtttcttccaaggtcttcgtctctcagaacagctccaacgacacattttttaataatgtaggtatcctcacaagctccacgaaaataaagacattgaaagagagagcgctt

SEQ ID NO: 14127 - DNA, 6588 bp, Zea Mays
ctttctcccaccgctcggcaattccccgccagtgccctctcgaatcaatcaccacgctcccctgcgacgacgtcctctttgagcacatcctctgccacctctcctccccatccaatacctcacgcatcgtcaccctcgacgacctcaagaccggcaccctaccctgctgctgcgttcctgccatcggcgactcgctcccgcttctccacgacatctccgtcgacaagggcgagcgcgccacccttctcgctggagccagccaccaacgtcgccatcccagttagcagccccaaaaattcccagagacatcgatattctcttagttgaaggtgcagggggtataaagccgacgagaagaataccaaaaagggcagaagatctcaggtttcgcgaagcaatactgaaggccgatttctagcttctttttgcaatatgctttattgggattggatctggaatcattgttgttaataatctagcacaaatatgaattgttggagttgttgccgatagaaccactgaggcactgactctctatctacagtttctgcaattttttgggtggctaggagggggtgttgcttcttagtatcttgtcagcgacccggcaggaaaagaaaaataaatgaaatgaaatgcaggtccgtcctggttttccagttcatatcctcgtctctctctggccgtctcctcacctcacggatcaacaggcggacatagcagccgtcctcgttctgcctcaggttgattccttgttacatctcccatctgcatgcagttccgcaatgtcataggatgcctacatcaacaccaagcaagcaagcagctagctagcgtggttagttatatcttcaaatcagtctacagggatggatctagtgacaggtccgctagccattctcccgtccaagctgcaggagctactccaaatccaagatgagtataggctccagaaggaagtgaggggcagagtggagatgatctgccgggagctgcaaagtatgcacgctgccctccgtaaggtggctgatgtgccgcgggatcagatcgacctccagaccaaggtgtggagacgcgatgtcagagaggcatcctatgacattgaggatgccatcgacacctttctcatgcgcatcagagaccgcgcgccaagtgacccaaacaggtttcgacttgccatgaagaagatgaccaagctgtcaagaaaggttaaggctatccatgaaattggtgctgccatcggagacatcgtgaggaaaatccaggagttggtggaccggcgtgtcaggtacaaacttgatgttgctgcagacaggtcaatcagcatggttagtgttgatcctcgccttgcagctttgtacaaagaagcgacacaactcattggcatcgaccaatcaatgtctgaaataatatccatgctgctctcggatgagtcgggccagcaacacattaagaagatttctattgtcggagctggaggactaggcaagaccacccttgctaaagaaacatatgaaaggcttagaagtgaatacgagtttgcaacttttgtttcagttggccaaaatcctgacttggtgagagttttcaagaacatcctcgttaagcttgacatataccagcaagtggacactatcaacagaacagatacgcgagcgctcatcgatgaaatcagacagcgccttagctatgtgaggtatctcattgttatcgatgatgtatgggatctggagtcttggcatacactagaattggcatttgttgaaaataacaatgggagtggaataatcataactactcgtaattttgctgttgccacaatagctggtcgtgtttacaagttaaggccactttcgtaccatcactccaaagaattattctacagatcgttatttggtgaaggagtatgccttgatgatcaaataatcaataaggcatcagataaatttctaaagaaatgtgatggtataccgttagctctcatcacaatggctagtttgttcatgggaaaaccaacacaaatgtggtctgagctagccaataatgcttttggacataaaggtcgtaacagtcatttagaagaaacgactatgaggatattatcacttagctactctgatttgccattgaatttgaggacttgctttgtatatttgagtagatatccagatgattatgttattaataaaagttctttgatatggaaatggatagctgaaggttttatccaagaggagcaaggaaaacagttatttgagctcggggaagaattcttcaacgagctcgtaagtagaagcattatacaagtggtccaatcaaaatttgataacacagtgcaaggctttcgtattcatagtatggttcttggtcttattcgcctgttgtcatccgaagaaaactttgtttctgtattggacgaagaagggcaaatatctatatcaggcaaacttcgtcggttagccatccataacagaaaagaagagcacaaccttggagacaatatggacctcctcccatggttgaggtcgtttactgcaattgaatgtcctatatacatgatacctccggttttcatcttcaaattgttacgtgttctggatttagagagttgtgggtctatggaaggttatgatctcaagcagcttggaaatttacataatctcaggtttatcggtctatgtaatacatatgtccggacgctcccacaggaattagggcatctaaagtttctgcagacgcttgaattgaaaggaagtggcgttgaagaactaccttcgagtatgggtgagcttgcagggttaatgtgcctcaacgctgactggacaacaagagtgcccaagtggattgggatgcttacttccctgcaacagttggtgatgtacccttgtggtggctactcggcaaggtggtttgtcaaggggctgggacacctgagggaactaaggatgctccgtttgttgataaaagcagatgacgagaagcagcttgcacaattgctggagtctgttttaaaactgcccaagatcgaggctttacatcttgattactatggcggcgtacagttaaacaggcttgttaagttggaacctagtgattttgcctgcagtggacgtcttcgttccttagaattgcagttgttggaattctcaaggctgcctgtgtggcttaatgcttactatcttccacagatccgtgacttgtcgctgttgatgtttgatgtggataaacaggatctgaaaaaccttggggacttcaaggagctccgtcatctccatctgctaattgttaacactgaacgcagagatgctattacttgtgccagtggtggattccggaatttgagattcttcagtatcactaaaccattcaagtttcaacagggagatctgcctaggcttgaaatccttgattttcatttcaatgtgccactccaaagtggtgccaatagtggcctggattttgacttcggtttggaaaatatcccttcgcttcagcaagtcattgttcaaatcaactgtctagatgcctttcctcttccagaggaggtggagacagccctaaggcacgcaatcggcgtccatcccaaccgtcccatcgttgacatcagtttgcctcgacgaaaattagacaaggtataaactgcaaattgccctgatataaaatcaagggacctccaactcactgacactcatctgcactgtttcaggcagacaacgacggggccgaagggcgtagtaagttggctcattattcaaaatcattatcatcggcacatgataagccaatggatgagctaataaagaggttatatgtggtggacaatgaggcctacgataaaaagatgaagattgtgcctattgttagatctgaagggctggggaaaactactcttgcccaaaaagtatttgacaagcttagtccacattttgactgtgcagcatttgttctggtaggccaaaatccggacatgaggaaagttttcactgacattctcataggtctagacaaccaaaagtaccaagatttccctatgactatattggatataattgagctgattgggttagtccgtaaatcgctcataaacaaaagctgcgcctcggattaaaacagagctatctatcatccacattgcacagccttctctcaagcttcgtaacttaatgaatcgtcactattgaacaatgcaatcctcctccagcctgcataagataaataagcgacacacgttcaggttctttgttgtagttgacgatgtatgggatttgaaagcatgggacataataaagtctgcattgatcgaaaacactaatggcagtgcagttctaacaacgacaagtcgtcagatctgggaacatgagaactggaggccatctggggatgacaagtcggattctgacgcagagcagttagagcctcatttggacgtcacaacccccgcggatgtcctcccagcgtcttccccgagcaagagcaaggtggtggcccatgtggaactccgccacgacgacccagattcctctgcatttggaatcccgcaagtagcaggggatactcaacctgagctccgccttttccccgaggcggatgcggatcttaaagggttcttctacgaaaacctatttggatcggaagacaagtgccctgatgatctgaaagatatatgtaaagatctcatacaaatatctgctggtgtcctatcagatgcctatgagaccgtggaagagctcagaggtattacctacgacactggaaagctggcagcctgtgtatcagagaagaaaattcgagctctcttatcccaaactacctggccatctaaaggattgcttaagatattttagtatgtttccaaaaggttacgagatcagtgcagaacgcttagtttgggcgtggatagctcaaggtttcgtaaaggagactcagggacagaatgatttggagaaagtcggaaagaagtaccttattgaccttataagcagaaagatgatcgaagcagtggaggttcatgctgatggtatggccctctcatgccgtgcgtacgatttgttgcatggcttgatcgtttcattgtcaacagaagaaaaattcgttgaaattctaaatgactcgcagtcgcaggagagagcttcgaatccgaatacagaagttcaccggctgtccatccaaatccagagaaataatatgctacaccccctgccaaaagcttggatgaaacaagtgcagtcacttgttgtctcgtctgataccgtgccagacctctcagattttcagggtcttcatgccatggacttaggaggctgcgattcattgcaggttgatcatctcaagggtataagtaaaacaacatctttgatatatctggccataggaggaaaatatatcgctgacgtcccgaaagaagtttcttggctcaaaaagctgcggacattggatttaactgcaagtggtctgagtgaattgccacgatgtattttaacgctaactaatttggagcggctatttgttaatagccatatgaagattcctggtaagatctcaaaaatgtcaggtttacaagaactgggcgacatcaatattgttaagccagagttacttaaaaggctccgtaaattaagtaagttaagggttctcagaattgccatgtggtcttgggatgagggttctaagagctctgttaaactatggtgggagaccctgcactcattaatcgggtcctgcaaaaaaattgagagtctctgcatactgaccttctgctcccttgatttcatggatggttccggtgatgataataaatggccgcctcaaactctcaaaaacctcgagataagtcacagcgcatttctggataagctcccaagttggtttgactcactttccaccatctcctcgttgacaatcgaggtcaacaagttatcaaagaacatcactgacactctggcaaagctgtctgctctaagatccctttccctgacatccatagaaaagccagaaccagaagtacgctttgtcatcggctctgctggtagattcgagaatctagaaagcttaaagtttgtgtgtaatgaaatggtaaatttgcttgaaagaccggaatcgaatgctacccaacagttaacagggcttactatcgtgtttcatgcttcacgaacagaacgcagccgaaacaaagatttcaggtttggtttggacaaactgctgtccctacagcacgttcgtgttgaaataaactgttccaatgcgacgcagcggacggtgaaaaatgcagaagctgcaattggggaagaaatatcaaaaatacgcagggatgacgggagtcagccaatcctggaaatacgaagactccaggaagaaagtatgatagcagggaaggaccaaacccaggatgctaataagacaccgtcttcttcgtctactatggaaactacattgcgagcccaacctattggggaatcattaatgcctagtgttgagactgtttcttccaaggtcttcgtctctcagaacagctccaacgacacattttttaataatgtaggtatcctcacaagctccacgaaaataaagacattgaaagagagagcgctt

SEQ ID NO: 14128 - DNA, 6073 bp, Zea Mays
ctttctcccaccgctcggcaattccccgccagtgccctctcgaatcaatcaccacgctcccctgcgacgacgtcctctttgagcacatcctctgccacctctcctccccatccaatacctcacgcatcgtcaccctcgacgacctcaagaccggcaccctaccctgctgctgcgttcctgccatcggcgactcgctcccgcttctccacgacatctccgtcgacaagggcgagcgcgccacccttctcgctggagccagccaccaacgtcgccatcccacgacccggcaggaaaagaaaaataaatgaaatgaaatgcaggtccgtcctggttttccagttcatatcctcgtctctctctggccgtctcctcacctcacggatcaacaggcggacatagcagccgtcctcgttctgcctcaggttgattccttgttacatctcccatctgcatgcagttccgcaatgtcataggatgcctacatcaacaccaagcaagcaagcagctagctagcgtggttagttatatcttcaaatcagtctacagggatggatctagtgacaggtccgctagccattctcccgtccaagctgcaggagctactccaaatccaagatgagtataggctccagaaggaagtgaggggcagagtggagatgatctgccgggagctgcaaagtatgcacgctgccctccgtaaggtggctgatgtgccgcgggatcagatcgacctccagaccaaggtgtggagacgcgatgtcagagaggcatcctatgacattgaggatgccatcgacacctttctcatgcgcatcagagaccgcgcgccaagtgacccaaacaggtttcgacttgccatgaagaagatgaccaagctgtcaagaaaggttaaggctatccatgaaattggtgctgccatcggagacatcgtgaggaaaatccaggagttggtggaccggcgtgtcaggtacaaacttgatgttgctgcagacaggtcaatcagcatggttagtgttgatcctcgccttgcagctttgtacaaagaagcgacacaactcattggcatcgaccaatcaatgtctgaaataatatccatgctgctctcggatgagtcgggccagcaacacattaagaagatttctattgtcggagctggaggactaggcaagaccacccttgctaaagaaacatatgaaaggcttagaagtgaatacgagtttgcaacttttgtttcagttggccaaaatcctgacttggtgagagttttcaagaacatcctcgttaagcttgacatataccagcaagtggacactatcaacagaacagatacgcgagcgctcatcgatgaaatcagacagcgccttagctatgtgaggtgcaggtatctcattgttatcgatgatgtatgggatctggagtcttggcatacactagaattggcatttgttgaaaataacaatgggagtggaataatcataactactcgtaattttgctgttgccacaatagctggtcgtgtttacaagttaaggccactttcgtaccatcactccaaagaattattctacagatcgttatttggtgaaggagtatgccttgatgatcaaataatcaataaggcatcagataaatttctaaagaaatgtgatggtataccgttagctctcatcacaatggctagtttgttcatgggaaaaccaacacaaatgtggtctgagctagccaataatgcttttggacataaaggtcgtaacagtcatttagaagaaacgactatgaggatattatcacttagctactctgatttgccattgaatttgaggacttgctttgtatatttgagtagatatccagatgattatgttattaataaaagttctttgatatggaaatggatagctgaaggttttatccaagaggagcaaggaaaacagttatttgagctcggggaagaattcttcaacgagctcgtaagtagaagcattatacaagtggtccaatcaaaatttgataacacagtgcaaggctttcgtattcatagtatggttcttggtcttattcgcctgttgtcatccgaagaaaactttgtttctgtattggacgaagaagggcaaatatctatatcaggcaaacttcgtcggttagccatccataacagaaaagaagagcacaaccttggagacaatatggacctcctcccatggttgaggtcgtttactgcaattgaatgtcctatatacatgatacctccggttttcatcttcaaattgttacgtgttctggatttagagagttgtgggtctatggaaggttatgatctcaagcagcttggaaatttacataatctcaggtttatcggtctatgtaatacatatgtccggacgctcccacaggaattagggcatctaaagtttctgcagacgcttgaattgaaaggaagtggcgttgaagaactaccttcgagtatgggtgagcttgcagggttaatgtgcctcaacgctgactggacaacaagagtgcccaagtggattgggatgcttacttccctgcaacagttggtgatgtacccttgtggtggctactcggcaaggtggtttgtcaaggggctgggacacctgagggaactaaggatgctccgtttgttgataaaagcagatgacgagaagcagcttgcacaattgctggagtctgttttaaaactgcccaagatcgaggctttacatcttgattactatggcggcgtacagttaaacaggcttgttaagttggaacctagtgattttgcctgcagtggacgtcttcgttccttagaattgcagttgttggaattctcaaggctgcctgtgtggcttaatgcttactatcttccacagatccgtgacttgtcgctgttgatgtttgatgtggataaacaggatctgaaaaaccttggggacttcaaggagctccgtcatctccatctgctaattgttaacactgaacgcagagatgctattacttgtgccagtggtggattccggaatttgagattcttcagtatcactaaaccattcaagtttcaacagggagatctgcctaggcttgaaatccttgattttcatttcaatgtgccactccaaagtggtgccaatagtggcctggattttgacttcggtttggaaaatatcccttcgcttcagcaagtcattgttcaaatcaactgtctagatgcctttcctcttccagaggaggtggagacagccctaaggcacgcaatcggcgtccatcccaaccgtcccatcgttgacatcagtttgcctcgacgaaaattagacaaggcagacaacgacggggccgaagggcgtagtaagttggctcattattcaaaatcattatcatcggcacatgataagccaatggatgagctaataaagaggttatatgtggtggacaatgaggcctacgataaaaagatgaagattgtgcctattgttagatctgaagggctggggaaaactactcttgcccaaaaagtatttgacaagcttagtccacattttgactgtgcagcatttgttctggtaggccaaaatccggacatgaggaaagttttcactgacattctcataggtctagacaaccaaaagtaccaagatttccctatgactatattggatataattgagctgattgggttagtccgtaaatcgctcataaacaaaaggctgcgcctcggattaaaacagagctatctatcatccacattgcacagccttctctcaagcttcgtaacttaatgaatcgtcactattgaacaatgcaatcctcctccagcctgcataagataaataagcgacacacgttcaggttctttgttgtagttgacgatgtatgggatttgaaagcatgggacataataaagtctgcattgatcgaaaacactaatggcagtgcagttctaacaacgacaagtcgtcagatctgggaacatgagaactggaggccatctggggatgacaagtcggattctgacgcagagcagttagagcctcatttggacgtcacaacccccgcggatgtcctcccagcgtcttccccgagcaagagcaaggtggtggcccatgtggaactccgccacgacgacccagattcctctgcatttggaatcccgcaagtagcaggggatactcaacctgagctccgccttttccccgaggcggatgcggatcttaaagggttcttctacgaaaacctatttggatcggaagacaagtgccctgatgatctgaaagatatatgtaaagatctcatacaaatatctgctggtgtcctatcagatgcctatgagaccgtggaagagctcagaggtattacctacgacactggaaagctggcagcctgtgtatcagagaagaaaattcgagctctcttatcccaaactacctggccatctaaaggattgcttaagatattttagtatgtttccaaaaggttacgagatcagtgcagaacgcttagtttgggcgtggatagctcaaggtttcgtaaaggagactcagggacagaatgatttggagaaagtcggaaagaagtaccttattgaccttataagcagaaagatgatcgaagcagtggaggttcatgctgatggtatggccctctcatgccgtgcgtacgatttgttgcatggcttgatcgtttcattgtcaacagaagaaaaattcgttgaaattctaaatgactcgcagtcgcaggagagagcttcgaatccgaatacagaagttcaccggctgtccatccaaatccagagaaataatatgctacaccccctgccaaaagcttggatgaaacaagtgcagtcacttgttgtctcgtctgataccgtgccagacctctcagattttcagggtcttcatgccatggacttaggaggctgcgattcattgcaggttgatcatctcaagggtataagtaaaacaacatctttgatatatctggccataggaggaaaatatatcgctgacgtcccgaaagaagtttcttggctcaaaaagctgcggacattggatttaactgcaagtggtctgagtgaattgccacgatgtattttaacgctaactaatttggagcggctatttgttaatagccatatgaagattcctggtaagatctcaaaaatgtcaggtttacaagaactgggcgacatcaatattgttaagccagagttacttaaaaggctccgtaaattaagtaagttaagggttctcagaattgccatgtggtcttgggatgagggttctaagagctctgttaaactatggtgggagaccctgcactcattaatcgggtcctgcaaaaaaattgagagtctctgcatactgaccttctgctcccttgatttcatggatggttccggtgatgataataaatggccgcctcaaactctcaaaaacctcgagataagtcacagcgcatttctggataagctcccaagttggtttgactcactttccaccatctcctcgttgacaatcgaggtcaacaagttatcaaagaacatcactgacactctggcaaagctgtctgctctaagatccctttccctgacatccatagaaaagccagaaccagaagtacgctttgtcatcggctctgctggtagattcgagaatctagaaagcttaaagtttgtgtgtaatgaaatggtaaatttgcttgaaagaccggaatcgaatgctacccaacagttaacagggcttactatcgtgtttcatgcttcacgaacagaacgcagccgaaacaaagatttcaggtttggtttggacaaactgctgtccctacagcacgttcgtgttgaaataaactgttccaatgcgacgcagcggacggtgaaaaatgcagaagctgcaattggggaagaaatatcaaaaatacgcagggatgacgggagtcagccaatcctggaaatacgaagactccaggaagaaagtatgatagcagggaaggaccaaacccaggatgctaataagacaccgtcttcttcggtatcctcacaagctccacgaaaataaagacattgaaagagagagcgctt

SEQ ID NO: 14129 - DNA, 6008 bp, Zea Mays
ctttctcccaccgctcggcaattccccgccagtgccctctcgaatcaatcaccacgctcccctgcgacgacgtcctctttgagcacatcctctgccacctctcctccccatccaatacctcacgcatcgtcaccctcgacgacctcaagaccggcaccctaccctgctgctgcgttcctgccatcggcgactcgctcccgcttctccacgacatctccgtcgacaagggcgagcgcgccacccttctcgctggagccagccaccaacgtcgccatcccatttctgcaattttttgggtggctaggagggggtgttgcttcttagtatcttgtcagcgacccggcaggaaaagaaaaataaatgaaatgaaatgcaggtccgtcctggttttccagttcatatcctcgtctctctctggccgtctcctcacctcacggatcaacaggcggacatagcagccgtcctcgttctgcctcaggtccttgtctttcaaacttgttgattccttgttacatctcccatctgcatgcagttccgcaatgtcataggatgcctacatcaacaccaagcaagcaagcagctagctagcgtggttagttatatcttcaaatcagtctacagggatggatctagtgacaggtccgctagccattctcccgtccaagctgcaggagctactccaaatccaagatgagtataggctccagaaggaagtgaggggcagagtggagatgatctgccgggagctgcaaagtatgcacgctgccctccgtaaggtggctgatgtgccgcgggatcagatcgacctccagaccaaggtgtggagacgcgatgtcagagaggcatcctatgacattgaggatgccatcgacacctttctcatgcgcatcagagaccgcgcgccaagtgacccaaacaggtttcgacttgccatgaagaagatgaccaagctgtcaagaaaggttaaggctatccatgaaattggtgctgccatcggagacatcgtgaggaaaatccaggagttggtggaccggcgtgtcaggtacaaacttgatgttgctgcagacaggtcaatcagcatggttagtgttgatcctcgccttgcagctttgtacaaagaagcgacacaactcattggcatcgaccaatcaatgtctgaaataatatccatgctgctctcggatgagtcgggccagcaacacattaagaagatttctattgtcggagctggaggactaggcaagaccacccttgctaaagaaacatatgaaaggcttagaagtgaatacgagtttgcaacttttgtttcagttggccaaaatcctgacttggtgagagttttcaagaacatcctcgttaagcttgacatataccagcaagtggacactatcaacagaacagatacgcgagcgctcatcgatgaaatcagacagcgccttagctatgtgaggtgcaggtatctcattgttatcgatgatgtatgggatctggagtcttggcatacactagaattggcatttgttgaaaataacaatgggagtggaataatcataactactcgtaattttgctgttgccacaatagctggtcgtgtttacaagttaaggccactttcgtaccatcactccaaagaattattctacagatcgttatttggtgaaggagtatgccttgatgatcaaataatcaataaggcatcagataaatttctaaagaaatgtgatggtataccgttagctctcatcacaatggctagtttgttcatgggaaaaccaacacaaatgtggtctgagctagccaataatgcttttggacataaaggtcgtaacagtcatttagaagaaacgactatgaggatattatcacttagctactctgatttgccattgaatttgaggacttgctttgtatatttgagtagatatccagatgattatgttattaataaaagttctttgatatggaaatggatagctgaaggttttatccaagaggagcaaggaaaacagttatttgagctcggggaagaattcttcaacgagctcgtaagtagaagcattatacaagtggtccaatcaaaatttgataacacagtgcaaggctttcgtattcatagtatggttcttggtcttattcgcctgttgtcatccgaagaaaactttgtttctgtattggacgaagaagggcaaatatctatatcaggcaaacttcgtcggttagccatccataacagaaaagaagagcacaaccttggagacaatatggacctcctcccatggttgaggtcgtttactgcaattgaatgtcctatatacatgatacctccggttttcatcttcaaattgttacgtgttctggatttagagagttgtgggtctatggaaggttatgatctcaagcagcttggaaatttacataatctcaggtttatcggtctatgtaatacatatgtccggacgctcccacaggaattagggcatctaaagtttctgcagacgcttgaattgaaaggaagtggcgttgaagaactaccttcgagtatgggtgagcttgcagggttaatgtgcctcaacgctgactggacaacaagagtgcccaagtggattgggatgcttacttccctgcaacagttggtgatgtacccttgtggtggctactcggcaaggtggtttgtcaaggggctgggacacctgagggaactaaggatgctccgtttgttgataaaagcagatgacgagaagcagcttgcacaattgctggagtctgttttaaaactgcccaagatcgaggctttacatcttgattactatggcggcgtacagttaaacaggcttgttaagttggaacctagtgattttgcctgcagtggacgtcttcgttccttagaattgcagttgttggaattctcaaggctgcctgtgtggcttaatgcttactatcttccacagatccgtgacttgtcgctgttgatgtttgatgtggataaacaggatctgaaaaaccttggggacttcaaggagctccgtcatctccatctgctaattgttaacactgaacgcagagatgctattacttgtgccagtggtggattccggaatttgagattcttcagtatcactaaaccattcaagtttcaacagggagatctgcctaggcttgaaatccttgattttcatttcaatgtgccactccaaagtggtgccaatagtggcctggattttgacttcggtttggaaaatatcccttcgcttcagcaagtcattgttcaaatcaactgtctagatgcctttcctcttccagaggaggtggagacagccctaaggcacgcaatcggcgtccatcccaaccgtcccatcgttgacatcagtttgcctcgacgaaaattagacaaggcagacaacgacggggccgaagggcgtagtaagttggctcattattcaaaatcattatcatcggcacatgataagccaatggatgagctaataaagaggttatatgtggtggacaatgaggcctacgataaaaagatgaagattgtgcctattgttagatctgaagggctggggaaaactactcttgcccaaaaagtatttgacaagcttagtccacattttgactgtgcagcatttgttctggtaggccaaaatccggacatgaggaaagttttcactgacattctcataggtctagacaaccaaaagtaccaagatttccctatgactatattggatataattgagctgattgggttagtccgtaaatcgctcataaacaaaaggttctttgttgtagttgacgatgtatgggatttgaaagcatgggacataataaagtctgcattgatcgaaaacactaatggcagtgcagttctaacaacgacaagtcgtcagatctgggaacatgagaactggaggccatctggggatgacaagtcggattctgacgcagagcagttagagcctcatttggacgtcacaacccccgcggatgtcctcccagcgtcttccccgagcaagagcaaggtggtggcccatgtggaactccgccacgacgacccagattcctctgcatttggaatcccgcaagtagcaggggatactcaacctgagctccgccttttccccgaggcggatgcggatcttaaagggttcttctacgaaaacctatttggatcggaagacaagtgccctgatgatctgaaagatatatgtaaagatctcatacaaatatctgctggtgtcctatcagatgcctatgagaccgtggaagagctcagaggttacgagatcagtgcagaacgcttagtttgggcgtggatagctcaaggtttcgtaaaggagactcagggacagaatgatttggagaaagtcggaaagaagtaccttattgaccttataagcagaaagatgatcgaagcagtggaggttcatgctgatggtatggccctctcatgccgtgcgtacgatttgttgcatggcttgatcgtttcattgtcaacagaagaaaaattcgttgaaattctaaatgactcgcagtcgcaggagagagcttcgaatccgaatacagaagttcaccggctgtccatccaaatccagagaaataatatgctacaccccctgccaaaagcttggatgaaacaagtgcagtcacttgttgtctcgtctgataccgtgccagacctctcagattttcagggtcttcatgccatggacttaggaggctgcgattcattgcaggttgatcatctcaagggtataagtaaaacaacatctttgatatatctggccataggaggaaaatatatcgctgacgtcccgaaagaagtttcttggctcaaaaagctgcggacattggatttaactgcaagtggtctgagtgaattgccacgatgtattttaacgctaactaatttggagcggctatttgttaatagccatatgaagattcctggtaagatctcaaaaatgtcaggtttacaagaactgggcgacatcaatattgttaagccagagttacttaaaaggctccgtaaattaagtaagttaagggttctcagaattgccatgtggtcttgggatgagggttctaagagctctgttaaactatggtgggagaccctgcactcattaatcgggtcctgcaaaaaaattgagagtctctgcatactgaccttctgctcccttgatttcatggatggttccggtgatgataataaatggccgcctcaaactctcaaaaacctcgagataagtcacagcgcatttctggataagctcccaagttggtttgactcactttccaccatctcctcgttgacaatcgaggtcaacaagttatcaaagaacatcactgacactctggcaaagctgtctgctctaagatccctttccctgacatccatagaaaagccagaaccagaagtacgctttgtcatcggctctgctggtagattcgagaatctagaaagcttaaagtttgtgtgtaatgaaatggtaaatttgcttgaaagaccggaatcgaatgctacccaacagttaacagggcttactatcgtgtttcatgcttcacgaacagaacgcagccgaaacaaagatttcaggtttggtttggacaaactgctgtccctacagcacgttcgtgttgaaataaactgttccaatgcgacgcagcggacggtgaaaaatgcagaagctgcaattggggaagaaatatcaaaaatacgcagggatgacgggagtcagccaatcctggaaatacgaagactccaggaagaaagtatgatagcagggaaggaccaaacccaggatgctaataagacaccgtcttcttcgtctactatggaaactacattgcgagcccaacctattggggaatcattaatgcctagtgttgagactgtttcttccaaggtcttcgtctctcagaacagctccaacgacacattttttaataatgtaggtatcctcacaagctccacgaaaataaagacattgaaagagagagcgctt

SEQ ID NO: 14130 - DNA, 3102 bp, Zea Mays
ctgagcagcactgcaggcttgcaacagagggacagacggacagcagccagccaccaggccagccccctcaatttccacgacgcttcatgaatggagggagacacaatgcttgtatgcatgcatgcagcttgtgcggcggcttgcatgcagcaaccatgcagagcttgtgcgcgcttgtgcggcttgcatgcagcagccatgcagttgacgatgtatgggatttgaaagcatgggacataataaagtctgcattgatcgaaaacactaatggcagtgcagttctaacaacgacaagtcgtcagatctgggaacatgagaactggaggccatctggggatgacaagtcggattctgacgcagagcagttagagcctcatttggacgtcacaacccccgcggatgtcctcccagcgtcttccccgagcaagagcaaggtggtggcccatgtggaactccgccacgacgacccagattcctctgcatttggaatcccgcaagtagcaggggatactcaacctgagctccgccttttccccgaggcggatgcggatcttaaagggttcttctacgaaaacctatttggatcggaagacaagtgccctgatgatctgaaagatatatgtaaagatctcatacaaatatctgctggtgtcctatcagatgcctatgagaccgtggaagagctcagaggttacgagatcagtgcagaacgcttagtttgggcgtggatagctcaaggtttcgtaaaggagactcagggacagaatgatttggagaaagtcggaaagaagtaccttattgaccttataagcagaaagatgatcgaagcagtggaggttcatgctgatggtatggccctctcatgccgtgcgtacgatttgttgcatggcttgatcgtttcattgtcaacagaagaaaaattcgttgaaattctaaatgactcgcagtcgcaggagagagcttcgaatccgaatacagaagttcaccggctgtccatccaaatccagagaaataatatgctacaccccctgccaaaagcttggatgaaacaagtgcagtcacttgttgtctcgtctgataccgtgccagacctctcagattttcagggtcttcatgccatggacttaggaggctgcgattcattgcaggttgatcatctcaagggtataagtaaaacaacatctttgatatatctggccataggaggaaaatatatcgctgacgtcccgaaagaagtttcttggctcaaaaagctgcggacattggatttaactgcaagtggtctgagtgaattgccacgatgtattttaacgctaactaatttggagcggctatttgttaatagccatatgaagattcctggtaagatctcaaaaatgtcaggtttacaagaactgggcgacatcaatattgttaagccagagttacttaaaaggctccgtaaattaagtaagttaagggttctcagaattgccatgtggtcttgggatgagggttctaagagctctgttaaactatggtgggagaccctgcactcattaatcgggtcctgcaaaaaaattgagagtctctgcatactgaccttctgctcccttgatttcatggatggttccggtgatgataataaatggccgcctcaaactctcaaaaacctcgagataagtcacagcgcatttctggataagctcccaagttggtttgactcactttccaccatctcctcgttgacaatcgaggtcaacaagttatcaaagaacatcactgacactctggcaaagctgtctgctctaagatccctttccctgacatccatagaaaagccagaaccagaagtacgctttgtcatcggctctgctggtagattcgagaatctagaaagcttaaagtttgtgtgtaatgaaatggtaaatttgcttgaaagaccggaatcgaatgctacccaacagttaacagggcttactatcgtgtttcatgcttcacgaacagaacgcagccgaaacaaagatttcaggtttggtttggacaaactgctgtccctacagcacgttcgtgttgaaataaactgttccaatgcgacgcagcggacggtgaaaaatgcagaagctgcaattggggaagaaatatcaaaaatacgcagggatgacgggagtcagccaatcctggaaatacgaagactccaggaagaaagtatgatagcagggaaggaccaaacccaggatgctaataagacaccgtcttcttcgtctactatggaaactacattgcgagcccaacctattggggaatcattaatgcctagtgttgagactgtttcttccaaggtcttcgtctctcagaacagctccaacgacacattttttaataatgtaggtatcctcacaagctccacgaaaataaagacattgaaagagagagcgcttcaggaacttactgctgaaaagcaaggctcaactgctctccaccaagaagtagatgaactcaacaagaagttggcaaaaactcaaagggagtttgaggagtttaagaagcaacaggaagagaacaatctgcttctcaagcatatcttgcactccaacaacgctgctgcagcttgaggagttagctactgcgtgaaggattttagcttctggtaatgatggaggggccattgtggacgtataacttatctcaaccaaatgaaaatatgcgagaatcagcacacattcaaaatcggtctgggccatgaagaattacaggggaagtcacctgaagaagctcagaagcatatagagaaaatgaagaagaattttgaagctcaatacgctatctacctaggacacgcaatgcttcagtttcaacatagggaatccctagtggccccttacaacttcgaataagtgtgagtttgcatacataaaattaataatttcaatagacatgcaccacaaatttgattcgtgtagggaccatcggatctacttcatcattcatcccaaagatggaacggtgttgttcctagattccatagttcacaagccttcaagatatgcaaaattcatgaccatcttagcggtaagcctagatatacatgcatacttttatcgatgagattttgaaaataac

SEQ ID NO: 14131 - DNA, 2264 bp, Zea Mays
ggacagacggacagcagccagccaccaggccagccccctcaatttccacgacgcttcatgaatggagggagacacaatgcttgtatgcatgcatgcagcttgtgcggcggcttgcatgcagcaaccatgcagagcttgtgcgcgcttgtgcggcttgcatgcagcagccatgcagttgacgatgtatgggatttgaaagcatgggacataataaagtctgcattgatcgaaaacactaatggcagtgcagttctaacaacgacaagtcgtcagatctgggaacatgagaactggaggccatctggggatgacaagtcggattctgacgcagagcagttagagcctcatttggacgtcacaacccccgcggatgtcctcccagcgtcttccccgagcaagagcaaggtggtggcccatgtggaactccgccacgacgacccagattcctctgcatttggaatcccgcaagtagcaggggatactcaacctgagctccgccttttccccgaggcggatgcggatcttaaagggttcttctacgaaaacctatttggatcggaagacaagtgccctgatgatctgaaagatatatgtaaagatctcatacaaatatctgctggtgtcctatcagatgcctatgagaccgtggaagagctcagaggttacgagatcagtgcagaacgcttagtttgggcgtggatagctcaaggtttcgtaaaggagactcagggacagaatgatttggagaaagtcggaaagaagtaccttattgaccttataagcagaaagatgatcgaagcagtggaggttcatgctgatggtatggccctctcatgccgtgcgtacgatttgttgcatggcttgatcgtttcattgtcaacagaagaaaaattcgttgaaattctaaatgactcgcagtcgcaggagagagcttcgaatccgaatacagaagttcaccggctgtccatccaaatccagagaaataatatgctacaccccctgccaaaagcttggatgaaacaagtgcagtcacttgttgtctcgtctgataccgtgccagacctctcagattttcagggtcttcatgccatggacttaggaggctgcgattcattgcaggttgatcatctcaagggtataagtaaaacaacatctttgatatatctggccataggaggaaaatatatcgctgacgtcccgaaagaagtttcttggctcaaaaagctgcggacattggatttaactgcaagtggtctgagtgaattgccacgatgtattttaacgctaactaatttggagcggctatttgttaatagccatatgaagattcctggtaagatctcaaaaatgtcaggtttacaagaactgggcgacatcaatattgttaagccagagttacttaaaaggctccgtaaattaagtaagttaagggttctcagaattgccatgtggtcttgggatgagggttctaagagctctgttaaactatggtgggagaccctgcactcattaatcgggtcctgcaaaaaaattgagagtctctgcatactgaccttctgctcccttgatttcatggatggttccggtgatgataataaatggccgcctcaaactctcaaaaacctcgagataagtcacagcgcatttctggataagctcccaagttggtttgactcactttccaccatctcctcgttgacaatcgaggtcaacaagttatcaaagaacatcactgacactctggcaaagctgtctgctctaagatccctttccctgacatccatagaaaagccagaaccagaagtacgctttgtcatcggctctgctggtagattcgagaatctagaaagcttaaagtttgtgtgtaatgaaatggtaaatttgcttgaaagaccggaatcgaatgctacccaacagttaacagggcttactatcgtgtttcatgcttcacgaacagaacgcagccgaaacaaagatttcaggtttggtttggacaaactgctgtccctacagcacgttcgtgttgaaataaactgttccaatgcgacgcagcggacggtgaaaaatgcagaagctgcaattggggaagaaatatcaaaaatacgcagggatgacgggagtcagccaatcctggaaatacgaagactccaggaagaaagtatgatagcagggaaggaccaaacccaggatgctaataagacaccgtcttcttcggtatcctcacaagctccacgaaaataaagacattgaaagagagagcgctt

SEQ ID NO: 14132 - DNA, 2687 bp, Zea Mays
ggacagacggacagcagccagccaccaggccagccccctcaatttccacgacgcttcatgaatggagggagacacaatgcttgtatgcatgcatgcagcttgtgcggcggcttgcatgcagcaaccatgcagagcttgtgcgcgcttgtgcggcttgcatgcagcagccatgcagttgacgatgtatgggatttgaaagcatgggacataataaagtctgcattgatcgaaaacactaatggcagtgcagttctaacaacgacaagtcgtcagatctgggaacatgagaactggaggccatctggggatgacaagtcggattctgacgcagagcagttagagcctcatttggacgtcacaacccccgcggatgtcctcccagcgtcttccccgagcaagagcaaggtggtggcccatgtggaactccgccacgacgacccagattcctctgcatttggaatcccgcaagtagcaggggatactcaacctgagctccgccttttccccgaggcggatgcggatcttaaagggttcttctacgaaaacctatttggatcggaagacaagtgccctgatgatctgaaagatatatgtaaagatctcatacaaatatctgctggtgtcctatcagatgcctatgagaccgtggaagagctcagaggttacgagatcagtgcagaacgcttagtttgggcgtggatagctcaaggtttcgtaaaggagactcagggacagaatgatttggagaaagtcggaaagaagtaccttattgaccttataagcagaaagatgatcgaagcagtggaggttcatgctgatggtatggccctctcatgccgtgcgtacgatttgttgcatggcttgatcgtttcattgtcaacagaagaaaaattcgttgaaattctaaatgactcgcagtcgcaggagagagcttcgaatccgaatacagaagttcaccggctgtccatccaaatccagagaaataatatgctacaccccctgccaaaagcttggatgaaacaagtgcagtcacttgttgtctcgtctgataccgtgccagacctctcagattttcagggtcttcatgccatggacttaggaggctgcgattcattgcaggttgatcatctcaagggtataagtaaaacaacatctttgatatatctggccataggaggaaaatatatcgctgacgtcccgaaagaagtttcttggctcaaaaagctgcggacattggatttaactgcaagtggtctgagtgaattgccacgatgtattttaacgctaactaatttggagcggctatttgttaatagccatatgaagattcctggtaagatctcaaaaatgtcaggtttacaagaactgggcgacatcaatattgttaagccagagttacttaaaaggctccgtaaattaagtaagttaagggttctcagaattgccatgtggtcttgggatgagggttctaagagctctgttaaactatggtgggagaccctgcactcattaatcgggtcctgcaaaaaaattgagagtctctgcatactgaccttctgctcccttgatttcatggatggttccggtgatgataataaatggccgcctcaaactctcaaaaacctcgagataagtcacagcgcatttctggataagctcccaagttggtttgactcactttccaccatctcctcgttgacaatcgaggtcaacaagttatcaaagaacatcactgacactctggcaaagctgtctgctctaagatccctttccctgacatccatagaaaagccagaaccagaagtacgctttgtcatcggctctgctggtagattcgagaatctagaaagcttaaagtttgtgtgtaatgaaatggtaaatttgcttgaaagaccggaatcgaatgctacccaacagttaacagggcttactatcgtgtttcatgcttcacgaacagaacgcagccgaaacaaagatttcaggtttggtttggacaaactgctgtccctacagcacgttcgtgttgaaataaactgttccaatgcgacgcagcggacggtgaaaaatgcagaagctgcaattggggaagaaatatcaaaaatacgcagggatgacgggagtcagccaatcctggaaatacgaagactccaggaagaaagtatgatagcagggaaggaccaaacccaggatgctaataagacaccgtcttcttcggtaatgatggaggggccattgtggacgtataacttatctcaaccaaatgaaaatatgcgagaatcagcacacattcaaaatcggtctgggccatgaagaattacaggggaagtcacctgaagaagctcagaagcatatagagaaaatgaagaagaattttgaagctcaatacgctatctacctaggacacgcaatgcttcagtttcaacatagggaatccctagtggccccttacaacttcgaataagtgtgagtttgcatacataaaattaataatttcaatagacatgcaccacaaatttgattcgtgtagggaccatcggatctacttcatcattcatcccaaagatggaacggtgttgttcctagattccatagttcacaagccttcaagatatgcaaaattcatgaccatcttagcggtaagcctagatatacatgcatacttttatcgatgagattttgaaaataac

SEQ ID NO: 14133 - DNA, 395 bp, Zea Mays
caaaaactcaaagggagtttgaggagtttaagaagcaacaggaagagaacaatctgcttctcaagcatatcttgcactccaacaacgctgctgcagcttgaggagttagctactgcgtgaaggattttagcttctggtgggcatagacagatccttgatgtttatttaattttcactatttaatttccgcactctgaatcatggtattgtaatgaataagtttcccagatcttgtagtgtatgaaaatggactaagtgatgtaagttctgtactcattaagggctagtttgggaactctgtattcccaaagaaaaatgaactaattttccttagaaaaataaaaatcccttagaaaattgtggtttccaaattagccctaattaatgtatcctag

SEQ ID NO: 14134 - DNA, 671 bp, Zea Mays
caaaaactcaaagggagtttgaggagtttaagaagcaacaggaagagaacaatctgcttctcaagcatatcttgcactccaacaacgctggtaatgatggaggggccattgtggacgtataacttatctcaaccaaatgaaaatatgcgagaatcagcacacattcaaaatcggtctgggccatgaagaattacaggggaagtcacctgaagaagctcagaagcatatagagaaaatgaagaagaattttgaagctcaatacgctatctacctaggacacgcaatgcttcagtttcaacatagggaatccctagtggccccttacaacttcgaataagtgtgagtttgcatacataaaattaataatttcaatagacatgcaccacaaatttgattcgtgtagggaccatcggatctacttcatcattcatcccaaagatggaacggtgttgttcctagattccatagttcacaagccttcaagatatgcaaaattcatgaccatcttagcgtgccacaagcaatcaaccggatcagtcctctttgattctatatgtgcgagtttaagcgagagaatcgacgatacatcaagaacccttctaagtaatataagtaatagtcatgtatgtagttttgtcattagagttgcaaatgtattatcaagtgtaaat

SEQ ID NO: 14135 - DNA, 1436 bp, Zea Mays
caccgttttttttgtgccctagggccgtgcatatcaggttttagggatggttgtagaccatacttgagtgttgactcgactgcactcaacggaaggtggaatggacagcttgcttcagcaaccggtgtggacgggcataattggatgtatcctttagcatttgggtttttccaatctgagacagttgatagttggatttggttcatgtcacaattgaagaaggctgttggcgaacttgaagcactggctatctgttcggacgctcaaaaagggttaatgcatgcagtgacacattgtttccctcatgctgagaagagagagtgcttccgacatctcatgggcaattatgtcaaaagctactcaggttctgaacatatgtatccagctgcaagggcatacaggaaagaagtgtttgagcaccatgtaagccaagtaagaagtgttccaaagatagctgaatatttggatctacatcacaaattcctttggtacaggagtggtttcgacccatctattaaatgtgattacataacaaacaacatggctgaggtttttaacaactgggttaaggatcacaaggaccttccagtttgtgacttagctgataagattagggagatgactatggagttgtttcatagaaggagaagtataggtgatagactgcagggtttgatattgccttctgttttggatacattgaaatctcaaactagagggttgggtcatttgtcaattgtcaaaagcgacaattacttggcagaagtgagagatagtacaaattgtttgacaaaacatgtagtgaaagcagagtcgagacaatgttcttgtgaagagtggcagcacacaggaaaaccttgtcagcatggattggcagtgattattgcccaggatgtaaggaatgttggtttggagtactttgtcgatgattattattctgttgaaaagtttagaaaagcttacatgcgaaggattccaccgattggtgaccgttctttttggccgaaagtggatattgcaaatgaagtatttgctccaatggcgaaaagaggggttgggcgacaaaggaaaaacagaataaagagttgtctagagggtggtactgctaaaaaacgaaagggcgtggaaaatgctcaatgcacaactaagataaaaagacagtacacttgcccaaactgtggtcaactaggtcatcggaaaaccagttataagtgccctttaaatggaacaaagaaaaggaagaggaagccaagaaagaatactacgaagaattggatcccgaaagagttgcggacttctacatctcaaactagtgctcctaacgaagaaacaactattgtacctcaaactgctcaaactgtggatgcagaaacagttgaaatagaccatggtagccatgaaaatgtcagtgcagatgcagcactagtctgtgtgca

SEQ ID NO: 14136 - DNA, 1657 bp, Zea Mays
tgctcacccacctctccgcgtgaaagccgccgcgatccaaccaacttcgccgagcttgccggggatcgtttctgccatcctgttcaccctgctcgtatataaccgtcgtccgcagctctcctgtttccctatttcgcctggcctgagccgaaactgtgtgccgaggggggaaaaggagggagcagagggtgccgccaacgtcattcttggtctcggttggtgtaggatcttccacggagggtttgggggctccgctgtgcttcctggtggacgcctgtggccgaagaaggagaggtcgaccactggatggccggaatttcatcactgcaccgttgaattcgccgcggcgagcgggcagaccgaggtgcttccagaagagcatgtgactaaggatcgtagtgcccagcagatagaagttgctgagcaggagctcattgaaggcaagttgtgcccttgatcacttattttttcccagccatgttcttattaatcataatgatctgcataggttaattttgatgggatcgtttaggttaccctagttttggttatctttataccttgtttaccactcaatatttttgggtagtacttgctattgctttatgtggttttgggtatggagatacattattcatgaacacttttattatctgtttattattactgttcatgttaagatcattatgttaatgggaacatggagcgaccacccgggaaaacagtgctaccacaagggtagtatgggatgcccttggctgattaactaggaaagctagcggatgactaccttacccgataggggcaagggcattaggggagtggtcagtgtagggaggtccttgggttgattttgctccgatggcggtcaggcgcctggagcttcctataaactgtagcgggttttctgaagctagtggaactttgtaaaggcctagtagtgttaccctgcctcgcctcctcggtagaggtgtatgggattgaccgtctcttggcagatgggtaacatgacttgtgggttaagatgtgcaacctcttcagagtgtaaaactggtatactagccgtgctcacggttatgagcagctcggaccctcacatgattaatctatggaattaaaactcaatttgtcatttgcatcgcattgggattattttattattacttttacttattaatactaaggtttggtatttacttatacttagtaattgctaataaaattttgaccaacttataaaagcaatgctcagcttcaacctttattttgttgatcagccttacacttcacatgaactcccacctttggagagttcatgcacattattcaccacaacttgttgagctatgaacgtatgtgagctcactcttgctgtctcacacccccccccacaggagaagaataggtggtcgaagaggagtcgcctaacactaaggctttcgacttgatctaggtggtgtctcctagtcagctttgtggcgccagggaataatatttagttcgctttattttatcatttatttttgtaagacttccgctatgtaataattacattgataatatttatgacatttatctctatgcactctgttattatatgtgttgtcttctctggcgcatatatgagatgcacccagctttgttccttaaatccggg

SEQ ID NO: 14137 - DNA, 837 bp, Zea Mays
gtatgacctgtctggagggatcgagtacaaaagggtttggagcctcatgctgcgcctgtagaaacttcagtacctagcgagcgtaggaaggagagtccaacgaccggccatggcccaattagtgaagatattgagccaggacggcgacaagttgtacctactatccattagtggcgatgatgtcgttcttgcgcgtgaagatccccgtgacaaaacgcagcaatggttcaaggactactcccgatccagcaatttgaccgatgataacggccgaaggacattcgcgctggtgaacaaggccacacgacaagcaattgtgaacagaaaagatacaagcatgcaaagtgatcttcaatatcgtcgcggcgacgtaatcaagcaggtggaactggccccttacaactatgatgatcgtgtggatatctccatgctatggaccgagctcgcggagaacggtaacgatgacggctttaacataattgcggtgctcagcgacaactctctgatgctttgttggcaacatgacggcaataatgtcagtacgggtcagggcatggtaaccgttaactatttttctggtcaaggcaaccggcactggaagatagttcccgtaggccgcaacgcgtggtgaaggttctgttaaaacgcgtcactaattagatttctaaagcttcagactgaatctattactgaagtgtgtcgtccattataaaacatgtcattaatattgggtcaaaaaattccaaaaggcatagtgacgcgttattacttcaaaaacccttcactaatgggtgttattagtgatgaatatttacatgtcactaatatgatttaaga

SEQ ID NO: 14138 - DNA, 7910 bp, Zea Mays
cacgcgtccacgcgcgcacacgggccctccacttgtcccccaccgtcatctccatcaccctcctctgtcacgtgcctctgcgctccaccgcggcggagtccccgatgctgattgtgggccgcgaaatttcattataggccccacccccgtcgctcgcccgtcgcccccacccctcggtatatccgcctccgcccggcgcctccctctgcctcctctgctccgccctgccgccgcaaggatccaaaccccgaattttgctctctttttatggcactgtgcttttgagaaggcctttaattgtgctgtctgggccacggaacggcaatgtcgcagcttggattagctgcaactgcctcgaaggccttgccactactccctaatcgccagagaagtccagctgggactacatttccatcatctgcattgccgaggccctcaaaccgaaggaaaagccatactcgttcacttcgtgatggtggaaatgaggtatcagatgccaaaaagcacagccagtcagttcgtcaaggtcttgctggcattatcgacatcccaagtgacgcagtttcggaagtcgatatttcacatggacctaaggatcctagggggccaacagattcctatcaaatgaatgggattatcaatgaaacacataatggaagacatgcctcagggtccatggttgttgaattttgtgcagcactaggtggcaaaacaccaattcacagtatattagtggccaacaatggaatggcggcaacaaagttcatgaggagtgtccgtacatgggctaatgatacttttggatctgagaaggcaattcatctcatagctatggcaactccggaagacatgaggataaatgcagaacacatcagacttgctgatcaattcgtagaggtgcctggtggaacaaacaataataactatgccaacgttcaactcatagtggagatagcagaaagagtaggtgtttctgctgtttggcctggttggggtcatgcttctgagaatcctgagctgccggatgcattgaccgcaaaaggaatcgtttttcttgggccaccagcaacatcaatgaatgcattgggagataaggttggttcagctctcattgctcaagcagccggggtcccaactcttgcttggagtggatcgcatgttgaagttccattagagtgctgcttagacgcgatacctgaggagatgtatagaaaagcttgtgttactaccacagaggaggcagttgcaagttgtcaagtggttggttatcctgccatgattaaggcatcctggggaggtggtggtaaaggaataagaaaggttcataatgatgatgaggttagagcgctgtttaagcaagtacaaggtgaagtccctggctccccaatatttatcatgaggcttgcatcccagagtcggcatcttgaagttcagttgctttgtgatcaatatggcaatgtagcagcacttcacagtcgtgattgcagtgtacaacggcgacaccagaagattattgaagaaggcccagttactgttgctcctcgtgaaacagttaaagcacttgagcaggcagcaaggaggcttgctaaggctgtgggttatgttggtgcggctactgttgagtatctttacagcatggagactggagaatactattttctggagcttaatccccgactacaggttgagcatccagtcactgagtggatagctgaagtaaatctgcctgcagctcaagttgcagttggaatgggcatacctctttggcagattccagaaatcagacgtttttatggaatggactatggaggagggtatgacatttggaggaaaacagcagctcttgctgcaccatttaattttgatgaagtagattctctatggccaaagggccattgtgtagcagttagaattactagtgaggacccagatgatggtttcaaacctactggcgggaaagtgaaggagataagttttaaaagcaagcctaatgtttgggcctacttctcagtaaagtctggtggaggcattcatgaatttgctgattctcagtttggacatgtttttgcatatggactctctagaccagcagctataacaaacatgtctcttgcattaaaagagattcagattcgtggagaaattcattcaaatgttgattacacagttgacctcttaaacgcttcagacttcagagaaaacaagatccacactggttggctggatacaagaatagctatgcgtgttcaagctgagaggcccccatggtatatctcagtggttggaggtgctttatataaaacagtaaccaccaatgcagccactgtttctgaatatgttagttatctcaccaaaggccagattccaccaaagcatatatcccttgtcaattcaacagttaatttgaatatagaagggagcaaatacacaattgaaactgtcaggactgggcatggtaggtacaagttgcgaatgaatgattcaacagttgaggcgaatgtacaatctttatgtgatggtggcctcttaatgcagttggatggaaacagccatgtgatttatgcagaagaagaagctggcggtacacggcttcagattaatggaaagacatgcttgttgcagaatgaccatgatccatcaaagttattagctgagactccctgcaaacttcttcgctttttggttgctgatggtgctcatgttggtgcggatgtgccatatgcggaagttgaggttatgaagatgtgcatgcctctcttgtcacctgcttctggtgtcattcattgtatgatgtctgagggccaggcgttgcaggctggtgatcttatagcaaggctggatcttgatgacccttctgctgtgaaaagagctgaaccatttgatggaatgtttccactaatggacctccctgttgctgcctctagtcaagtacacaaaagatatgctgcaagtttgaatgctgctcgaatggtccttgcaggatatgagcacaatatcaatgaagtcgttcaagatttggtatgctgcctggacaatcctgagcttccttttctacagtgggatgaactaatgtctgttctagcaacgaggcttccaagaaatctcaagagtgagttagaggataaatacaaggaatacaagttgaatttttaccatgggaaaaacaaggacttcccatccaagttgctaagagacatcgtcgaggaaaatcttgcatatggttcagagaaggaaaaggctacaaatgagcgacttgttgagcctcttatgaacctactgaagtcatatgagggtgggagagaaagccatgcacattttgttgtcaagtctctttttgaggagtatcttaccgtggaagaacttttcagtgatggcattcagtctgacgtgattgaaaccttgcgtcatcagcacagtaaagacctgcagaaggttgtagacatcgtgctgtctcaccagggtgtgaggaacaaagctaagcttgtaacagcacttatggaaaagctggtttatccaaatcctggtgcgtacagggatctgttggttcgcttttcgtccctcaatcataaaagatattataagttggcccttaaagcaagtgaacttcttgaacaaaccaaactaagtgaactctgttccagcattgcaagaagcctttcagatctggggatgcataagggagaaatgactattaaggatagcatggaagatttagtctctgccccattgcctgttgaagatgctcttatttctttgtttgattacagtgatccaactgttcagcagaaagtgattgtgacatacatatcacgattgtaccagcctcatcttgtgaaggatagcatccaaatgaaattcaaagaatctggtgctattgttttttgggaattttctgaagggcatgttgatactagaaatggacaaggggctattcttggtgggaagagatggggtgccatggtcgttctcagatcacttgaatctgcatcaacagccattatggctgcattaaaagattctgtacagtacaacaactctgaggtcaacacaatgcacattgtgttattgaatgctgaaactgaaagtaatataagtgggacaagtgatgaccaagctcaacataggatggaaaagcttaccaagatactgaaggatagtagtgttgcaagtgatctccaagctgctggtttgaaggttataagttgcattgttcaaagagatgcaggtcgcatgccaatgcgccacacattcctctggtttgatgaaaagaactgttatgaagaagagcatattctccggcatgtggagcctcccctctctgcacttcttgaattgggtaagttgaaagtgaaaggatacaacgaaatgaagtatactccatcacgtgatcgtcaatggcatatctacacactaagaaatactgaaaaccccaaaatgttgcatagggtatttttccgaactattgtcaggcaacccaatgcaggcaacaagtttacgtcggcacaggtcagcgacactggattaggatgtcctgaagaatctctgtcatttacatcgaatagcatcttaagatcactgatgactgctatagaagaattagagcttcatgcgattaggacaggtcattctcacatgtttttgtgcatactgaaagaacaaaagcttcttgatctcgtcccattttcagggagtacaattgttgacgttggccaagatgaagctactgcttgttcacttttaagatcaatggctttgaagatacatgaacttgttggtgcaaggatgcatcatctttctgtatgccagtgggaggtgaaactcaagttggactgtgatggacctgcaagtggtacctggagagtcgtaactacaaatgtcactagtcacacctgcaccattgatatctaccgagaagtggaagatacagaatcgcagaagttactataccattcagctacttcgtcagctggtccaatgcatggtgttgcactgaataatccttatcaacctttgagtgtgattgatctaaagcgctgctctgctaggaacaacagaacaacatattgctacgattttccgctggcatttgaaactgcactgcagaagtcatggcaatccaactgttctagtgttcctgaaggcagtgaaaatagtaaatcctacgtgaaatcaactgagctggtgtttgctgaaaaacatgggtcctggggcactcctataattcccatggaacgtcctgctgggctcaatgacattggtatggtcgcttggatcttggaaatgtcaacacctgaatttcccaatggcaggcagattattgttgtagcaaatgatattactttcagagctggatcattcggcccaagggaagatgcattttttgaagctgtcaccaacctggcttgcgaaaggaagcttccccttatatacttggcagcaaactctggtgctaggattggcatagctgatgaagtgaaatcttgcttccgtgttgggtggtctgatgaacgcagccctgaacgagggtttcagtacatctatctgactgaagaagactatgctcgtattagctcttctgttatagcacataagctgcagctagataatggtgaaattaggtggattattgactctgttgtgggcaaggaggatgggcttggtgttgagaacatacatggaagtgctgctattgccagtgcttattctagggcatatgaggagacatttacacttacatttgtgactgggcggactgtaggaataggagcctatcttgctcgacttggtatacggtgcatacagcgccttgaccagcctattattttaacagggttttctgccctgaacaagctccttgggcgagaagtgtacagctcccacatgcagctgggtggtcctaagatcatggcgaccaatggtgttgtccacttgaccgtttcagatgatcttgaaggtgtttccaatatattgaggtggctcagctatgttcctgcaaacattggtggacctcttcctattaccaaacctttggaccctccagatagacctgtcgcatacatccctgagaacacatgcgatccgcgtgcagccatccgtggtgtagatgacagccaagggaaatggttgggtggtatgtttgacaaagacagctttgtggagacatttgaaggatgggcaaaaacagtggttactggcagagcaaagcttggaggaattcctgtgggtgttatagctgtggagacacagaccatgatgcagctcatccctgctgatccaggtcaacttgattcccatgagcgatctgttcctcgggctggacaagtgtggttcccagattctgcaaccaagacagctcaggcattattagacttcaaccgtgaaggattgcctctgttcatcctggctaactggagaggcttttctgggggacagagagatctctttgaaggtattcttcaggctgggtcagcaattgttgagaaccttaggacatataatcagcctgcgtttgtctacattcctatggctggagagcttcgtggaggagcttgggttgtgatcgatagcaaaataaatccagaccgcattgagtgttatgctgagaggactgccaaaggtaatgtgctcgaacctcaagggttaattgaaattaagttcaggtcagaggaactccaagactgtatgggcaggcttgacccagagttgataaatctgaaagcaaaacttcaagatgcaaagcatggaaatggaagtctaccagacatagaatcgcttcagaagagtatagaagcgcgtacaaaacagttgttacctttatatacccagattgcagtacgctttgctgaattgcatgatacttccctgagaatggcagctaaaggcgtgattaagaaagttgtagactgggaagaatcacgctctttcttctataaaaggctacggaggaggatctctgaagatcttcttgcaaaagaaataagacgaataattggtgacaacttcacgcaccaatcggcgatggagcttatcaatgaatggtacctggcttctcaggccacaacaggaagcactgctggatgggatgatgatgatgcttttgttgcctggaaggacagtcctgaaaactacaagggatatatccaagagctaagggctcaaaaagtatctcagtcgctctctgatcttgctgactccagttcagatctacaagcattctcgcagggtctttctacactattagataagatggatccttctcagagagtgaagtttgttcaggaagtcaagaaggttcttggatgatgatatgataccaacacatccaacacaatatgcgcatgctacatgttatttttcaagtacatacatagaaggatattgcttggccttgattgatcatgtctgatctaagtcgatcattattttcttgaaacttcctttcggacgtggtgctatggttgatgaatttggatgtgtgcgttctgccaggtgtaagcccaaaggtttatacagaccgagttaaggttaggaagagcacgagtgaacttgttctggttttgcagtggttaaggcagaaagttgtttcactgtagttctgagatgtattaccagcggcgctgtaattttagggtgtataatgcggatgctagtaaacaattgagtggttcattaaattttgaactcgaataatatgtttctgtaggcacatgtgacgtaccactacatgaaataaatgtcgctgaactagggcaccagagttttggtaggactaaggttttgtttggttatgggataaggtgagcatctccagcgttcccaaacttgaatttcccaataaatttctaatgcgacgggctagacaaaaagcttgttgagccggctcggtagctttggttaagaaatgctttgtt

SEQ ID NO: 14139 - DNA, 7859 bp, Zea Mays
ctcctctgtcacgtgcctctgcgctccaccgcggcggagtccccgatgctgattgtgggccgcgaaatttcattataggccccacccccgtcgctcgcccgtcgcccccacccctcggtatatccgcctccgcccggcgcctccctctgcctcctctgctccgccctgccgccgcaaggatccaaaccccattttcaggaattttgctctctttttatggcactgtgcttttgagaaggcctttaattgtgctgtctgggccacggaacggcaatgtcgcagcttggattagctgcaactgcctcgaaggccttgccactactccctaatcgccagagaagtccagctgggactacatttccatcatctgcattgccgaggccctcaaaccgaaggaaaagccatactcgttcacttcgtgatggtggaaatgaggtatcagatgccaaaaagcacagccagtcagttcgtcaaggtcttgctggcattatcgacatcccaagtgacgcagtttcggaagtcgatatttcacatggacctaaggatcctagggggccaacagattcctatcaaatgaatgggattatcaatgaaacacataatggaagacatgcctcagggtccatggttgttgaattttgtgcagcactaggtggcaaaacaccaattcacagtatattagtggccaacaatggaatggcggcaacaaagttcatgaggagtgtccgtacatgggctaatgatacttttggatctgagaaggcaattcatctcatagctatggcaactccggaagacatgaggataaatgcagaacacatcagacttgctgatcaattcgtagaggtgcctggtggaacaaacaataataactatgccaacgttcaactcatagtggagatagcagaaagagtaggtgtttctgctgtttggcctggttggggtcatgcttctgagaatcctgagctgccggatgcattgaccgcaaaaggaatcgtttttcttgggccaccagcaacatcaatgaatgcattgggagataaggttggttcagctctcattgctcaagcagccggggtcccaactcttgcttggagtggatcgcatgttgaagttccattagagtgctgcttagacgcgatacctgaggagatgtatagaaaagcttgtgttactaccacagaggaggcagttgcaagttgtcaagtggttggttatcctgccatgattaaggcatcctggggaggtggtggtaaaggaataagaaaggttcataatgatgatgaggttagagcgctgtttaagcaagtacaaggtgaagtccctggctccccaatatttatcatgaggcttgcatcccagagtcggcatcttgaagttcagttgctttgtgatcaatatggcaatgtagcagcacttcacagtcgtgattgcagtgtacaacggcgacaccagaagattattgaagaaggcccagttactgttgctcctcgtgaaacagttaaagcacttgagcaggcagcaaggaggcttgctaaggctgtgggttatgttggtgcggctactgttgagtatctttacagcatggagactggagaatactattttctggagcttaatccccgactacaggttgagcatccagtcactgagtggatagctgaagtaaatctgcctgcagctcaagttgcagttggaatgggcatacctctttggcagattccagaaatcagacgtttttatggaatggactatggaggagggtatgacatttggaggaaaacagcagctcttgctgcaccatttaattttgatgaagtagattctctatggccaaagggccattgtgtagcagttagaattactagtgaggacccagatgatggtttcaaacctactggcgggaaagtgaaggagataagttttaaaagcaagcctaatgtttgggcctacttctcagtaaagtctggtggaggcattcatgaatttgctgattctcagtttggacatgtttttgcatatggactctctagaccagcagctataacaaacatgtctcttgcattaaaagagattcagattcgtggagaaattcattcaaatgttgattacacagttgacctcttaaacgcttcagacttcagagaaaacaagatccacactggttggctggatacaagaatagctatgcgtgttcaagctgagaggcccccatggtatatctcagtggttggaggtgctttatataaaacagtaaccaccaatgcagccactgtttctgaatatgttagttatctcaccaaaggccagattccaccaaagcatatatcccttgtcaattcaacagttaatttgaatatagaagggagcaaatacacaattgaaactgtcaggactgggcatggtaggtacaagttgcgaatgaatgattcaacagttgaggcgaatgtacaatctttatgtgatggtggcctcttaatgcagttggatggaaacagccatgtgatttatgcagaagaagaagctggcggtacacggcttcagattaatggaaagacatgcttgttgcagaatgaccatgatccatcaaagttattagctgagactccctgcaaacttcttcgctttttggttgctgatggtgctcatgttggtgcggatgtgccatatgcggaagttgaggttatgaagatgtgcatgcctctcttgtcacctgcttctggtgtcattcattgtatgatgtctgagggccaggcgttgcaggctggtgatcttatagcaaggctggatcttgatgacccttctgctgtgaaaagagctgaaccatttgatggaatgtttccactaatggacctccctgttgctgcctctagtcaagtacacaaaagatatgctgcaagtttgaatgctgctcgaatggtccttgcaggatatgagcacaatatcaatgaagtcgttcaagatttggtatgctgcctggacaatcctgagcttccttttctacagtgggatgaactaatgtctgttctagcaacgaggcttccaagaaatctcaagagtgagttagaggataaatacaaggaatacaagttgaatttttaccatgggaaaaacaaggacttcccatccaagttgctaagagacatcgtcgaggaaaatcttgcatatggttcagagaaggaaaaggctacaaatgagcgacttgttgagcctcttatgaacctactgaagtcatatgagggtgggagagaaagccatgcacattttgttgtcaagtctctttttgaggagtatcttaccgtggaagaacttttcagtgatggcattcagtctgacgtgattgaaaccttgcgtcatcagcacagtaaagacctgcagaaggttgtagacatcgtgctgtctcaccagggtgtgaggaacaaagctaagcttgtaacagcacttatggaaaagctggtttatccaaatcctggtgcgtacagggatctgttggttcgcttttcgtccctcaatcataaaagatattataagttggcccttaaagcaagtgaacttcttgaacaaaccaaactaagtgaactctgttccagcattgcaagaagcctttcagatctggggatgcataagggagaaatgactattaaggatagcatggaagatttagtctctgccccattgcctgttgaagatgctcttatttctttgtttgattacagtgatccaactgttcagcagaaagtgattgtgacatacatatcacgattgtaccagcctcatcttgtgaaggatagcatccaaatgaaattcaaagaatctggtgctattgttttttgggaattttctgaagggcatgttgatactagaaatggacaaggggctattcttggtgggaagagatggggtgccatggtcgttctcagatcacttgaatctgcatcaacagccattatggctgcattaaaagattctgtacagtacaacaactctgaggtcaacacaatgcacattgtgttattgaatgctgaaactgaaagtaatataagtgggacaagtgatgaccaagctcaacataggatggaaaagcttaccaagatactgaaggatagtagtgttgcaagtgatctccaagctgctggtttgaaggttataagttgcattgttcaaagagatgcaggtcgcatgccaatgcgccacacattcctctggtttgatgaaaagaactgttatgaagaagagcatattctccggcatgtggagcctcccctctctgcacttcttgaattgggtaagttgaaagtgaaaggatacaacgaaatgaagtatactccatcacgtgatcgtcaatggcatatctacacactaagaaatactgaaaaccccaaaatgttgcatagggtatttttccgaactattgtcaggcaacccaatgcaggcaacaagtttacgtcggcacaggtcagcgacactggattaggatgtcctgaagaatctctgtcatttacatcgaatagcatcttaagatcactgatgactgctatagaagaattagagcttcatgcgattaggacaggtcattctcacatgtttttgtgcatactgaaagaacaaaagcttcttgatctcgtcccattttcagggagtacaattgttgacgttggccaagatgaagctactgcttgttcacttttaagatcaatggctttgaagatacatgaacttgttggtgcaaggatgcatcatctttctgtatgccagtgggaggtgaaactcaagttggactgtgatggacctgcaagtggtacctggagagtcgtaactacaaatgtcactagtcacacctgcaccattgatatctaccgagaagtggaagatacagaatcgcagaagttactataccattcagctacttcgtcagctggtccaatgcatggtgttgcactgaataatccttatcaacctttgagtgtgattgatctaaagcgctgctctgctaggaacaacagaacaacatattgctacgattttccgctggcatttgaaactgcactgcagaagtcatggcaatccaactgttctagtgttcctgaaggcagtgaaaatagtaaatcctacgtgaaatcaactgagctggtgtttgctgaaaaacatgggtcctggggcactcctataattcccatggaacgtcctgctgggctcaatgacattggtatggtcgcttggatcttggaaatgtcaacacctgaatttcccaatggcaggcagattattgttgtagcaaatgatattactttcagagctggatcattcggcccaagggaagatgcattttttgaagctgtcaccaacctggcttgcgaaaggaagcttccccttatatacttggcagcaaactctggtgctaggattggcatagctgatgaagtgaaatcttgcttccgtgttgggtggtctgatgaacgcagccctgaacgagggtttcagtacatctatctgactgaagaagactatgctcgtattagctcttctgttatagcacataagctgcagctagataatggtgaaattaggtggattattgactctgttgtgggcaaggaggatgggcttggtgttgagaacatacatggaagtgctgctattgccagtgcttattctagggcatatgaggagacatttacacttacatttgtgactgggcggactgtaggaataggagcctatcttgctcgacttggtatacggtgcatacagcgccttgaccagcctattattttaacagggttttctgccctgaacaagctccttgggcgagaagtgtacagctcccacatgcagctgggtggtcctaagatcatggcgaccaatggtgttgtccacttgaccgtttcagatgatcttgaaggtgtttccaatatattgaggtggctcagctatgttcctgcaaacattggtggacctcttcctattaccaaacctttggaccctccagatagacctgtcgcatacatccctgagaacacatgcgatccgcgtgcagccatccgtggtgtagatgacagccaagggaaatggttgggtggtatgtttgacaaagacagctttgtggagacatttgaaggatgggcaaaaacagtggttactggcagagcaaagcttggaggaattcctgtgggtgttatagctgtggagacacagaccatgatgcagctcatccctgctgatccaggtcaacttgattcccatgagcgatctgttcctcgggctggacaagtgtggttcccagattctgcaaccaagacagctcaggcattattagacttcaaccgtgaaggattgcctctgttcatcctggctaactggagaggcttttctgggggacagagagatctctttgaaggtattcttcaggctgggtcagcaattgttgagaaccttaggacatataatcagcctgcgtttgtctacattcctatggctggagagcttcgtggaggagcttgggttgtgatcgatagcaaaataaatccagaccgcattgagtgttatgctgagaggactgccaaaggtaatgtgctcgaacctcaagggttaattgaaattaagttcaggtcagaggaactccaagactgtatgggcaggcttgacccagagttgataaatctgaaagcaaaacttcaagatgcaaagcatggaaatggaagtctaccagacatagaatcgcttcagaagagtatagaagcgcgtacaaaacagttgttacctttatatacccagattgcagtacgctttgctgaattgcatgatacttccctgagaatggcagctaaaggcgtgattaagaaagttgtagactgggaagaatcacgctctttcttctataaaaggctacggaggaggatctctgaagatcttcttgcaaaagaaataagacgaataattggtgacaacttcacgcaccaatcggcgatggagcttatcaatgaatggtacctggcttctcaggccacaacaggaagcactgctggatgggatgatgatgatgcttttgttgcctggaaggacagtcctgaaaactacaagggatatatccaagagctaagggctcaaaaagtatctcagtcgctctctgatcttgctgactccagttcagatctacaagcattctcgcagggtctttctacactattagataagatggatccttctcagagagtgaagtttgttcaggaagtcaagaaggttcttggatgatgatatgataccaacacatccaacacaatatgcgcatgctacatgttatttttcaagtacatacatagaaggatattgcttggccttgattgatcatgtctgatctaagtcgatcattattttcttgaaacttcctttcggacgtggtgctatggttgatgaatttggatgtgtgcgttctgccaggtgtaagcccaaaggtttatacagaccgagttaaggttaggaagagcacgagtgaacttgttctggttttgcagtggttaaggcagaaagttgtttcactgtagttctgagatgtattaccagcggcgctgtaattttagggtgtataatgcggatgctagtaaacaattgagtggttcattaaattttgaactcgaataatatgtttctgtaggcacatgtgacgtaccactacatgaaataaatgtcgctgaactagggcaccagagttttggtaggactaaggttttgtttggttatgggataaggtgagcatctccagcgttcccaaacttgaatttcccaataaatttctaatgcgacgggctagacaaaaagcttgttgagccggctcggtagctttggttaagaaatgctttgtt

SEQ ID NO: 14140 - DNA, 7777 bp, Zea Mays
cacccctcggtatatccgcctccgcccggcgcctccctctgcctcctctgctccgccctgccgccgcaaggatccaaaccccgtacgtcgccttctccgccgcctttcttcccgaggaattttgctctctttttatggcactgtgcttttgagaaggcctttaattgtgctgtctgggccacggaacggcaatgtcgcagcttggattagctgcaactgcctcgaaggccttgccactactccctaatcgccagagaagtccagctgggactacatttccatcatctgcattgccgaggccctcaaaccgaaggaaaagccatactcgttcacttcgtgatggtggaaatgaggtatcagatgccaaaaagcacagccagtcagttcgtcaaggtcttgctggcattatcgacatcccaagtgacgcagtttcggaagtcgatatttcacatggacctaaggatcctagggggccaacagattcctatcaaatgaatgggattatcaatgaaacacataatggaagacatgcctcagggtccatggttgttgaattttgtgcagcactaggtggcaaaacaccaattcacagtatattagtggccaacaatggaatggcggcaacaaagttcatgaggagtgtccgtacatgggctaatgatacttttggatctgagaaggcaattcatctcatagctatggcaactccggaagacatgaggataaatgcagaacacatcagacttgctgatcaattcgtagaggtgcctggtggaacaaacaataataactatgccaacgttcaactcatagtggagatagcagaaagagtaggtgtttctgctgtttggcctggttggggtcatgcttctgagaatcctgagctgccggatgcattgaccgcaaaaggaatcgtttttcttgggccaccagcaacatcaatgaatgcattgggagataaggttggttcagctctcattgctcaagcagccggggtcccaactcttgcttggagtggatcgcatgttgaagttccattagagtgctgcttagacgcgatacctgaggagatgtatagaaaagcttgtgttactaccacagaggaggcagttgcaagttgtcaagtggttggttatcctgccatgattaaggcatcctggggaggtggtggtaaaggaataagaaaggttcataatgatgatgaggttagagcgctgtttaagcaagtacaaggtgaagtccctggctccccaatatttatcatgaggcttgcatcccagagtcggcatcttgaagttcagttgctttgtgatcaatatggcaatgtagcagcacttcacagtcgtgattgcagtgtacaacggcgacaccagaagattattgaagaaggcccagttactgttgctcctcgtgaaacagttaaagcacttgagcaggcagcaaggaggcttgctaaggctgtgggttatgttggtgcggctactgttgagtatctttacagcatggagactggagaatactattttctggagcttaatccccgactacaggttgagcatccagtcactgagtggatagctgaagtaaatctgcctgcagctcaagttgcagttggaatgggcatacctctttggcagattccagaaatcagacgtttttatggaatggactatggaggagggtatgacatttggaggaaaacagcagctcttgctgcaccatttaattttgatgaagtagattctctatggccaaagggccattgtgtagcagttagaattactagtgaggacccagatgatggtttcaaacctactggcgggaaagtgaaggagataagttttaaaagcaagcctaatgtttgggcctacttctcagtaaagtctggtggaggcattcatgaatttgctgattctcagtttggacatgtttttgcatatggactctctagaccagcagctataacaaacatgtctcttgcattaaaagagattcagattcgtggagaaattcattcaaatgttgattacacagttgacctcttaaacgcttcagacttcagagaaaacaagatccacactggttggctggatacaagaatagctatgcgtgttcaagctgagaggcccccatggtatatctcagtggttggaggtgctttatataaaacagtaaccaccaatgcagccactgtttctgaatatgttagttatctcaccaaaggccagattccaccaaagcatatatcccttgtcaattcaacagttaatttgaatatagaagggagcaaatacacaattgaaactgtcaggactgggcatggtaggtacaagttgcgaatgaatgattcaacagttgaggcgaatgtacaatctttatgtgatggtggcctcttaatgcagttggatggaaacagccatgtgatttatgcagaagaagaagctggcggtacacggcttcagattaatggaaagacatgcttgttgcagaatgaccatgatccatcaaagttattagctgagactccctgcaaacttcttcgctttttggttgctgatggtgctcatgttggtgcggatgtgccatatgcggaagttgaggttatgaagatgtgcatgcctctcttgtcacctgcttctggtgtcattcattgtatgatgtctgagggccaggcgttgcaggctggtgatcttatagcaaggctggatcttgatgacccttctgctgtgaaaagagctgaaccatttgatggaatgtttccactaatggacctccctgttgctgcctctagtcaagtacacaaaagatatgctgcaagtttgaatgctgctcgaatggtccttgcaggatatgagcacaatatcaatgaagtcgttcaagatttggtatgctgcctggacaatcctgagcttccttttctacagtgggatgaactaatgtctgttctagcaacgaggcttccaagaaatctcaagagtgagttagaggataaatacaaggaatacaagttgaatttttaccatgggaaaaacaaggacttcccatccaagttgctaagagacatcgtcgaggaaaatcttgcatatggttcagagaaggaaaaggctacaaatgagcgacttgttgagcctcttatgaacctactgaagtcatatgagggtgggagagaaagccatgcacattttgttgtcaagtctctttttgaggagtatcttaccgtggaagaacttttcagtgatggcattcagtctgacgtgattgaaaccttgcgtcatcagcacagtaaagacctgcagaaggttgtagacatcgtgctgtctcaccagggtgtgaggaacaaagctaagcttgtaacagcacttatggaaaagctggtttatccaaatcctggtgcgtacagggatctgttggttcgcttttcgtccctcaatcataaaagatattataagttggcccttaaagcaagtgaacttcttgaacaaaccaaactaagtgaactctgttccagcattgcaagaagcctttcagatctggggatgcataagggagaaatgactattaaggatagcatggaagatttagtctctgccccattgcctgttgaagatgctcttatttctttgtttgattacagtgatccaactgttcagcagaaagtgattgtgacatacatatcacgattgtaccagcctcatcttgtgaaggatagcatccaaatgaaattcaaagaatctggtgctattgttttttgggaattttctgaagggcatgttgatactagaaatggacaaggggctattcttggtgggaagagatggggtgccatggtcgttctcagatcacttgaatctgcatcaacagccattatggctgcattaaaagattctgtacagtacaacaactctgaggtcaacacaatgcacattgtgttattgaatgctgaaactgaaagtaatataagtgggacaagtgatgaccaagctcaacataggatggaaaagcttaccaagatactgaaggatagtagtgttgcaagtgatctccaagctgctggtttgaaggttataagttgcattgttcaaagagatgcaggtcgcatgccaatgcgccacacattcctctggtttgatgaaaagaactgttatgaagaagagcatattctccggcatgtggagcctcccctctctgcacttcttgaattgggtaagttgaaagtgaaaggatacaacgaaatgaagtatactccatcacgtgatcgtcaatggcatatctacacactaagaaatactgaaaaccccaaaatgttgcatagggtatttttccgaactattgtcaggcaacccaatgcaggcaacaagtttacgtcggcacaggtcagcgacactggattaggatgtcctgaagaatctctgtcatttacatcgaatagcatcttaagatcactgatgactgctatagaagaattagagcttcatgcgattaggacaggtcattctcacatgtttttgtgcatactgaaagaacaaaagcttcttgatctcgtcccattttcagggagtacaattgttgacgttggccaagatgaagctactgcttgttcacttttaagatcaatggctttgaagatacatgaacttgttggtgcaaggatgcatcatctttctgtatgccagtgggaggtgaaactcaagttggactgtgatggacctgcaagtggtacctggagagtcgtaactacaaatgtcactagtcacacctgcaccattgatatctaccgagaagtggaagatacagaatcgcagaagttactataccattcagctacttcgtcagctggtccaatgcatggtgttgcactgaataatccttatcaacctttgagtgtgattgatctaaagcgctgctctgctaggaacaacagaacaacatattgctacgattttccgctggcatttgaaactgcactgcagaagtcatggcaatccaactgttctagtgttcctgaaggcagtgaaaatagtaaatcctacgtgaaatcaactgagctggtgtttgctgaaaaacatgggtcctggggcactcctataattcccatggaacgtcctgctgggctcaatgacattggtatggtcgcttggatcttggaaatgtcaacacctgaatttcccaatggcaggcagattattgttgtagcaaatgatattactttcagagctggatcattcggcccaagggaagatgcattttttgaagctgtcaccaacctggcttgcgaaaggaagcttccccttatatacttggcagcaaactctggtgctaggattggcatagctgatgaagtgaaatcttgcttccgtgttgggtggtctgatgaacgcagccctgaacgagggtttcagtacatctatctgactgaagaagactatgctcgtattagctcttctgttatagcacataagctgcagctagataatggtgaaattaggtggattattgactctgttgtgggcaaggaggatgggcttggtgttgagaacatacatggaagtgctgctattgccagtgcttattctagggcatatgaggagacatttacacttacatttgtgactgggcggactgtaggaataggagcctatcttgctcgacttggtatacggtgcatacagcgccttgaccagcctattattttaacagggttttctgccctgaacaagctccttgggcgagaagtgtacagctcccacatgcagctgggtggtcctaagatcatggcgaccaatggtgttgtccacttgaccgtttcagatgatcttgaaggtgtttccaatatattgaggtggctcagctatgttcctgcaaacattggtggacctcttcctattaccaaacctttggaccctccagatagacctgtcgcatacatccctgagaacacatgcgatccgcgtgcagccatccgtggtgtagatgacagccaagggaaatggttgggtggtatgtttgacaaagacagctttgtggagacatttgaaggatgggcaaaaacagtggttactggcagagcaaagcttggaggaattcctgtgggtgttatagctgtggagacacagaccatgatgcagctcatccctgctgatccaggtcaacttgattcccatgagcgatctgttcctcgggctggacaagtgtggttcccagattctgcaaccaagacagctcaggcattattagacttcaaccgtgaaggattgcctctgttcatcctggctaactggagaggcttttctgggggacagagagatctctttgaaggtattcttcaggctgggtcagcaattgttgagaaccttaggacatataatcagcctgcgtttgtctacattcctatggctggagagcttcgtggaggagcttgggttgtgatcgatagcaaaataaatccagaccgcattgagtgttatgctgagaggactgccaaaggtaatgtgctcgaacctcaagggttaattgaaattaagttcaggtcagaggaactccaagactgtatgggcaggcttgacccagagttgataaatctgaaagcaaaacttcaagatgcaaagcatggaaatggaagtctaccagacatagaatcgcttcagaagagtatagaagcgcgtacaaaacagttgttacctttatatacccagattgcagtacgctttgctgaattgcatgatacttccctgagaatggcagctaaaggcgtgattaagaaagttgtagactgggaagaatcacgctctttcttctataaaaggctacggaggaggatctctgaagatcttcttgcaaaagaaataagacgaataattggtgacaacttcacgcaccaatcggcgatggagcttatcaatgaatggtacctggcttctcaggccacaacaggaagcactgctggatgggatgatgatgatgcttttgttgcctggaaggacagtcctgaaaactacaagggatatatccaagagctaagggctcaaaaagtatctcagtcgctctctgatcttgctgactccagttcagatctacaagcattctcgcagggtctttctacactattagataagatggatccttctcagagagtgaagtttgttcaggaagtcaagaaggttcttggatgatgatatgataccaacacatccaacacaatatgcgcatgctacatgttatttttcaagtacatacatagaaggatattgcttggccttgattgatcatgtctgatctaagtcgatcattattttcttgaaacttcctttcggacgtggtgctatggttgatgaatttggatgtgtgcgttctgccaggtgtaagcccaaaggtttatacagaccgagttaaggttaggaagagcacgagtgaacttgttctggttttgcagtggttaaggcagaaagttgtttcactgtagttctgagatgtattaccagcggcgctgtaattttagggtgtataatgcggatgctagtaaacaattgagtggttcattaaattttgaactcgaataatatgtttctgtaggcacatgtgacgtaccactacatgaaataaatgtcgctgaactagggcaccagagttttggtaggactaaggttttgtttggttatgggataaggtgagcatctccagcgttcccaaacttgaatttcccaataaatttctaatgcgacgggctagacaaaaagcttgttgagccggctcggtagctttggttaagaaatgctttgtt

SEQ ID NO: 14141 - DNA, 7710 bp, Zea Mays
ggtatatccgcctccgcccggcgcctccctctgcctcctctgctccgccctgccgccgcaaggatccaaaccccgaattttgctctctttttatggcactgtgcttttgagaaggcctttaattgtgctgtctgggccacggaacggcaatgtcgcagcttggattagctgcaactgcctcgaaggccttgccactactccctaatcgccagagaagtccagctgggactacatttccatcatctgcattgccgaggccctcaaaccgaaggaaaagccatactcgttcacttcgtgatggtggaaatgaggtatcagatgccaaaaagcacagccagtcagttcgtcaaggtcttgctggcattatcgacatcccaagtgacgcagtttcggaagtcgatatttcacatggacctaaggatcctagggggccaacagattcctatcaaatgaatgggattatcaatgaaacacataatggaagacatgcctcagggtccatggttgttgaattttgtgcagcactaggtggcaaaacaccaattcacagtatattagtggccaacaatggaatggcggcaacaaagttcatgaggagtgtccgtacatgggctaatgatacttttggatctgagaaggcaattcatctcatagctatggcaactccggaagacatgaggataaatgcagaacacatcagacttgctgatcaattcgtagaggtgcctggtggaacaaacaataataactatgccaacgttcaactcatagtggagatagcagaaagagtaggtgtttctgctgtttggcctggttggggtcatgcttctgagaatcctgagctgccggatgcattgaccgcaaaaggaatcgtttttcttgggccaccagcaacatcaatgaatgcattgggagataaggttggttcagctctcattgctcaagcagccggggtcccaactcttgcttggagtggatcgcatgttgaagttccattagagtgctgcttagacgcgatacctgaggagatgtatagaaaagcttgtgttactaccacagaggaggcagttgcaagttgtcaagtggttggttatcctgccatgattaaggcatcctggggaggtggtggtaaaggaataagaaaggttcataatgatgatgaggttagagcgctgtttaagcaagtacaaggtgaagtccctggctccccaatatttatcatgaggcttgcatcccagagtcggcatcttgaagttcagttgctttgtgatcaatatggcaatgtagcagcacttcacagtcgtgattgcagtgtacaacggcgacaccagaagattattgaagaaggcccagttactgttgctcctcgtgaaacagttaaagcacttgagcaggcagcaaggaggcttgctaaggctgtgggttatgttggtgcggctactgttgagtatctttacagcatggagactggagaatactattttctggagcttaatccccgactacaggttgagcatccagtcactgagtggatagctgaagtaaatctgcctgcagctcaagttgcagttggaatgggcatacctctttggcagattccagaaatcagacgtttttatggaatggactatggaggagggtatgacatttggaggaaaacagcagctcttgctgcaccatttaattttgatgaagtagattctctatggccaaagggccattgtgtagcagttagaattactagtgaggacccagatgatggtttcaaacctactggcgggaaagtgaaggagataagttttaaaagcaagcctaatgtttgggcctacttctcagtaaagtctggtggaggcattcatgaatttgctgattctcagtttggacatgtttttgcatatggactctctagaccagcagctataacaaacatgtctcttgcattaaaagagattcagattcgtggagaaattcattcaaatgttgattacacagttgacctcttaaacgcttcagacttcagagaaaacaagatccacactggttggctggatacaagaatagctatgcgtgttcaagctgagaggcccccatggtatatctcagtggttggaggtgctttatataaaacagtaaccaccaatgcagccactgtttctgaatatgttagttatctcaccaaaggccagattccaccaaagttaatttgaatatagaagggagcaaatacacaattgaaactgtcaggactgggcatggtaggtacaagttgcgaatgaatgattcaacagttgaggcgaatgtacaatctttatgtgatggtggcctcttaatgcagttggatggaaacagccatgtgatttatgcagaagaagaagctggcggtacacggcttcagattaatggaaagacatgcttgttgcagaatgaccatgatccatcaaagttattagctgagactccctgcaaacttcttcgctttttggttgctgatggtgctcatgttggtgcggatgtgccatatgcggaagttgaggttatgaagatgtgcatgcctctcttgtcacctgcttctggtgtcattcattgtatgatgtctgagggccaggcgttgcaggctggtgatcttatagcaaggctggatcttgatgacccttctgctgtgaaaagagctgaaccatttgatggaatgtttccactaatggacctccctgttgctgcctctagtcaagtacacaaaagatatgctgcaagtttgaatgctgctcgaatggtccttgcaggatatgagcacaatatcaatgaagtcgttcaagatttggtatgctgcctggacaatcctgagcttccttttctacagtgggatgaactaatgtctgttctagcaacgaggcttccaagaaatctcaagagtgagttagaggataaatacaaggaatacaagttgaatttttaccatgggaaaaacaaggacttcccatccaagttgctaagagacatcgtcgaggaaaatcttgcatatggttcagagaaggaaaaggctacaaatgagcgacttgttgagcctcttatgaacctactgaagtcatatgagggtgggagagaaagccatgcacattttgttgtcaagtctctttttgaggagtatcttaccgtggaagaacttttcagtgatggcattcagtctgacgtgattgaaaccttgcgtcatcagcacagtaaagacctgcagaaggttgtagacatcgtgctgtctcaccagggtgtgaggaacaaagctaagcttgtaacagcacttatggaaaagctggtttatccaaatcctggtgcgtacagggatctgttggttcgcttttcgtccctcaatcataaaagatattataagttggcccttaaagcaagtgaacttcttgaacaaaccaaactaagtgaactctgttccagcattgcaagaagcctttcagatctggggatgcataagggagaaatgactattaaggatagcatggaagatttagtctctgccccattgcctgttgaagatgctcttatttctttgtttgattacagtgatccaactgttcagcagaaagtgattgtgacatacatatcacgattgtaccagcctcatcttgtgaaggatagcatccaaatgaaattcaaagaatctggtgctattgttttttgggaattttctgaagggcatgttgatactagaaatggacaaggggctattcttggtgggaagagatggggtgccatggtcgttctcagatcacttgaatctgcatcaacagccattatggctgcattaaaagattctgtacagtacaacaactctgaggtcaacacaatgcacattgtgttattgaatgctgaaactgaaagtaatataagtgggacaagtgatgaccaagctcaacataggatggaaaagcttaccaagatactgaaggatagtagtgttgcaagtgatctccaagctgctggtttgaaggttataagttgcattgttcaaagagatgcaggtcgcatgccaatgcgccacacattcctctggtttgatgaaaagaactgttatgaagaagagcatattctccggcatgtggagcctcccctctctgcacttcttgaattgggtaagttgaaagtgaaaggatacaacgaaatgaagtatactccatcacgtgatcgtcaatggcatatctacacactaagaaatactgaaaaccccaaaatgttgcatagggtatttttccgaactattgtcaggcaacccaatgcaggcaacaagtttacgtcggcacaggtcagcgacactggattaggatgtcctgaagaatctctgtcatttacatcgaatagcatcttaagatcactgatgactgctatagaagaattagagcttcatgcgattaggacaggtcattctcacatgtttttgtgcatactgaaagaacaaaagcttcttgatctcgtcccattttcagggagtacaattgttgacgttggccaagatgaagctactgcttgttcacttttaagatcaatggctttgaagatacatgaacttgttggtgcaaggatgcatcatctttctgtatgccagtgggaggtgaaactcaagttggactgtgatggacctgcaagtggtacctggagagtcgtaactacaaatgtcactagtcacacctgcaccattgatatctaccgagaagtggaagatacagaatcgcagaagttactataccattcagctacttcgtcagctggtccaatgcatggtgttgcactgaataatccttatcaacctttgagtgtgattgatctaaagcgctgctctgctaggaacaacagaacaacatattgctacgattttccgctggcatttgaaactgcactgcagaagtcatggcaatccaactgttctagtgttcctgaaggcagtgaaaatagtaaatcctacgtgaaatcaactgagctggtgtttgctgaaaaacatgggtcctggggcactcctataattcccatggaacgtcctgctgggctcaatgacattggtatggtcgcttggatcttggaaatgtcaacacctgaatttcccaatggcaggcagattattgttgtagcaaatgatattactttcagagctggatcattcggcccaagggaagatgcattttttgaagctgtcaccaacctggcttgcgaaaggaagcttccccttatatacttggcagcaaactctggtgctaggattggcatagctgatgaagtgaaatcttgcttccgtgttgggtggtctgatgaacgcagccctgaacgagggtttcagtacatctatctgactgaagaagactatgctcgtattagctcttctgttatagcacataagctgcagctagataatggtgaaattaggtggattattgactctgttgtgggcaaggaggatgggcttggtgttgagaacatacatggaagtgctgctattgccagtgcttattctagggcatatgaggagacatttacacttacatttgtgactgggcggactgtaggaataggagcctatcttgctcgacttggtatacggtgcatacagcgccttgaccagcctattattttaacagggttttctgccctgaacaagctccttgggcgagaagtgtacagctcccacatgcagctgggtggtcctaagatcatggcgaccaatggtgttgtccacttgaccgtttcagatgatcttgaaggtgtttccaatatattgaggtggctcagctatgttcctgcaaacattggtggacctcttcctattaccaaacctttggaccctccagatagacctgtcgcatacatccctgagaacacatgcgatccgcgtgcagccatccgtggtgtagatgacagccaagggaaatggttgggtggtatgtttgacaaagacagctttgtggagacatttgaaggatgggcaaaaacagtggttactggcagagcaaagcttggaggaattcctgtgggtgttatagctgtggagacacagaccatgatgcagctcatccctgctgatccaggtcaacttgattcccatgagcgatctgttcctcgggctggacaagtgtggttcccagattctgcaaccaagacagctcaggcattattagacttcaaccgtgaaggattgcctctgttcatcctggctaactggagaggcttttctgggggacagagagatctctttgaaggtattcttcaggctgggtcagcaattgttgagaaccttaggacatataatcagcctgcgtttgtctacattcctatggctggagagcttcgtggaggagcttgggttgtgatcgatagcaaaataaatccagaccgcattgagtgttatgctgagaggactgccaaaggtaatgtgctcgaacctcaagggttaattgaaattaagttcaggtcagaggaactccaagactgtatgggcaggcttgacccagagttgataaatctgaaagcaaaacttcaagatgcaaagcatggaaatggaagtctaccagacatagaatcgcttcagaagagtatagaagcgcgtacaaaacagttgttacctttatatacccagattgcagtacgctttgctgaattgcatgatacttccctgagaatggcagctaaaggcgtgattaagaaagttgtagactgggaagaatcacgctctttcttctataaaaggctacggaggaggatctctgaagatcttcttgcaaaagaaataagacgaataattggtgacaacttcacgcaccaatcggcgatggagcttatcaatgaatggtacctggcttctcaggccacaacaggaagcactgctggatgggatgatgatgatgcttttgttgcctggaaggacagtcctgaaaactacaagggatatatccaagagctaagggctcaaaaagtatctcagtcgctctctgatcttgctgactccagttcagatctacaagcattctcgcagggtctttctacactattagataagatggatccttctcagagagtgaagtttgttcaggaagtcaagaaggttcttggatgatgatatgataccaacacatccaacacaatatgcgcatgctacatgttatttttcaagtacatacatagaaggatattgcttggccttgattgatcatgtctgatctaagtcgatcattattttcttgaaacttcctttcggacgtggtgctatggttgatgaatttggatgtgtgcgttctgccaggtgtaagcccaaaggtttatacagaccgagttaaggttaggaagagcacgagtgaacttgttctggttttgcagtggttaaggcagaaagttgtttcactgtagttctgagatgtattaccagcggcgctgtaattttagggtgtataatgcggatgctagtaaacaattgagtggttcattaaattttgaactcgaataatatgtttctgtaggcacatgtgacgtaccactacatgaaataaatgtcgctgaactagggcaccagagttttggtaggactaaggttttgtttggttatgggataaggtgagcatctccagcgttcccaaacttgaatttcccaataaatttctaatgcgacgggctagacaaaaagcttgttgagccggctcggtagctttggttaagaaatgctttgtt

SEQ ID NO: 14142 - DNA, 7699 bp, Zea Mays
gtcgccttctccgccgcctttcttcccgagattttcaggaattttgctctctttttatggcactgtgcttttgagaaggcctttaattgtgctgtctgggccacggaacggcaatgtcgcagcttggattagctgcaactgcctcgaaggccttgccactactccctaatcgccagagaagtccagctgggactacatttccatcatctgcattgccgaggccctcaaaccgaaggaaaagccatactcgttcacttcgtgatggtggaaatgaggtatcagatgccaaaaagcacagccagtcagttcgtcaaggtcttgctggcattatcgacatcccaagtgacgcagtttcggaagtcgatatttcacatggacctaaggatcctagggggccaacagattcctatcaaatgaatgggattatcaatgaaacacataatggaagacatgcctcagggtccatggttgttgaattttgtgcagcactaggtggcaaaacaccaattcacagtatattagtggccaacaatggaatggcggcaacaaagttcatgaggagtgtccgtacatgggctaatgatacttttggatctgagaaggcaattcatctcatagctatggcaactccggaagacatgaggataaatgcagaacacatcagacttgctgatcaattcgtagaggtgcctggtggaacaaacaataataactatgccaacgttcaactcatagtggagatagcagaaagagtaggtgtttctgctgtttggcctggttggggtcatgcttctgagaatcctgagctgccggatgcattgaccgcaaaaggaatcgtttttcttgggccaccagcaacatcaatgaatgcattgggagataaggttggttcagctctcattgctcaagcagccggggtcccaactcttgcttggagtggatcgcatgttgaagttccattagagtgctgcttagacgcgatacctgaggagatgtatagaaaagcttgtgttactaccacagaggaggcagttgcaagttgtcaagtggttggttatcctgccatgattaaggcatcctggggaggtggtggtaaaggaataagaaaggttcataatgatgatgaggttagagcgctgtttaagcaagtacaaggtgaagtccctggctccccaatatttatcatgaggcttgcatcccagagtcggcatcttgaagttcagttgctttgtgatcaatatggcaatgtagcagcacttcacagtcgtgattgcagtgtacaacggcgacaccagaagattattgaagaaggcccagttactgttgctcctcgtgaaacagttaaagcacttgagcaggcagcaaggaggcttgctaaggctgtgggttatgttggtgcggctactgttgagtatctttacagcatggagactggagaatactattttctggagcttaatccccgactacaggttgagcatccagtcactgagtggatagctgaagtaaatctgcctgcagctcaagttgcagttggaatgggcatacctctttggcagattccagaaatcagacgtttttatggaatggactatggaggagggtatgacatttggaggaaaacagcagctcttgctgcaccatttaattttgatgaagtagattctctatggccaaagggccattgtgtagcagttagaattactagtgaggacccagatgatggtttcaaacctactggcgggaaagtgaaggagataagttttaaaagcaagcctaatgtttgggcctacttctcagtaaagtctggtggaggcattcatgaatttgctgattctcagtttggacatgtttttgcatatggactctctagaccagcagctataacaaacatgtctcttgcattaaaagagattcagattcgtggagaaattcattcaaatgttgattacacagttgacctcttaaacgcttcagacttcagagaaaacaagatccacactggttggctggatacaagaatagctatgcgtgttcaagctgagaggcccccatggtatatctcagtggttggaggtgctttatataaaacagtaaccaccaatgcagccactgtttctgaatatgttagttatctcaccaaaggccagattccaccaaagcatatatcccttgtcaattcaacagttaatttgaatatagaagggagcaaatacacaattgaaactgtcaggactgggcatggtaggtacaagttgcgaatgaatgattcaacagttgaggcgaatgtacaatctttatgtgatggtggcctcttaatgcagttggatggaaacagccatgtgatttatgcagaagaagaagctggcggtacacggcttcagattaatggaaagacatgcttgttgcagaatgaccatgatccatcaaagttattagctgagactccctgcaaacttcttcgctttttggttgctgatggtgctcatgttggtgcggatgtgccatatgcggaagttgaggttatgaagatgtgcatgcctctcttgtcacctgcttctggtgtcattcattgtatgatgtctgagggccaggcgttgcaggctggtgatcttatagcaaggctggatcttgatgacccttctgctgtgaaaagagctgaaccatttgatggaatgtttccactaatggacctccctgttgctgcctctagtcaagtacacaaaagatatgctgcaagtttgaatgctgctcgaatggtccttgcaggatatgagcacaatatcaatgaagtcgttcaagatttggtatgctgcctggacaatcctgagcttccttttctacagtgggatgaactaatgtctgttctagcaacgaggcttccaagaaatctcaagagtgagttagaggataaatacaaggaatacaagttgaatttttaccatgggaaaaacaaggacttcccatccaagttgctaagagacatcgtcgaggaaaatcttgcatatggttcagagaaggaaaaggctacaaatgagcgacttgttgagcctcttatgaacctactgaagtcatatgagggtgggagagaaagccatgcacattttgttgtcaagtctctttttgaggagtatcttaccgtggaagaacttttcagtgatggcattcagtctgacgtgattgaaaccttgcgtcatcagcacagtaaagacctgcagaaggttgtagacatcgtgctgtctcaccagggtgtgaggaacaaagctaagcttgtaacagcacttatggaaaagctggtttatccaaatcctggtgcgtacagggatctgttggttcgcttttcgtccctcaatcataaaagatattataagttggcccttaaagcaagtgaacttcttgaacaaaccaaactaagtgaactctgttccagcattgcaagaagcctttcagatctggggatgcataagggagaaatgactattaaggatagcatggaagatttagtctctgccccattgcctgttgaagatgctcttatttctttgtttgattacagtgatccaactgttcagcagaaagtgattgtgacatacatatcacgattgtaccagcctcatcttgtgaaggatagcatccaaatgaaattcaaagaatctggtgctattgttttttgggaattttctgaagggcatgttgatactagaaatggacaaggggctattcttggtgggaagagatggggtgccatggtcgttctcagatcacttgaatctgcatcaacagccattatggctgcattaaaagattctgtacagtacaacaactctgaggtcaacacaatgcacattgtgttattgaatgctgaaactgaaagtaatataagtgggacaagtgatgaccaagctcaacataggatggaaaagcttaccaagatactgaaggatagtagtgttgcaagtgatctccaagctgctggtttgaaggttataagttgcattgttcaaagagatgcaggtcgcatgccaatgcgccacacattcctctggtttgatgaaaagaactgttatgaagaagagcatattctccggcatgtggagcctcccctctctgcacttcttgaattgggtaagttgaaagtgaaaggatacaacgaaatgaagtatactccatcacgtgatcgtcaatggcatatctacacactaagaaatactgaaaaccccaaaatgttgcatagggtatttttccgaactattgtcaggcaacccaatgcaggcaacaagtttacgtcggcacaggtcagcgacactggattaggatgtcctgaagaatctctgtcatttacatcgaatagcatcttaagatcactgatgactgctatagaagaattagagcttcatgcgattaggacaggtcattctcacatgtttttgtgcatactgaaagaacaaaagcttcttgatctcgtcccattttcagggagtacaattgttgacgttggccaagatgaagctactgcttgttcacttttaagatcaatggctttgaagatacatgaacttgttggtgcaaggatgcatcatctttctgtatgccagtgggaggtgaaactcaagttggactgtgatggacctgcaagtggtacctggagagtcgtaactacaaatgtcactagtcacacctgcaccattgatatctaccgagaagtggaagatacagaatcgcagaagttactataccattcagctacttcgtcagctggtccaatgcatggtgttgcactgaataatccttatcaacctttgagtgtgattgatctaaagcgctgctctgctaggaacaacagaacaacatattgctacgattttccgctggcatttgaaactgcactgcagaagtcatggcaatccaactgttctagtgttcctgaaggcagtgaaaatagtaaatcctacgtgaaatcaactgagctggtgtttgctgaaaaacatgggtcctggggcactcctataattcccatggaacgtcctgctgggctcaatgacattggtatggtcgcttggatcttggaaatgtcaacacctgaatttcccaatggcaggcagattattgttgtagcaaatgatattactttcagagctggatcattcggcccaagggaagatgcattttttgaagctgtcaccaacctggcttgcgaaaggaagcttccccttatatacttggcagcaaactctggtgctaggattggcatagctgatgaagtgaaatcttgcttccgtgttgggtggtctgatgaacgcagccctgaacgagggtttcagtacatctatctgactgaagaagactatgctcgtattagctcttctgttatagcacataagctgcagctagataatggtgaaattaggtggattattgactctgttgtgggcaaggaggatgggcttggtgttgagaacatacatggaagtgctgctattgccagtgcttattctagggcatatgaggagacatttacacttacatttgtgactgggcggactgtaggaataggagcctatcttgctcgacttggtatacggtgcatacagcgccttgaccagcctattattttaacagggttttctgccctgaacaagctccttgggcgagaagtgtacagctcccacatgcagctgggtggtcctaagatcatggcgaccaatggtgttgtccacttgaccgtttcagatgatcttgaaggtgtttccaatatattgaggtggctcagctatgttcctgcaaacattggtggacctcttcctattaccaaacctttggaccctccagatagacctgtcgcatacatccctgagaacacatgcgatccgcgtgcagccatccgtggtgtagatgacagccaagggaaatggttgggtggtatgtttgacaaagacagctttgtggagacatttgaaggatgggcaaaaacagtggttactggcagagcaaagcttggaggaattcctgtgggtgttatagctgtggagacacagaccatgatgcagctcatccctgctgatccaggtcaacttgattcccatgagcgatctgttcctcgggctggacaagtgtggttcccagattctgcaaccaagacagctcaggcattattagacttcaaccgtgaaggattgcctctgttcatcctggctaactggagaggcttttctgggggacagagagatctctttgaaggtattcttcaggctgggtcagcaattgttgagaaccttaggacatataatcagcctgcgtttgtctacattcctatggctggagagcttcgtggaggagcttgggttgtgatcgatagcaaaataaatccagaccgcattgagtgttatgctgagaggactgccaaaggtaatgtgctcgaacctcaagggttaattgaaattaagttcaggtcagaggaactccaagactgtatgggcaggcttgacccagagttgataaatctgaaagcaaaacttcaagatgcaaagcatggaaatggaagtctaccagacatagaatcgcttcagaagagtatagaagcgcgtacaaaacagttgttacctttatatacccagattgcagtacgctttgctgaattgcatgatacttccctgagaatggcagctaaaggcgtgattaagaaagttgtagactgggaagaatcacgctctttcttctataaaaggctacggaggaggatctctgaagatcttcttgcaaaagaaataagacgaataattggtgacaacttcacgcaccaatcggcgatggagcttatcaatgaatggtacctggcttctcaggccacaacaggaagcactgctggatgggatgatgatgatgcttttgttgcctggaaggacagtcctgaaaactacaagggatatatccaagagctaagggctcaaaaagtatctcagtcgctctctgatcttgctgactccagttcagatctacaagcattctcgcagggtctttctacactattagataagatggatccttctcagagagtgaagtttgttcaggaagtcaagaaggttcttggatgatgatatgataccaacacatccaacacaatatgcgcatgctacatgttatttttcaagtacatacatagaaggatattgcttggccttgattgatcatgtctgatctaagtcgatcattattttcttgaaacttcctttcggacgtggtgctatggttgatgaatttggatgtgtgcgttctgccaggtgtaagcccaaaggtttatacagaccgagttaaggttaggaagagcacgagtgaacttgttctggttttgcagtggttaaggcagaaagttgtttcactgtagttctgagatgtattaccagcggcgctgtaattttagggtgtataatgcggatgctagtaaacaattgagtggttcattaaattttgaactcgaataatatgtttctgtaggcacatgtgacgtaccactacatgaaataaatgtcgctgaactagggcaccagagttttggtaggactaaggttttgtttggttatgggataaggtgagcatctccagcgttcccaaacttgaatttcccaataaatttctaatgcgacgggctagacaaaaagcttgttgagccggctcggtagctttggttaagaaatgctttgtt

SEQ ID NO: 14143 - DNA, 7783 bp, Zea Mays
ccggctcgccccacgcgtcccgctatttattccgccggctcgtcgccagcgccgctccctctgtcgcggccgagtggagctcgtcagatccgcgcgccgcacgccgatctgcgccacctccggaattttgctctctttttatggcactgtgcttttgagaaggcctttaattgtgctgtctgggccacggaacggcaatgtcgcagcttggattagctgcaactgcctcgaaggccttgccactactccctaatcgccagagaagtccagctgggactacatttccatcatctgcattgccgaggccctcaaaccgaaggaaaagccatactcgttcacttcgtgatggtggaaatgaggtatcagatgccaaaaagcacagccagtcagttcgtcaaggtcttgctggcattatcgacatcccaagtgacgcagtttcggaagtcgatatttcacatggacctaaggatcctagggggccaacagattcctatcaaatgaatgggattatcaatgaaacacataatggaagacatgcctcagggtccatggttgttgaattttgtgcagcactaggtggcaaaacaccaattcacagtatattagtggccaacaatggaatggcggcaacaaagttcatgaggagtgtccgtacatgggctaatgatacttttggatctgagaaggcaattcatctcatagctatggcaactccggaagacatgaggataaatgcagaacacatcagacttgctgatcaattcgtagaggtgcctggtggaacaaacaataataactatgccaacgttcaactcatagtggagatagcagaaagagtaggtgtttctgctgtttggcctggttggggtcatgcttctgagaatcctgagctgccggatgcattgaccgcaaaaggaatcgtttttcttgggccaccagcaacatcaatgaatgcattgggagataaggttggttcagctctcattgctcaagcagccggggtcccaactcttgcttggagtggatcgcatgttgaagttccattagagtgctgcttagacgcgatacctgaggagatgtatagaaaagcttgtgttactaccacagaggaggcagttgcaagttgtcaagtggttggttatcctgccatgattaaggcatcctggggaggtggtggtaaaggaataagaaaggttcataatgatgatgaggttagagcgctgtttaagcaagtacaaggtgaagtccctggctccccaatatttatcatgaggcttgcatcccagagtcggcatcttgaagttcagttgctttgtgatcaatatggcaatgtagcagcacttcacagtcgtgattgcagtgtacaacggcgacaccagaagattattgaagaaggcccagttactgttgctcctcgtgaaacagttaaagcacttgagcaggcagcaaggaggcttgctaaggctgtgggttatgttggtgcggctactgttgagtatctttacagcatggagactggagaatactattttctggagcttaatccccgactacaggttgagcatccagtcactgagtggatagctgaagtaaatctgcctgcagctcaagttgcagttggaatgggcatacctctttggcagattccagaaatcagacgtttttatggaatggactatggaggagggtatgacatttggaggaaaacagcagctcttgctgcaccatttaattttgatgaagtagattctctatggccaaagggccattgtgtagcagttagaattactagtgaggacccagatgatggtttcaaacctactggcgggaaagtgaaggagataagttttaaaagcaagcctaatgtttgggcctacttctcagtaaagtctggtggaggcattcatgaatttgctgattctcagtttggacatgtttttgcatatggactctctagaccagcagctataacaaacatgtctcttgcattaaaagagattcagattcgtggagaaattcattcaaatgttgattacacagttgacctcttaaacgcttcagacttcagagaaaacaagatccacactggttggctggatacaagaatagctatgcgtgttcaagctgagaggcccccatggtatatctcagtggttggaggtgctttatataaaacagtaaccaccaatgcagccactgtttctgaatatgttagttatctcaccaaaggccagattccaccaaagcatatatcccttgtcaattcaacagttaatttgaatatagaagggagcaaatacacaattgaaactgtcaggactgggcatggtaggtacaagttgcgaatgaatgattcaacagttgaggcgaatgtacaatctttatgtgatggtggcctcttaatgcagttggatggaaacagccatgtgatttatgcagaagaagaagctggcggtacacggcttcagattaatggaaagacatgcttgttgcagaatgaccatgatccatcaaagttattagctgagactccctgcaaacttcttcgctttttggttgctgatggtgctcatgttggtgcggatgtgccatatgcggaagttgaggttatgaagatgtgcatgcctctcttgtcacctgcttctggtgtcattcattgtatgatgtctgagggccaggcgttgcaggctggtgatcttatagcaaggctggatcttgatgacccttctgctgtgaaaagagctgaaccatttgatggaatgtttccactaatggacctccctgttgctgcctctagtcaagtacacaaaagatatgctgcaagtttgaatgctgctcgaatggtccttgcaggatatgagcacaatatcaatgaagtcgttcaagatttggtatgctgcctggacaatcctgagcttccttttctacagtgggatgaactaatgtctgttctagcaacgaggcttccaagaaatctcaagagtgagttagaggataaatacaaggaatacaagttgaatttttaccatgggaaaaacaaggacttcccatccaagttgctaagagacatcgtcgaggaaaatcttgcatatggttcagagaaggaaaaggctacaaatgagcgacttgttgagcctcttatgaacctactgaagtcatatgagggtgggagagaaagccatgcacattttgttgtcaagtctctttttgaggagtatcttaccgtggaagaacttttcagtgatggcattcagtctgacgtgattgaaaccttgcgtcatcagcacagtaaagacctgcagaaggttgtagacatcgtgctgtctcaccagggtgtgaggaacaaagctaagcttgtaacagcacttatggaaaagctggtttatccaaatcctggtgcgtacagggatctgttggttcgcttttcgtccctcaatcataaaagatattataagttggcccttaaagcaagtgaacttcttgaacaaaccaaactaagtgaactctgttccagcattgcaagaagcctttcagatctggggatgcataagggagaaatgactattaaggatagcatggaagatttagtctctgccccattgcctgttgaagatgctcttatttctttgtttgattacagtgatccaactgttcagcagaaagtgattgtgacatacatatcacgattgtaccagcctcatcttgtgaaggatagcatccaaatgaaattcaaagaatctggtgctattgttttttgggaattttctgaagggcatgttgatactagaaatggacaaggggctattcttggtgggaagagatggggtgccatggtcgttctcagatcacttgaatctgcatcaacagccattatggctgcattaaaagattctgtacagtacaacaactctgaggtcaacacaatgcacattgtgttattgaatgctgaaactgaaagtaatataagtgggacaagtgatgaccaagctcaacataggatggaaaagcttaccaagatactgaaggatagtagtgttgcaagtgatctccaagctgctggtttgaaggttataagttgcattgttcaaagagatgcaggtcgcatgccaatgcgccacacattcctctggtttgatgaaaagaactgttatgaagaagagcatattctccggcatgtggagcctcccctctctgcacttcttgaattgggtaagttgaaagtgaaaggatacaacgaaatgaagtatactccatcacgtgatcgtcaatggcatatctacacactaagaaatactgaaaaccccaaaatgttgcatagggtatttttccgaactattgtcaggcaacccaatgcaggcaacaagtttacgtcggcacaggtcagcgacactggattaggatgtcctgaagaatctctgtcatttacatcgaatagcatcttaagatcactgatgactgctatagaagaattagagcttcatgcgattaggacaggtcattctcacatgtttttgtgcatactgaaagaacaaaagcttcttgatctcgtcccattttcagggagtacaattgttgacgttggccaagatgaagctactgcttgttcacttttaagatcaatggctttgaagatacatgaacttgttggtgcaaggatgcatcatctttctgtatgccagtgggaggtgaaactcaagttggactgtgatggacctgcaagtggtacctggagagtcgtaactacaaatgtcactagtcacacctgcaccattgatatctaccgagaagtggaagatacagaatcgcagaagttactataccattcagctacttcgtcagctggtccaatgcatggtgttgcactgaataatccttatcaacctttgagtgtgattgatctaaagcgctgctctgctaggaacaacagaacaacatattgctacgattttccgctggcatttgaaactgcactgcagaagtcatggcaatccaactgttctagtgttcctgaaggcagtgaaaatagtaaatcctacgtgaaatcaactgagctggtgtttgctgaaaaacatgggtcctggggcactcctataattcccatggaacgtcctgctgggctcaatgacattggtatggtcgcttggatcttggaaatgtcaacacctgaatttcccaatggcaggcagattattgttgtagcaaatgatattactttcagagctggatcattcggcccaagggaagatgcattttttgaagctgtcaccaacctggcttgcgaaaggaagcttccccttatatacttggcagcaaactctggtgctaggattggcatagctgatgaagtgaaatcttgcttccgtgttgggtggtctgatgaacgcagccctgaacgagggtttcagtacatctatctgactgaagaagactatgctcgtattagctcttctgttatagcacataagctgcagctagataatggtgaaattaggtggattattgactctgttgtgggcaaggaggatgggcttggtgttgagaacatacatggaagtgctgctattgccagtgcttattctagggcatatgaggagacatttacacttacatttgtgactgggcggactgtaggaataggagcctatcttgctcgacttggtatacggtgcatacagcgccttgaccagcctattattttaacagggttttctgccctgaacaagctccttgggcgagaagtgtacagctcccacatgcagctgggtggtcctaagatcatggcgaccaatggtgttgtccacttgaccgtttcagatgatcttgaaggtgtttccaatatattgaggtggctcagctatgttcctgcaaacattggtggacctcttcctattaccaaacctttggaccctccagatagacctgtcgcatacatccctgagaacacatgcgatccgcgtgcagccatccgtggtgtagatgacagccaagggaaatggttgggtggtatgtttgacaaagacagctttgtggagacatttgaaggatgggcaaaaacagtggttactggcagagcaaagcttggaggaattcctgtgggtgttatagctgtggagacacagaccatgatgcagctcatccctgctgatccaggtcaacttgattcccatgagcgatctgttcctcgggctggacaagtgtggttcccagattctgcaaccaagacagctcaggcattattagacttcaaccgtgaaggattgcctctgttcatcctggctaactggagaggcttttctgggggacagagagatctctttgaaggtattcttcaggctgggtcagcaattgttgagaaccttaggacatataatcagcctgcgtttgtctacattcctatggctggagagcttcgtggaggagcttgggttgtgatcgatagcaaaataaatccagaccgcattgagtgttatgctgagaggactgccaaaggtaatgtgctcgaacctcaagggttaattgaaattaagttcaggtcagaggaactccaagactgtatgggcaggcttgacccagagttgataaatctgaaagcaaaacttcaagatgcaaagcatggaaatggaagtctaccagacatagaatcgcttcagaagagtatagaagcgcgtacaaaacagttgttacctttatatacccagattgcagtacgctttgctgaattgcatgatacttccctgagaatggcagctaaaggcgtgattaagaaagttgtagactgggaagaatcacgctctttcttctataaaaggctacggaggaggatctctgaagatcttcttgcaaaagaaataagacgaataattggtgacaacttcacgcaccaatcggcgatggagcttatcaatgaatggtacctggcttctcaggccacaacaggaagcactgctggatgggatgatgatgatgcttttgttgcctggaaggacagtcctgaaaactacaagggatatatccaagagctaagggctcaaaaagtatctcagtcgctctctgatcttgctgactccagttcagatctacaagcattctcgcagggtctttctacactattagataagatggatccttctcagagagtgaagtttgttcaggaagtcaagaaggttcttggatgatgatatgataccaacacatccaacacaatatgcgcatgctacatgttatttttcaagtacatacatagaaggatattgcttggccttgattgatcatgtctgatctaagtcgatcattattttcttgaaacttcctttcggacgtggtgctatggttgatgaatttggatgtgtgcgttctgccaggtgtaagcccaaaggtttatacagaccgagttaaggttaggaagagcacgagtgaacttgttctggttttgcagtggttaaggcagaaagttgtttcactgtagttctgagatgtattaccagcggcgctgtaattttagggtgtataatgcggatgctagtaaacaattgagtggttcattaaattttgaactcgaataatatgtttctgtaggcacatgtgacgtaccactacatgaaataaatgtcgctgaactagggcaccagagttttggtaggactaaggttttgtttggttatgggataaggtgagcatctccagcgttcccaaacttgaatttcccaataaatttctaatgcgacgggctagacaaaaagcttgttgagccggctcggtagctttggttaagaaatgctttgtt

SEQ ID NO: 14144 - DNA, 7733 bp, Zea Mays
ctctgtcgcggccgagtggagctcgtcagatccgcgcgccgcacgccgatctgcgccacctccgattttcaggaattttgctctctttttatggcactgtgcttttgagaaggcctttaattgtgctgtctgggccacggaacggcaatgtcgcagcttggattagctgcaactgcctcgaaggccttgccactactccctaatcgccagagaagtccagctgggactacatttccatcatctgcattgccgaggccctcaaaccgaaggaaaagccatactcgttcacttcgtgatggtggaaatgaggtatcagatgccaaaaagcacagccagtcagttcgtcaaggtcttgctggcattatcgacatcccaagtgacgcagtttcggaagtcgatatttcacatggacctaaggatcctagggggccaacagattcctatcaaatgaatgggattatcaatgaaacacataatggaagacatgcctcagggtccatggttgttgaattttgtgcagcactaggtggcaaaacaccaattcacagtatattagtggccaacaatggaatggcggcaacaaagttcatgaggagtgtccgtacatgggctaatgatacttttggatctgagaaggcaattcatctcatagctatggcaactccggaagacatgaggataaatgcagaacacatcagacttgctgatcaattcgtagaggtgcctggtggaacaaacaataataactatgccaacgttcaactcatagtggagatagcagaaagagtaggtgtttctgctgtttggcctggttggggtcatgcttctgagaatcctgagctgccggatgcattgaccgcaaaaggaatcgtttttcttgggccaccagcaacatcaatgaatgcattgggagataaggttggttcagctctcattgctcaagcagccggggtcccaactcttgcttggagtggatcgcatgttgaagttccattagagtgctgcttagacgcgatacctgaggagatgtatagaaaagcttgtgttactaccacagaggaggcagttgcaagttgtcaagtggttggttatcctgccatgattaaggcatcctggggaggtggtggtaaaggaataagaaaggttcataatgatgatgaggttagagcgctgtttaagcaagtacaaggtgaagtccctggctccccaatatttatcatgaggcttgcatcccagagtcggcatcttgaagttcagttgctttgtgatcaatatggcaatgtagcagcacttcacagtcgtgattgcagtgtacaacggcgacaccagaagattattgaagaaggcccagttactgttgctcctcgtgaaacagttaaagcacttgagcaggcagcaaggaggcttgctaaggctgtgggttatgttggtgcggctactgttgagtatctttacagcatggagactggagaatactattttctggagcttaatccccgactacaggttgagcatccagtcactgagtggatagctgaagtaaatctgcctgcagctcaagttgcagttggaatgggcatacctctttggcagattccagaaatcagacgtttttatggaatggactatggaggagggtatgacatttggaggaaaacagcagctcttgctgcaccatttaattttgatgaagtagattctctatggccaaagggccattgtgtagcagttagaattactagtgaggacccagatgatggtttcaaacctactggcgggaaagtgaaggagataagttttaaaagcaagcctaatgtttgggcctacttctcagtaaagtctggtggaggcattcatgaatttgctgattctcagtttggacatgtttttgcatatggactctctagaccagcagctataacaaacatgtctcttgcattaaaagagattcagattcgtggagaaattcattcaaatgttgattacacagttgacctcttaaacgcttcagacttcagagaaaacaagatccacactggttggctggatacaagaatagctatgcgtgttcaagctgagaggcccccatggtatatctcagtggttggaggtgctttatataaaacagtaaccaccaatgcagccactgtttctgaatatgttagttatctcaccaaaggccagattccaccaaagcatatatcccttgtcaattcaacagttaatttgaatatagaagggagcaaatacacaattgaaactgtcaggactgggcatggtaggtacaagttgcgaatgaatgattcaacagttgaggcgaatgtacaatctttatgtgatggtggcctcttaatgcagttggatggaaacagccatgtgatttatgcagaagaagaagctggcggtacacggcttcagattaatggaaagacatgcttgttgcagaatgaccatgatccatcaaagttattagctgagactccctgcaaacttcttcgctttttggttgctgatggtgctcatgttggtgcggatgtgccatatgcggaagttgaggttatgaagatgtgcatgcctctcttgtcacctgcttctggtgtcattcattgtatgatgtctgagggccaggcgttgcaggctggtgatcttatagcaaggctggatcttgatgacccttctgctgtgaaaagagctgaaccatttgatggaatgtttccactaatggacctccctgttgctgcctctagtcaagtacacaaaagatatgctgcaagtttgaatgctgctcgaatggtccttgcaggatatgagcacaatatcaatgaagtcgttcaagatttggtatgctgcctggacaatcctgagcttccttttctacagtgggatgaactaatgtctgttctagcaacgaggcttccaagaaatctcaagagtgagttagaggataaatacaaggaatacaagttgaatttttaccatgggaaaaacaaggacttcccatccaagttgctaagagacatcgtcgaggaaaatcttgcatatggttcagagaaggaaaaggctacaaatgagcgacttgttgagcctcttatgaacctactgaagtcatatgagggtgggagagaaagccatgcacattttgttgtcaagtctctttttgaggagtatcttaccgtggaagaacttttcagtgatggcattcagtctgacgtgattgaaaccttgcgtcatcagcacagtaaagacctgcagaaggttgtagacatcgtgctgtctcaccagggtgtgaggaacaaagctaagcttgtaacagcacttatggaaaagctggtttatccaaatcctggtgcgtacagggatctgttggttcgcttttcgtccctcaatcataaaagatattataagttggcccttaaagcaagtgaacttcttgaacaaaccaaactaagtgaactctgttccagcattgcaagaagcctttcagatctggggatgcataagggagaaatgactattaaggatagcatggaagatttagtctctgccccattgcctgttgaagatgctcttatttctttgtttgattacagtgatccaactgttcagcagaaagtgattgtgacatacatatcacgattgtaccagcctcatcttgtgaaggatagcatccaaatgaaattcaaagaatctggtgctattgttttttgggaattttctgaagggcatgttgatactagaaatggacaaggggctattcttggtgggaagagatggggtgccatggtcgttctcagatcacttgaatctgcatcaacagccattatggctgcattaaaagattctgtacagtacaacaactctgaggtcaacacaatgcacattgtgttattgaatgctgaaactgaaagtaatataagtgggacaagtgatgaccaagctcaacataggatggaaaagcttaccaagatactgaaggatagtagtgttgcaagtgatctccaagctgctggtttgaaggttataagttgcattgttcaaagagatgcaggtcgcatgccaatgcgccacacattcctctggtttgatgaaaagaactgttatgaagaagagcatattctccggcatgtggagcctcccctctctgcacttcttgaattgggtaagttgaaagtgaaaggatacaacgaaatgaagtatactccatcacgtgatcgtcaatggcatatctacacactaagaaatactgaaaaccccaaaatgttgcatagggtatttttccgaactattgtcaggcaacccaatgcaggcaacaagtttacgtcggcacaggtcagcgacactggattaggatgtcctgaagaatctctgtcatttacatcgaatagcatcttaagatcactgatgactgctatagaagaattagagcttcatgcgattaggacaggtcattctcacatgtttttgtgcatactgaaagaacaaaagcttcttgatctcgtcccattttcagggagtacaattgttgacgttggccaagatgaagctactgcttgttcacttttaagatcaatggctttgaagatacatgaacttgttggtgcaaggatgcatcatctttctgtatgccagtgggaggtgaaactcaagttggactgtgatggacctgcaagtggtacctggagagtcgtaactacaaatgtcactagtcacacctgcaccattgatatctaccgagaagtggaagatacagaatcgcagaagttactataccattcagctacttcgtcagctggtccaatgcatggtgttgcactgaataatccttatcaacctttgagtgtgattgatctaaagcgctgctctgctaggaacaacagaacaacatattgctacgattttccgctggcatttgaaactgcactgcagaagtcatggcaatccaactgttctagtgttcctgaaggcagtgaaaatagtaaatcctacgtgaaatcaactgagctggtgtttgctgaaaaacatgggtcctggggcactcctataattcccatggaacgtcctgctgggctcaatgacattggtatggtcgcttggatcttggaaatgtcaacacctgaatttcccaatggcaggcagattattgttgtagcaaatgatattactttcagagctggatcattcggcccaagggaagatgcattttttgaagctgtcaccaacctggcttgcgaaaggaagcttccccttatatacttggcagcaaactctggtgctaggattggcatagctgatgaagtgaaatcttgcttccgtgttgggtggtctgatgaacgcagccctgaacgagggtttcagtacatctatctgactgaagaagactatgctcgtattagctcttctgttatagcacataagctgcagctagataatggtgaaattaggtggattattgactctgttgtgggcaaggaggatgggcttggtgttgagaacatacatggaagtgctgctattgccagtgcttattctagggcatatgaggagacatttacacttacatttgtgactgggcggactgtaggaataggagcctatcttgctcgacttggtatacggtgcatacagcgccttgaccagcctattattttaacagggttttctgccctgaacaagctccttgggcgagaagtgtacagctcccacatgcagctgggtggtcctaagatcatggcgaccaatggtgttgtccacttgaccgtttcagatgatcttgaaggtgtttccaatatattgaggtggctcagctatgttcctgcaaacattggtggacctcttcctattaccaaacctttggaccctccagatagacctgtcgcatacatccctgagaacacatgcgatccgcgtgcagccatccgtggtgtagatgacagccaagggaaatggttgggtggtatgtttgacaaagacagctttgtggagacatttgaaggatgggcaaaaacagtggttactggcagagcaaagcttggaggaattcctgtgggtgttatagctgtggagacacagaccatgatgcagctcatccctgctgatccaggtcaacttgattcccatgagcgatctgttcctcgggctggacaagtgtggttcccagattctgcaaccaagacagctcaggcattattagacttcaaccgtgaaggattgcctctgttcatcctggctaactggagaggcttttctgggggacagagagatctctttgaaggtattcttcaggctgggtcagcaattgttgagaaccttaggacatataatcagcctgcgtttgtctacattcctatggctggagagcttcgtggaggagcttgggttgtgatcgatagcaaaataaatccagaccgcattgagtgttatgctgagaggactgccaaaggtaatgtgctcgaacctcaagggttaattgaaattaagttcaggtcagaggaactccaagactgtatgggcaggcttgacccagagttgataaatctgaaagcaaaacttcaagatgcaaagcatggaaatggaagtctaccagacatagaatcgcttcagaagagtatagaagcgcgtacaaaacagttgttacctttatatacccagattgcagtacgctttgctgaattgcatgatacttccctgagaatggcagctaaaggcgtgattaagaaagttgtagactgggaagaatcacgctctttcttctataaaaggctacggaggaggatctctgaagatcttcttgcaaaagaaataagacgaataattggtgacaacttcacgcaccaatcggcgatggagcttatcaatgaatggtacctggcttctcaggccacaacaggaagcactgctggatgggatgatgatgatgcttttgttgcctggaaggacagtcctgaaaactacaagggatatatccaagagctaagggctcaaaaagtatctcagtcgctctctgatcttgctgactccagttcagatctacaagcattctcgcagggtctttctacactattagataagatggatccttctcagagagtgaagtttgttcaggaagtcaagaaggttcttggatgatgatatgataccaacacatccaacacaatatgcgcatgctacatgttatttttcaagtacatacatagaaggatattgcttggccttgattgatcatgtctgatctaagtcgatcattattttcttgaaacttcctttcggacgtggtgctatggttgatgaatttggatgtgtgcgttctgccaggtgtaagcccaaaggtttatacagaccgagttaaggttaggaagagcacgagtgaacttgttctggttttgcagtggttaaggcagaaagttgtttcactgtagttctgagatgtattaccagcggcgctgtaattttagggtgtataatgcggatgctagtaaacaattgagtggttcattaaattttgaactcgaataatatgtttctgtaggcacatgtgacgtaccactacatgaaataaatgtcgctgaactagggcaccagagttttggtaggactaaggttttgtttggttatgggataaggtgagcatctccagcgttcccaaacttgaatttcccaataaatttctaatgcgacgggctagacaaaaagcttgttgagccggctcggtagctttggttaagaaatgctttgtt

SEQ ID NO: 14145 - DNA, 5562 bp, Zea Mays
ctctgtcgcggccgagtggagctcgtcagatccgcgcgccgcacgccgatctgcgccacctccggaattttgctctctttttatggcactgtgcttttgagaaggcctttaattgtgctgtctgggccacggaacggcaatgtcgcagcttggattagctgcaactgcctcgaaggccttgccactactccctaatcgccagagaagtccagctgggactacatttccatcatctgcattgccgaggccctcaaaccgaaggaaaagccatactcgttcacttcgtgatggtggaaatgaggtatcagatgccaaaaagcacagccagtcagttcgtcaaggtcttgctggcattatcgacatcccaagtgacgcagtttcggaagtcgatatttcacatggacctaaggatcctagggggccaacagattcctatcaaatgaatgggattatcaatgaaacacataatggaagacatgcctcagggtccatggttgttgaattttgtgcagcactaggtggcaaaacaccaattcacagtatattagtggccaacaatggaatggcggcaacaaagttcatgaggagtgtccgtacatgggctaatgatacttttggatctgagaaggcaattcatctcatagctatggcaactccggaagacatgaggataaatgcagaacacatcagacttgctgatcaattcgtagaggtgcctggtggaacaaacaataataactatgccaacgttcaactcatagtggagatagcagaaagagtaggtgtttctgctgtttggcctggttggggtcatgcttctgagaatcctgagctgccggatgcattgaccgcaaaaggaatcgtttttcttgggccaccagcaacatcaatgaatgcattgggagataaggttggttcagctctcattgctcaagcagccggggtcccaactcttgcttggagtggatcgcatgttgaagttccattagagtgctgcttagacgcgatacctgaggagatgtatagaaaagcttgtgttactaccacagaggaggcagttgcaagttgtcaagtggttggttatcctgccatgattaaggcatcctggggaggtggtggtaaaggaataagaaaggttcataatgatgatgaggttagagcgctgtttaagcaagtacaaggtgaagtccctggctccccaatatttatcatgaggcttgcatcccagagtcggcatcttgaagttcagttgctttgtgatcaatatggcaatgtagcagcacttcacagtcgtgattgcagtgtacaacggcgacaccagaagattattgaagaaggcccagttactgttgctcctcgtgaaacagttaaagcacttgagcaggcagcaaggaggcttgctaaggctgtgggttatgttggtgcggctactgttgagtatctttacagcatggagactggagaatactattttctggagcttaatccccgactacaggttgagcatccagtcactgagtggatagctgaagtaaatctgcctgcagctcaagttgcagttggaatgggcatacctctttggcagattccagaaatcagacgtttttatggaatggactatggaggagggtatgacatttggaggaaaacagcagctcttgctgcaccatttaattttgatgaagtagattctctatggccaaagggccattgtgtagcagttagaattactagtgaggacccagatgatggtttcaaacctactggcgggaaagtgaaggagataagttttaaaagcaagcctaatgtttgggcctacttctcagtaaagtctggtggaggcattcatgaatttgctgattctcagtttggacatgtttttgcatatggactctctagaccagcagctataacaaacatgtctcttgcattaaaagagattcagattcgtggagaaattcattcaaatgttgattacacagttgacctcttaaacgcttcagacttcagagaaaacaagatccacactggttggctggatacaagaatagctatgcgtgttcaagctgagaggcccccatggtatatctcagtggttggaggtgctttatataaaacagtaaccaccaatgcagccactgtttctgaatatgttagttatctcaccaaaggccagattccaccaaagcatatatcccttgtcaattcaacagttaatttgaatatagaagggagcaaatacacaattgaaactgtcaggactgggcatggtaggtacaagttgcgaatgaatgattcaacagttgaggcgaatgtacaatctttatgtgatggtggcctcttaatgcagttggatggaaacagccatgtgatttatgcagaagaagaagctggcggtacacggcttcagattaatggaaagacatgcttgttgcagaatgaccatgatccatcaaagttattagctgagactccctgcaaacttcttcgctttttggttgctgatggtgctcatgttggtgcggatgtgccatatgcggaagttgaggttatgaagatgtgcatgcctctcttgtcacctgcttctggtgtcattcattgtatgatgtctgagggccaggcgttgcaggctggtgatcttatagcaaggctggatcttgatgacccttctgctgtgaaaagagctgaaccatttgatggaatgtttccactaatggacctccctgttgctgcctctagtcaagtacacaaaagatatgctgcaagtttgaatgctgctcgaatggtccttgcaggatatgagcacaatatcaatgaagtcgttcaagatttggtatgctgcctggacaatcctgagcttccttttctacagtgggatgaactaatgtctgttctagcaacgaggcttccaagaaatctcaagagtgagttagaggataaatacaaggaatacaagttgaatttttaccatgggaaaaacaaggacttcccatccaagttgctaagagacatcgtcgaggaaaatcttgcatatggttcagagaaggaaaaggctacaaatgagcgacttgttgagcctcttatgaacctactgaagtcatatgagggtgggagagaaagccatgcacattttgttgtcaagtctctttttgaggagtatcttaccgtggaagaacttttcagtgatggcattcagtctgacgtgattgaaaccttgcgtcatcagcacagtaaagacctgcagaaggttgtagacatcgtgctgtctcaccagggtgtgaggaacaaagctaagcttgtaacagcacttatggaaaagctggtttatccaaatcctggtgcgtacagggatctgttggttcgcttttcgtccctcaatcataaaagatattataagttggcccttaaagcaagtgaacttcttgaacaaaccaaactaagtgaactctgttccagcattgcaagaagcctttcagatctggggatgcataagggagaaatgactattaaggatagcatggaagatttagtctctgccccattgcctgttgaagatgctcttatttctttgtttgattacagtgatccaactgttcagcagaaagtgattgtgacatacatatcacgattgtaccagcctcatcttgtgaaggatagcatccaaatgaaattcaaagaatctggtgctattgttttttgggaattttctgaagggcatgttgatactagaaatggacaaggggctattcttggtgggaagagatggggtgccatggtcgttctcagatcacttgaatctgcatcaacagccattatggctgcattaaaagattctgtacagtacaacaactctgaggtcaacacaatgcacattgtgttattgaatgctgaaactgaaagtaatataagtgggacaagtgatgaccaagctcaacataggatggaaaagcttaccaagatactgaaggatagtagtgttgcaagtgatctccaagctgctggtttgaaggttataagttgcattgttcaaagagatgcaggtcgcatgccaatgcgccacacattcctctggtttgatgaaaagaactgttatgaagaagagcatattctccggcatgtggagcctcccctctctgcacttcttgaattgggtaagttgaaagtgaaaggatacaacgaaatgaagtatactccatcacgtgatcgtcaatggcatatctacacactaagaaatactgaaaaccccaaaatgttgcatagggtatttttccgaactattgtcaggcaacccaatgcaggcaacaagtttacgtcggcacaggtcagcgacactggattaggatgtcctgaagaatctctgtcatttacatcgaatagcatcttaagatcactgatgactgctatagaagaattagagcttcatgcgattaggacaggtcattctcacatgtttttgtgcatactgaaagaacaaaagcttcttgatctcgtcccattttcagggagtacaattgttgacgttggccaagatgaagctactgcttgttcacttttaagatcaatggctttgaagatacatgaacttgttggtgcaaggatgcatcatctttctgtatgccagtgggaggtgaaactcaagttggactgtgatggacctgcaagtggtacctggagagtcgtaactacaaatgtcactagtcacacctgcaccattgatatctaccgagaagtggaagatacagaatcgcagaagttactataccattcagctacttcgtcagctggtccaatgcatggtgttgcactgaataatccttatcaacctttgagtgtgattgatctaaagcgctgctctgctaggaacaacagaacaacatattgctacgattttccgctgatggatccttctcagagagtgaagtttgttcaggaagtcaagaaggttcttggatgatgatatgataccaacacatccaacacaatatgcgcatgctacatgttatttttcaagtacatacatagaaggatattgcttggccttgattgatcatgtctgatctaagtcgatcattattttcttgaaacttcctttcggacgtggtgctatggttgatgaatttggatgtgtgcgttctgccaggtgtaagcccaaaggtttatacagaccgagttaaggttaggaagagcacgagtgaacttgttctggttttgcagtggttaaggcagaaagttgtttcactgtagttctgagatgtattaccagcggcgctgtaattttagggtgtataatgcggatgctagtaaacaattgagtggttcattaaattttgaactcgaataatatgtttctgtaggcacatgtgacgtaccactacatgaaataaatgtcgctgaactagggcaccagagttttggtaggactaaggttttgtttggttatgggataaggtgagcatctccagcgttcccaaacttgaatttcccaataaatttctaatgcgacgggctagacaaaaagcttgttgagccggctcggtagctttggttaagaaatgctttgtt

SEQ ID NO: 14146 - DNA, 7413 bp, Zea Mays
tttgctctctttttatggcactgtgcttttgagaaggcctttaattgtgctgtctgggccacggaacggcaatgtcgcagcttggattagctgcaactgcctcgaaggccttgccactactccctaatcgccagagaagtccagctgggactacatttccatcatctgcattgccgaggccctcaaaccgaaggaaaagccatactcgttcacttcgtgatggtggaaatgaggtatcagatgccaaaaagcacagccagtcagttcgtcaaggtcttgctggcattatcgacatcccaagtgacgcagtttcggaagtcgatatttcacatggacctaaggatcctagggggccaacagattcctatcaaatgaatgggattatcaatgaaacacataatggaagacatgcctcagggtccatggttgttgaattttgtgcagcactaggtggcaaaacaccaattcacagtatattagtggccaacaatggaatggcggcaacaaagttcatgaggagtgtccgtacatgggctaatgatacttttggatctgagaaggcaattcatctcatagctatggcaactccggaagacatgaggataaatgcagaacacatcagacttgctgatcaattcgtagaggtgcctggtggaacaaacaataataactatgccaacgttcaactcatagtggagatagcagaaagagtaggtgtttctgctgtttggcctggttggggtcatgcttctgagaatcctgagctgccggatgcattgaccgcaaaaggaatcgtttttcttgggccaccagcaacatcaatgaatgcattgggagataaggttggttcagctctcattgctcaagcagccggggtcccaactcttgcttggagtggatcgcatgttgaagttccattagagtgctgcttagacgcgatacctgaggagatgtatagaaaagcttgtgttactaccacagaggaggcagttgcaagttgtcaagtggttggttatcctgccatgattaaggcatcctggggaggtggtggtaaaggaataagaaaggttcataatgatgatgaggttagagcgctgtttaagcaagtacaaggtgaagtccctggctccccaatatttatcatgaggcttgcatcccagagtcggcatcttgaagttcagttgctttgtgatcaatatggcaatgtagcagcacttcacagtcgtgattgcagtgtacaacggcgacaccagaagattattgaagaaggcccagttactgttgctcctcgtgaaacagttaaagcacttgagcaggcagcaaggaggcttgctaaggctgtgggttatgttggtgcggctactgttgagtatctttacagcatggagactggagaatactattttctggagcttaatccccgactacaggttgagcatccagtcactgagtggatagctgaagtaaatctgcctgcagctcaagttgcagttggaatgggcatacctctttggcagattccagaaatcagacgtttttatggaatggactatggaggagggtatgacatttggaggaaaacagcagctcttgctgcaccatttaattttgatgaagtagattctctatggccaaagggccattgtgtagcagttagaattactagtgaggacccagatgatggtttcaaacctactggcgggaaagtgaaggagataagttttaaaagcaagcctaatgtttgggcctacttctcagtaaagtctggtggaggcattcatgaatttgctgattctcagtttggacatgtttttgcatatggactctctagaccagcagctataacaaacatgtctcttgcattaaaagagattcagattcgtggagaaattcattcaaatgttgattacacagttgacctcttaaacgcttcagacttcagagaaaacaagatccacactggttggctggatacaagaatagctatgcgtgttcaagctgagaggcccccatggtatatctcagtggttggaggtgctttatataaaacagtaaccaccaatgcagccactgtttctgaatatgttagttatctcaccaaaggccagattccaccaaagcatatatcccttgtcaattcaacagttaatttgaatatagaagggagcaaatacacaattgaaactgtcaggactgggcatggtaggtacaagttgcgaatgaatgattcaacagttgaggcgaatgtacaatctttatgtgatggtggcctcttaatgcagttggatggaaacagccatgtgatttatgcagaagaagaagctggcggtacacggcttcagattaatggaaagacatgcttgttgcagaatgaccatgatccatcaaagttattagctgagactccctgcaaacttcttcgctttttggttgctgatggtgctcatgttggtgcggatgtgccatatgcggaagttgaggttatgaagatgtgcatgcctctcttgtcacctgcttctggtgtcattcattgtatgatgtctgagggccaggcgttgcaggctggtgatcttatagcaaggctggatcttgatgacccttctgctgtgaaaagagctgaaccatttgatggaatgtttccactaatggacctccctgttgctgcctctagtcaagtacacaaaagatatgctgcaagtttgaatgctgctcgaatggtccttgcaggatatgagcacaatatcaatgaagtcgttcaagatttggtatgctgcctggacaatcctgagcttccttttctacagtgggatgaactaatgtctgttctagcaacgaggcttccaagaaatctcaagagtgagttagaggataaatacaaggaatacaagttgaatttttaccatgggaaaaacaaggacttcccatccaagttgctaagagacatcgtcgaggaaaatcttgcatatggttcagagaaggaaaaggctacaaatgagcgacttgttgagcctcttatgaacctactgaagtcatatgagggtgggagagaaagccatgcacattttgttgtcaagtctctttttgaggagtatcttaccgtggaagaacttttcagtgatggcattcagtctgacgtgattgaaaccttgcgtcatcagcacagtaaagacctgcagaaggttgtagacatcgtgctgtctcaccagggtgtgaggaacaaagctaagcttgtaacagcacttatggaaaagctggtttatccaaatcctgtgatccaactgttcagcagaaagtgattgtgacatacatatcacgattgtaccagcctcatcttgtgaaggatagcatccaaatgaaattcaaagaatctggtgctattgttttttgggaattttctgaagggcatgttgatactagaaatggacaaggggctattcttggtgggaagagatggggtgccatggtcgttctcagatcacttgaatctgcatcaacagccattatggctgcattaaaagattctgtacagtacaacaactctgaggtcaacacaatgcacattgtgttattgaatgctgaaactgaaagtaatataagtgggacaagtgatgaccaagctcaacataggatggaaaagcttaccaagatactgaaggatagtagtgttgcaagtgatctccaagctgctggtttgaaggttataagttgcattgttcaaagagatgcaggtcgcatgccaatgcgccacacattcctctggtttgatgaaaagaactgttatgaagaagagcatattctccggcatgtggagcctcccctctctgcacttcttgaattgggtaagttgaaagtgaaaggatacaacgaaatgaagtatactccatcacgtgatcgtcaatggcatatctacacactaagaaatactgaaaaccccaaaatgttgcatagggtatttttccgaactattgtcaggcaacccaatgcaggcaacaagtttacgtcggcacaggtcagcgacactggattaggatgtcctgaagaatctctgtcatttacatcgaatagcatcttaagatcactgatgactgctatagaagaattagagcttcatgcgattaggacaggtcattctcacatgtttttgtgcatactgaaagaacaaaagcttcttgatctcgtcccattttcagggagtacaattgttgacgttggccaagatgaagctactgcttgttcacttttaagatcaatggctttgaagatacatgaacttgttggtgcaaggatgcatcatctttctgtatgccagtgggaggtgaaactcaagttggactgtgatggacctgcaagtggtacctggagagtcgtaactacaaatgtcactagtcacacctgcaccattgatatctaccgagaagtggaagatacagaatcgcagaagttactataccattcagctacttcgtcagctggtccaatgcatggtgttgcactgaataatccttatcaacctttgagtgtgattgatctaaagcgctgctctgctaggaacaacagaacaacatattgctacgattttccgctggcatttgaaactgcactgcagaagtcatggcaatccaactgttctagtgttcctgaaggcagtgaaaatagtaaatcctacgtgaaatcaactgagctggtgtttgctgaaaaacatgggtcctggggcactcctataattcccatggaacgtcctgctgggctcaatgacattggtatggtcgcttggatcttggaaatgtcaacacctgaatttcccaatggcaggcagattattgttgtagcaaatgatattactttcagagctggatcattcggcccaagggaagatgcattttttgaagctgtcaccaacctggcttgcgaaaggaagcttccccttatatacttggcagcaaactctggtgctaggattggcatagctgatgaagtgaaatcttgcttccgtgttgggtggtctgatgaacgcagccctgaacgagggtttcagtacatctatctgactgaagaagactatgctcgtattagctcttctgttatagcacataagctgcagctagataatggtgaaattaggtggattattgactctgttgtgggcaaggaggatgggcttggtgttgagaacatacatggaagtgctgctattgccagtgcttattctagggcatatgaggagacatttacacttacatttgtgactgggcggactgtaggaataggagcctatcttgctcgacttggtatacggtgcatacagcgccttgaccagcctattattttaacagggttttctgccctgaacaagctccttgggcgagaagtgtacagctcccacatgcagctgggtggtcctaagatcatggcgaccaatggtgttgtccacttgaccgtttcagatgatcttgaaggtgtttccaatatattgaggtggctcagctatgttcctgcaaacattggtggacctcttcctattaccaaacctttggaccctccagatagacctgtcgcatacatccctgagaacacatgcgatccgcgtgcagccatccgtggtgtagatgacagccaagggaaatggttgggtggtatgtttgacaaagacagctttgtggagacatttgaaggatgggcaaaaacagtggttactggcagagcaaagcttggaggaattcctgtgggtgttatagctgtggagacacagaccatgatgcagctcatccctgctgatccaggtcaacttgattcccatgagcgatctgttcctcgggctggacaagtgtggttcccagattctgcaaccaagacagctcaggcattattagacttcaaccgtgaaggattgcctctgttcatcctggctaactggagaggcttttctgggggacagagagatctctttgaaggtattcttcaggctgggtcagcaattgttgagaaccttaggacatataatcagcctgcgtttgtctacattcctatggctggagagcttcgtggaggagcttgggttgtgatcgatagcaaaataaatccagaccgcattgagtgttatgctgagaggactgccaaaggtaatgtgctcgaacctcaagggttaattgaaattaagttcaggtcagaggaactccaagactgtatgggcaggcttgacccagagttgataaatctgaaagcaaaacttcaagatgcaaagcatggaaatggaagtctaccagacatagaatcgcttcagaagagtatagaagcgcgtacaaaacagttgttacctttatatacccagattgcagtacgctttgctgaattgcatgatacttccctgagaatggcagctaaaggcgtgattaagaaagttgtagactgggaagaatcacgctctttcttctataaaaggctacggaggaggatctctgaagatcttcttgcaaaagaaataagacgaataattggtgacaacttcacgcaccaatcggcgatggagcttatcaatgaatggtacctggcttctcaggccacaacaggaagcactgctggatgggatgatgatgatgcttttgttgcctggaaggacagtcctgaaaactacaagggatatatccaagagctaagggctcaaaaagtatctcagtcgctctctgatcttgctgactccagttcagatctacaagcattctcgcagggtctttctacactattagataagatggatccttctcagagagtgaagtttgttcaggaagtcaagaaggttcttggatgatgatatgataccaacacatccaacacaatatgcgcatgctacatgttatttttcaagtacatacatagaaggatattgcttggccttgattgatcatgtctgatctaagtcgatcattattttcttgaaacttcctttcggacgtggtgctatggttgatgaatttggatgtgtgcgttctgccaggtgtaagcccaaaggtttatacagaccgagttaaggttaggaagagcacgagtgaacttgttctggttttgcagtggttaaggcagaaagttgtttcactgtagttctgagatgtattaccagcggcgctgtaattttagggtgtataatgcggatgctagtaaacaattgagtggttcattaaattttgaactcgaataatatgtttctgtaggcacatgtgacgtaccactacatgaaataaatgtcgctgaactagggcaccagagttttggtaggactaaggttttgtttggttatgggataaggtgagcatctccagcgttcccaaacttgaatttcccaataaatttctaatgcgacgggctagacaaaaagcttgttgagccggctcggtagctttggttaagaaatgctttgtt

SEQ ID NO: 14147 - DNA, 749 bp, Zea Mays
gagtagtcgagtaggccaaccggaggcgcactctggcgtgtgtcgtaccgagggcgccaggagcctaccagtgcaggctacagcagcgcagcgccggagcggccggtcgctggccggctatcgggaccgcggccgcggccgcgtttggcccgtgctgatgcactgagaggagggtggaggccgcagggtggccgtccggcagcgtcgcgctgcacgtcaactgctctgaacctgtgtgacacaggaagccgctcggggctaggtgccaccatctgctctctaccaattggaggggcagcccttctttcattgaggtcatcatggcttgggagctcattgaggtcccgggcaacctgaatatctctctccaagactctacagttgatgtggtggccgccaagattgatcccaagctagctaatactctcattaggcagttaagccaggtgtgtccattggaaaatctgaggcatgtaaagcgtgtacgtcgagtcttgactgcgccatgcaggcagtccctacaggctggcgccatctctgtccctatcagccacataaggacagccatctgctgattggttctgattaggacagctagagatatgtagagatatgaggggatcctgattgttatgtttctatagctagagaccctgattggttatgtttctatagctagagatgtgaggagatcatgattggttctgtttccataaaccacacagatctcctccctatatatatgtaac

SEQ ID NO: 14148 - DNA, 1732 bp, Zea Mays
cgagtaggccaaccggaggcgcactctggcgtgtgtcgtaccgagggcgccaggagcctaccagtgcaggctacagcagcgcagcgccggagcggccggtcgctggccggctatcgggaccgcggccgcggccgcgtttggcccgtgctgatgcactgagaggagggtggaggccgcagggtggccgtccggcagcgtcgcgctgcacgtcaactgctctgaacctgtgtgacacaggaagccgctcggggctaggtgccaccatctgctctctaccaattggaggggcagccgtaagttcaaattcttctttcattgaggtcatcatggcttgggagctcattgaggtcccgggcaacctgaatatctctctccaagactctacagttgatgtggtggccgccaagattgatcccaagctagctaatactctcattaggcagttaagccaggtgtgtccattggaaaatctgaggcatgtaaagcgtgtacgtcgaggtactgaatgtgatggaaaatctgagttatcaataatcctatgtgtttctactgggtctgaaacttgtggcatacagttttctgaagatctaaaaaagatagtggatacttatcagctgagtcctttcactgcaaaagttgccaggtgttgtgctacatcaaaagaggagtgggagaaacagtgcaaactttggccaacatcttaccatcctgcacatgaccttgatattgtacgaggatttcaagaggaggaattaccatcaatatttaattgcatgaagactactattcaattatcaaagacgggcaatgctgcaatcattgttgacccatcaagcatgcaaatagtcgcaaaggccacggaccagacacacaagcatgatacgcctgaagggaacacggtttctgaagcaaatgcagatgttacctgctctttgaatgaatcgatgggtaatggcagcaatttgtcactgccaggatcctttcttcctaaatgcgacagcttgaacatggaaatctcatgtataaatccttggggatggatgaaaaaaaagacttgtgagcggaagccattgccctgtgatggctgttttgcatggcatcctctgagacatgctcccatggttgccattgaaaatgctgctgagagggatagaacgatgttcccttctttggcttcaataaccaagacagattcaaatggcaatctagagaagtattgtgataatgaacaagcaaaaaggctaaagacagatacaaaagataatgagccgtcggcatctgaatcattctgtggtgacttgtctgaaaccagcagaccatatctctgcacaggatttgatatctaccttgtttgggaaccatgcacaatgtgtgcaatggcacttgtacaccatagattcaagcgcgtgttctatgctttccccaatcctgtcaccggagcgctcggtggagtctacatgttgcatggggagagaagtctaaatcatcactacaatgtatttagggtttcagtacctgaggcatactcgaatggtttgaattagttgttcgaaggaatgctgacccaacatcctgttccattttgtttagaaaaaaaggatccatgagctcttgattttcactatgggtgccattttgttgcacaagagcttcagattaggcttaaacttgtccttttgtattattaaaattttacctatgttgtatcactaaaatagtctcttcattctct

SEQ ID NO: 14149 - DNA, 2457 bp, Zea Mays
atcgaagtgaagcggggggacagatgtgcgccagcgaggcataagcagaatgaggcatcaccgcatgaccgcatcagctcatcgcatcggccgctttgctttgcttgctgctctcttctctccgctttccgccgcggtgcaaggccagcgaattccatttccttccgcgtctgtccccaaaagcgggaggcccgccgccggaacgagccagcaaagccaagcaagcatattgacggaggaggcggaacggcggaagcgtgaatccggaggctctgcagctgttctccagaagcagccgactgggtgtccgtccgcggaccggtcggtgtataaatggttggcgaggagagcggctgcggcgtcgagggagggacaggaggaggagaagtgccggcggcctctgctcccaacggggaccgctcagggaatagccgcctcgccgtgccgtcatcctccgcagatgatagaggcttccatagatcaagcaccatgccaggggtgattaagaatgatgaaattaccaatgaatctactggaccatcaaatttggaaaggtccagaactgagcgtcgtcggcaaaataatccaactattgatcctgctaaacagttacttgatgaaaggattccaataaaaaagaagctcaaaatgctaaatcggattgctacagtaaaagatgatggaactgtggttgttgatgtgccaagtggtctggaaccaactatagttggtggaactgaggatatttatactgaagctgttgaagaagcattagatggaacggagatactatacaggcctcctatgcaaatagttatacttattgtgggtacacgaggagatgtgcagccatttgttgctatcgggaaatgtttacaggactatgggcatcgtgtgagattggccactcatgccaactttaaggagtttgtactaacagctggcctggagttttttccgcttggtggagatcccaaaattcttgctgaatatatggtgaagaataaaggattcctaccttcgggaccatcagaaattcctattcaaaggaaacagatgaaagaaattattttttctttgctgcctgcatgcaaggaacctgatcctgacactggcattccttttaatgttgatgcaattattgcgaacccacccgcgtatggacatacacatgtggcagaagcactaaaagtaccaattcatatattctttaccatgccatggacgcctactaatgaatttcctcaccctctttctcgcgtgaagcagcctgctggatatcgactttcttatcaaattgtggactccatgatttggcttggaataagggatatgataaatgagttcagaaagaaaaagctgaagctgcgtccagtaacatatctaagtggttctcagggttctggcaatgacattccgcatggatacatttggagtcctcatcttgttccgaaaccaaaagattggggcccaaagatcgatgttgttggattttgcttccttgatcttgcttccaattacgtacctcctgaaccacttgtggaatggcttgaagccggtgacaagcccatatatgttggttttggtagtcttccagttcaagatccacaaaagatgactgaaattattgtcaaagcactggaaattactggacagagaggtatcattaacaaaggctggggtggccttggaaccttgtcagaaccaaaagattttgtgtatctactagacaactgccctcatgactggctttttctgcactgcaaagcagtggtgcatcatggtggtgctggaacgacagccgcaggtcttaaagcagcgtgtcccacgactattgtacccttctttggtgaccaacctttctggggtgaccgggtgcatgcaagagggctagggcctccgcctattccagttgatcagtttggtttgcagaagttggtcgacgctataacattcatgatgaaaccagaggtgaaagataaggctgtggagctggcgaaagccatggaatctgaagacggggtgacaggtgctgttagggcattccttagacacctgccatcaaaagctgaggaacagagtctgccgcagtcatcgggcttcctggaattcttaggcccactaagtaaatgtttgggatgttcttagtgcacaaggcatcgttactattcacggattggcggtgtaccatttcctcgaagcagccacgagttatcgtaatattccatgcaaagaagcttcaggccagtagtgtttctcctcttcttttctgcgggtatttataatgtgtaaagagtgcttgtggtgtggatggtctgcacggatggcctgcatcctgtggtgcgtgtaattttgatgtgcatgtttgccgtgcagcacagacgacgatttcacgtctgcatggccaacccgttctgtatatgaaaagaaacaggtgcctacgttttcttcgttttc

SEQ ID NO: 14150 - DNA, 1204 bp, Zea Mays
gacagatgtgcgccagcgaggcataagcagaatgaggcatcaccgcatgaccgcatcagctcatcgcatcggccgctttgctttgcttgctgctctcttctctccgctttccgccgcggtgcaaggccagcgaattccatttccttccgcgtctgtccccaaaagcgggaggcccgccgccggaacgagccagcaaagccaagcaagcatattgacggaggaggcggaacggcggaagcgtgaatccggaggctctgcagctgttctccagaagcagccgactgggtgtccgtccgcggaccggtcggtgtataaatggttggcgaggagagcggctgcggcgtcgagggagggacaggaggaggagaagtgccggcggcctctgctcccaacggggaccgctcagggaatagccgcctcgccgtgccgtcatcctccgcagatgatagaggcttccatagatcaagcaccatgccaggggtgattaagaatgatgaaattaccaatgaatctactggaccatcaaatttggaaaggtccagaactgagcgtcgtcggcaaaataatccaactattgatcctgctaaacagttacttgatgaaaggattccaataaaaaagaagctcaaaatgctaaatcggattgctacagtaaaagatgatggaactgtggttgttgatgtgccaagtggtctggaaccaactatagttggtggaactgaggatatttatactgaagctgttgaagaagcattagatggaacggagatactatacaggcctcctatgcaaatagttatacttattgtgggtacacgaggagatgtgcagccatttgttgctatcgggaaatgtttacaggactatgggcatcgtgtgagattggccactcatgccaactttaaggagtttgtactaacagctggcctggagttttttccgcttggtggagatcccaaaattcttgctgaatatatggtgaagaataaaggattcctaccttcgggaccatcagaaattcctattcaaaggaaacagatgaaagaaattattttttctttgctgcctgcatgcaaggaacctgatcctgacactggcattccttttaatgttgatgcaattattgcgaacccacccgcgtatggaaaccacataagcattgtaagaggaaaaacttcttacctatttcacatccatcaatcaa

SEQ ID NO: 14151 - DNA, 2452 bp, Zea Mays
gacagatgtgcgccagcgaggcataagcagaatgaggcatcaccgcatgaccgcatcagctcatcgcatcggccgctttgctttgcttgctgctctcttctctccgctttccgccgcggtgcaaggccagcgaattccatttccttccgcgtctgtccccaaaagcgggaggcccgccgccggaacgagccagcaaagccaagcaagcatattgacggaggaggcggaacggcggaagcgtgaatccggaggctctgcagctgttctccagaagcagccgactgggtgtccgtccgcggaccggtcggtgtataaatggttggcgaggagagcggctgcggcgtcgagggagggacaggaggaggagaagtgccggcggcctctgctcccaacggggaccgctcagggaatagccgcctcgccgtgccgtcatcctccgcagatgatagaggcttccatagatcaagcaccatgccaggggtgattaagaatgatgaaattaccaatgaatctactggaccatcaaatttggaaaggtccagaactgagcgtcgtcggcaaaataatccaactattgatcctgctaaacagttacttgatgaaaggattccaataaaaaagaagctcaaaatgctaaatcggattgctacagtaaaagatgatggaactgtggttgttgatgtgccaagtggtctggaaccaactatagttggtggaactgaggatatttatactgaagctgttgaagaagcattagatggaacggagatactatacaggcctcctatgcaaatagttatacttattgtgggtacacgaggagatgtgcagccatttgttgctatcgggaaatgtttacaggactatgggcatcgtgtgagattggccactcatgccaactttaaggagtttgtactaacagctggcctggagttttttccgcttggtggagatcccaaaattcttgctgaatatatggtgaagaataaaggattcctaccttcgggaccatcagaaattcctattcaaaggaaacagatgaaagaaattattttttctttgctgcctgcatgcaaggaacctgatcctgacactggcattccttttaatgttgatgcaattattgcgaacccacccgcgtatggacatacacatgtggcagaagcactaaaagtaccaattcatatattctttaccatgccatggacgcctactaatgaatttcctcaccctctttctcgcgtgaagcagcctgctggatatcgactttcttatcaaattgtggactccatgatttggcttggaataagggatatgataaatgagttcagaaagaaaaagctgaagctgcgtccagtaacatatctaagtggttctcagggttctggcaatgacattccgcatggatacatttggagtcctcatcttgttccgaaaccaaaagattggggcccaaagatcgatgttgttggattttgcttccttgatcttgcttccaattacgtacctcctgaaccacttgtggaatggcttgaagccggtgacaagcccatatatgttggttttggtagtcttccagttcaagatccacaaaagatgactgaaattattgtcaaagcactggaaattactggacagagaggtatcattaacaaaggctggggtggccttggaaccttgtcagaaccaaaagattttgtgtatctactagacaactgccctcatgactggctttttctgcactgcaaagcagtggtgcatcatggtggtgctggaacgacagccgcaggtcttaaagcagcgtctatgattgcagtgtcccacgactattgtacccttctttggtgaccaacctttctggggtgaccgggtgcatgcaagagggctagggcctccgcctattccagttgatcagtttggtttgcagaagttggtcgacgctataacattcatgatgaaaccagaggtgaaagataaggctgtggagctggcgaaagccatggaatctgaagacggggtgacaggtgctgttagggcattccttagacacctgccatcaaaagctgaggaacagagtctgccgcagtcatcgggcttcctggaattcttaggcccactaagtaaatgtttgggatgttcttagtgcacaaggcatcgttactattcacggattggcggtgtaccatttcctcgaagcagccacgagttatcgtaatattccatgcaaagaagcttcaggccagtagtgtttctcctcttcttttctgcgggtatttataatgtgtaaagagtgcttgtggtgtggatggtctgcacggatggcctgcatcctgtggtgcgtgtaattttgatgtgcatgtttgccgtgcagcacagacgacgatttcacgtctgcatggccaacccgttctgtatatgaaaagaaacaggtgcctacgttttcttcgttttc

SEQ ID NO: 14152 - DNA, 2303 bp, Zea Mays
gacagatgtgcgccagcgaggcataagcagaatgaggcatcaccgcatgaccgcatcagctcatcgcatcggccgctttgctttgcttgctgctctcttctctccgctttccgccgcggtgcaaggccagcgaattccatttccttccgcgtctgtccccaaaagcgggaggcccgccgccggaacgagccagcaaagccaagcaagcatattgacggaggaggcggaacggcggaagcgtgaatccggaggctctgcagctgttctccagaagcagccgactgggtgtccgtccgcggaccggtcggtgtataaatggttggcgaggagagcggctgcggcgtcgagggagggacaggaggaggagaagtgccggcggcctctgctcccaacggggaccgctcagggaatagccgcctcgccgtgccgtcatcctccgcagatgatagaggcttccatagatcaagcaccatgccaggggtgattaagaatgatgaaattaccaatgaatctactggaccatcaaatttggaaaggtccagaactgagcgtcgtcggcaaaataatccaactattgatcctgctaaacagttacttgatgaaaggattccaataaaaaagaagagctcaaaatgctaaatcggattgctacagtaaaagatgatggaactgtggttgttgatgtgccaagtggtctggaaccaactatagttggtggaactgaggatatttatactgaagctgttgaagaagcattagatggaacggagatactatacaggcctcctatgcaaatagttatacttattgtgggtacacgaggagatgtgcagccatttgttgctatcgggaaatgtttacaggactatgggcatcgtgtgagattggccactcatgccaactttaaggagtttgtactaacagctggcctggagttttttccgcttggtggagatcccaaaattcttgctgaatatatggtgaagaataaaggattcctaccttcgggaccatcagaaattcctattcaaaggaaacagatgaaagaaattattttttctttgctgcctgcatgcaaggaacctgatcctgacactggcattccttttaatgttgatgcaattattgcgaacccacccgcgtatggacatacacatgtggcagaagcactaaaagtaccaattcatatattctttaccatgccatggacgcctactaatgaatttcctcaccctctttctcgcgtgaagcagcctgctggatatcgactttcttatcaaattgtggactccatgatttggcttggaataagggatatgataaatgagttcagaaagaaaaagctgaagctgcgtccagtaacatatctaagtggttctcagggttctggcaatgacattccgcatggatacatttggagtcctcatcttgttccgaaaccaaaagattggggcccaaagatcgatgttgttggattttgcttccttgatcttgcttccaattacgtacctcctgaaccacttgtggaatggcttgaagccggtgacaagcccatatatgttggttttggtagtcttccagttcaagatccacaaaagatgactgaaattattgtcaaagcactggaaattactggacagagaggtatcattaacaaaggctggggtggccttggaaccttgtcagaaccaaaagattttgtgtatctactagacaactgccctcatgactggctttttctgcactgcaaagcagtggtgcatcatggtggtgctggaacgacagccgcaggtcttaaagcagcgtgtcccacgactattgtacccttctttggtgaccaacctttctggggtgaccgggtgcatgcaagagggctagggcctccgcctattccagttgatcagtttggtttgcagaagttggtcgacgctataacattcatgatgaaaccagaggtgaaagataaggctgtggagctggcgaaagccatggaatctgaagacggggtgacaggtgctgttagggcattccttagacacctgccatcaaaagctgaggaacagagtctgccgcagtcatcgggcttcctggaattcttaggcccactaagtaaatgtttgggatgttcttagtgcacaaggcatcgttactattcacggattggcggtgtaccatttcctcgaagcagccacgagttatcgtaatattccatgcaaagaagcttcagacgacgatttcacgtctgcatggccaacccgttctgtatatgaaaagaaacaggtgcctacgttttcttcgttttc

SEQ ID NO: 14153 - DNA, 1283 bp, Zea Mays
gccagcgaggcataagcagaatgaggcatcaccgcatgaccgcatcagctcatcgcatcggccgctttgctttgcttgctgctctcttctctccgctttccgccgcggtgcaaggccagcgaattccatttccttccgcgtctgtccccaaaagcgggaggcccgccgccggaacgagccagcaaagccaagcaagcatattgacggaggaggcggaacggcggaagcgtgaatccggaggctctgcagctgttctccagaagcagccgactgggtgtccgtccgcggaccggtcggtgtataaatggttggcgaggagagcggctgcggcgtcgagggagggacaggaggaggagaagtgccggcggcctctgctcccaacggggaccgctcagggaatagccgcctcgccgtgccgtcatcctccgcagatgatagaggcttccatagatcaagcaccatgccaggggtgattaagaatgatgaaattaccaatgaatctactggaccatcaaatttggaaaggtccagaactgagcgtcgtcggcaaaataatccaactattgatcctgctaaacagttacttgatgaaaggattccaataaaaaagaagctcaaaatgctaaatcggattgctacagtaaaagatgatggaactgtggttgttgatgtgccaagtggtctggaaccaactatagttggtggaactgaggatatttatactgaagctgttgaagaagcattagatggaacggagatactatacaggcctcctatgcaaatagttatacttattgtgggtacacgaggagatgtgcagccatttgttgctatcgggaaatgtttacaggactatgggcatcgtgtgagattggccactcatgccaactttaaggagtttgtactaacagctggcctggagttttttccgcttggtggagatcccaaaattcttgctgaatatatggtgaagaataaaggattcctaccttcgggaccatcagaaattcctattcaaaggaaacagatgaaagaaattattttttctttgctgcctgcatgcaaggaacctgatcctgacactggcattccttttaatgttgatgcaattattgcgaacccacccgcgtatggacatacacatgtggcagaagcactaaaagtaccaattcatatattctttaccatgccatggacgcctactaatgaatttcctcaccctctttctcgcgtgaagcagcctgctggatatcgaaaaccatgaaggacttaatagcagattg

SEQ ID NO: 14154 - DNA, 2419 bp, Zea Mays
cataagcagaatgaggcatcaccgcatgaccgcatcagctcatcgcatcggccgctttgctttgcttgctgctctcttctctccgctttccgccgcggtgcaaggccagcgaattccatttccttccgcgtctgtccccaaaagcgggaggcccgccgccggaacgagccagcaaagccaagcaagcatattgacggaggaggcggaacggcggaagcgtgaatccggaggctctgcagctgttctccagaagcagccgactgggtgtccgtccgcggaccggtcggtgtataaatggttggcgaggagagcggctgcggcgtcgagggagggacaggaggaggagaagtgccggcggcctctgctcccaacggggaccgctcagggaatagccgcctcgccgtgccgtcatcctccgcagatgatagaggcttccatagatcaagcaccatgccaggggtgattaagaatgatgaaattaccaatgaatctactggaccatcaaatttggaaaggtccagaactgagcgtcgtcggcaaaataatccaactattgatcctgctaaacagttacttgatgaaaggattccaataaaaaagaaggctcaaaatgctaaatcggattgctacagtaaaagatgatggaactgtggttgttgatgtgccaagtggtctggaaccaactatagttggtggaactgaggatatttatactgaagctgttgaagaagcattagatggaacggagatactatacaggcctcctatgcaaatagttatacttattgtgggtacacgaggagatgtgcagccatttgttgctatcgggaaatgtttacaggactatgggcatcgtgtgagattggccactcatgccaactttaaggagtttgtactaacagctggcctggagttttttccgcttggtggagatcccaaaattcttgctgaatatatggtgaagaataaaggattcctaccttcgggaccatcagaaattcctattcaaaggaaacagatgaaagaaattattttttctttgctgcctgcatgcaaggaacctgatcctgacactggcattccttttaatgttgatgcaattattgcgaacccacccgcgtatggacatacacatgtggcagaagcactaaaagtaccaattcatatattctttaccatgccatggacgcctactaatgaatttcctcaccctctttctcgcgtgaagcagcctgctggatatcgactttcttatcaaattgtggactccatgatttggcttggaataagggatatgataaatgagttcagaaagaaaaagctgaagctgcgtccagtaacatatctaagtggttctcagggttctggcaatgacattccgcatggatacatttggagtcctcatcttgttccgaaaccaaaagattggggcccaaagatcgatgttgttggattttgcttccttgatcttgcttccaattacgtacctcctgaaccacttgtggaatggcttgaagccggtgacaagcccatatatgttggttttggtagtcttccagttcaagatccacaaaagatgactgaaattattgtcaaagcactggaaattactggacagagaggtatcattaacaaaggctggggtggccttggaaccttgtcagaaccaaaagattttgtgtatctactagacaactgccctcatgactggctttttctgcactgcaaagcagtggtgcatcatggtggtgctggaacgacagccgcaggtcttaaagcagcgtgtcccacgactattgtacccttctttggtgaccaacctttctggggtgaccgggtgcatgcaagagggctagggcctccgcctattccagttgatcagtttggtttgcagaagttggtcgacgctataacattcatgatgaaaccagaggtgaaagataaggctgtggagctggcgaaagccatggaatctgaagacggggtgacaggtgctgttagggcattccttagacacctgccatcaaaagctgaggaacagagtctgccgcagtcatcgggcttcctggaattcttaggcccactaagtaaatgtttgggatgttcttagtgcacaaggcatcgttactattcacggattggcggtgtaccatttcctcgaagcagccacgagttatcgtaatattccatgcaaagaagcttcaggccagtagtgtttctcctcttcttttctgcgggtatttataatgtgtaaagagtgcttgtggtgtggatggtctgcacggatggcctgcatcctgtggtgcgtgtaattttgatgtgcatgtttgccgtgcagcacagacgacgatttcacgtctgcatggccaacccgttctgtatatgaaaagaaacaggtgcctacgttttcttcgttttc

SEQ ID NO: 14155 - DNA, 1773 bp, Zea Mays
agcagaatgaggcatcaccgcatgaccgcatcagctcatcgcatcggccgctttgctttgcttgctgctctcttctctccgctttccgccgcggtgcaaggccagcgaattccatttccttccgcgtctgtccccaaaagcgggaggcccgccgccggaacgagccagcaaagccaagcaagcatattgacggaggaggcggaacggcggaagcgtgaatccggaggctctgcagctgttctccagaagcagccgactgggtgtccgtccgcggaccggtcggtgtataaatggttggcgaggagagcggctgcggcgtcgagggagggacaggaggaggagaagtgccggcggcctctgctcccaacggggaccgctcagggaatagccgcctcgccgtgccgtcatcctccgcagatgatagaggcttccatagatcaagcaccatgccaggggtgattaagaatgatgaaattaccaatgaatctactggaccatcaaatttggaaaggtccagaactgagcgtcgtcggcaaaataatccaactattgatcctgctaaacagttacttgatgaaaggattccaataaaaaagaagctcaaaatgctaaatcggattgctacagtaaaagatgatggaactgtggttgttgatgtgccaagtggtctggaaccaactatagttggtggaactgaggatatttatactgaagctgttgaagaagcattagatggaacggagatactatacaggcctcctatgcaaatagttatacttattgtgggtacacgaggagatgtgcagccatttgttgctatcgggaaatgtttacaggactatgggcatcgtgtgagattggccactcatgccaactttaaggagtttgtactaacagctggcctggagttttttccgcttggtggagatcccaaaattcttgctgaatatatggtgaagaataaaggattcctaccttcgggaccatcagaaattcctattcaaaggaaacagatgaaagaaattattttttctttgctgcctgcatgcaaggaacctgatcctgacactggcattccttttaatgttgatgcaattattgcgaacccacccgcgtatggacatacacatgtggcagaagcactaaaagtaccaattcatatattctttaccatgccatggacgcctactaatgaatttcctcaccctctttctcgcgtgaagcagcctgctggatatcgactttcttatcaaattgtggactccatgatttggcttggaataagggatatgataaatgagttcagaaagaaaaagctgaagctgcgtccagtaacatatctaagtggttctcagggttctggcaatgacattccgcatggatacatttggagtcctcatcttgttccgaaaccaaaagattggggcccaaagatcgatgttgttggattttgcttccttgatcttgcttccaattacgtacctcctgaaccacttgtggaatggcttgaagccggtgacaagcccatatatccagttcaagatccacaaaagatgactgaaattattgtcaaagcactggaaattactggacagagaggtatcattaacaaaggctggggtggccttggaaccttgtcagaaccaaaagattttgtgtatctactagacaactgccctcatgactggctttttctgcactgcaaagcagtggtgcatcatggtggtgctggaacgacagccgcaggtcttaaagcagcgtctatgattgcag

SEQ ID NO: 14156 - DNA, 3232 bp, Zea Mays
ccgcatcagctcatcgcatcggccgctttgctttgcttgctgctctcttctctccgctttccgccgcggtgcaaggccagcgaattccatttccttccgcgtctgtccccaaaagcgggaggcccgccgccggaacgagccagcaaagccaagcaagcatattgacggaggaggcggaacggcggaagcgtgaatccggaggctctgcagctgttctccagaagcagccgactgggtgtccgtccgcggaccggtcggtgtataaatggttggcgaggagagcggctgcggcgtcgagggagggacaggaggaggagaagtgccggcggcctctgctcccaacggggaccgctcagggaatagccgcctcgccgtgccgtcatcctccgcagctcaaaatgctaaatcggattgctacagtaaaagatgatggaactgtggttgttgatgtgccaagtggtctggaaccaactatagttggtggaactgaggatatttatactgaagctgttgaagaagcattagatggaacggagatactatacaggcctcctatgcaaatagttatacttattgtgggtacacgaggagatgtgcagccatttgttgctatcgggaaatgtttacaggactatgggcatcgtgtgagattggccactcatgccaactttaaggagtttgtactaacagctggcctggagttttttccgcttggtggagatcccaaaattcttgctgaatatatggtgaagaataaaggattcctaccttcgggaccatcagaaattcctattcaaaggaaacagatgaaagaaattattttttctttgctgcctgcatgcaaggaacctgatcctgacactggcattccttttaatgttgatgcaattattgcgaacccacccgcgtatggacatacacatgtggcagaagcactaaaagtaccaattcatatattctttaccatgccatggacgcctactaatgaatttcctcaccctctttctcgcgtgaagcagcctgctggatatcgactttcttatcaaattgtggactccatgatttggcttggaataagggatatgataaatgagttcagaaagaaaaagctgaagctgcgtccagtaacatatctaagtggttctcagggttctggcaatgacattccgcatggatacatttggagtcctcatcttgttccgaaaccaaaagattggggcccaaagatcgatgttgttggattttgcttccttgatcttgcttccaattacgtacctcctgaaccacttgtggaatggcttgaagccggtgacaagcccatatatgttggttttggtagtcttgtaagatcagtttgtcctttctttatgtcttgtctttgtataagttttttttttgtcatttgatcttaactactgtatagtttaatatgttgtattaaagtattctaggcatgctgccaatttttcttgattttcacttgtgtatgtagtttgcacttcaaatttcctgatgaaataggcttacatcgatatgagatcttctataaattatcctaatgccactacggtcattgtaccataagcactcttagctgttttactgcataaaacagcttcttaaatgctatggtcactagttatggcaagcgagaaaaattatatcatttacagtgttgtaatcttgtagaatttgcgtggcatattgccatattcgtatgtgaatatggctgtatgattttgttacaaagataattgaattcttttgcaacagaagtattcacttcaaaatttaagctcaattttcttgtatatttgaggaataaagctcaatttatctagaagaattgtcccaaaattgctgtgtttaaacacagccaattttgatagccactagactagtatgcagtctgaggaagtttcatgttgacccagtagatcagtttttgcaaatgcttttagtttgtcttatgccacccataaacagccttcgccagctagtatgccatgatcgtgtaatttgttcctcatcaaatacttgaaatgcatcaaaccttcagattgcactacttcgttctttccaaaccgtgttctgatcctgtcactgtggaaagtttgattgcatattaactgtcactgcctatgaatgttttatgtatcatgtgtcgcctgtttatgtcttctataggcagtgcatatgcatgctacaaggttaactacaaacttggatgattgaaaatagtgatagggttatgtgccttctgtcactatcttctgagattgtagagtgctatgaaggcaaagccatcaccgcttttctctcaacaacattttgggatttttacttgttttttcttctgatctactagccagttcaagatccacaaaagatgactgaaattattgtcaaagcactggaaattactggacagagaggtatcattaacaaaggctggggtggccttggaaccttgtcagaaccaaaagattttgtgtatctactagacaactgccctcatgactggctttttctgcactgcaaagcagtggtgcatcatggtggtgctggaacgacagccgcaggtcttaaagcagcgtgtcccacgactattgtacccttctttggtgaccaacctttctggggtgaccgggtgcatgcaagagggctagggcctccgcctattccagttgatcagtttggtttgcagaagttggtcgacgctataacattcatgatgaaaccagaggtgaaagataaggctgtggagctggcgaaagccatggaatctgaagacggggtgacaggtgctgttagggcattccttagacacctgccatcaaaagctgaggaacagagtctgccgcagtcatcgggcttcctggaattcttaggcccactaagtaaatgtttgggatgttcttagtgcacaaggcatcgttactattcacggattggcggtgtaccatttcctcgaagcagccacgagttatcgtaatattccatgcaaagaagcttcaggccagtagtgtttctcctcttcttttctgcgggtatttataatgtgtaaagagtgcttgtggtgtggatggtctgcacggatggcctgcatcctgtggtgcgtgtaattttgatgtgcatgtttgccgtgcagcacagacgacgatttcacgtctgcatggccaacccgttctgtatatgaaaagaaacaggtgcctacgttttcttcgttttc

SEQ ID NO: 14157 - DNA, 1136 bp, Zea Mays
gcactcgttctcacctccccctccatcgcgcgcaggcgctgttcgctcgccgtggagctcccctgctggcgcgccggttccctgctccgtggtgctcgccggcgtttcctccagcatgtcccatggttgtccagcccccacctccatgatggccgagctctctctctctcccacggtcgtctccctcccctgctcgtccatggtgtccggtcgctgctcggattttgtccgtgccgagctcccttcgtcacgcccctgctccttgtctcacacgcgtccctgctccagtcttatccatggtcgctactctcctttccctgattaatactaggcgcagcagcaacatgccagatctctatagcccaggtgagaccaactgcttgtgtcctgtttattccccaccgattcctatatttgattatttactgtatatgtttgtgtgtttgtggtggaggtaaatcctaggaaatttagatgagaagaaagctttagcgaggcgcttgccaagtgcttggtgaatcgcttcaaccggatgcggttgtcgatctcgcggagtcgagtcgagtttagtcgtggtacgttaactaatcgcatggtatggaggacaagagatggattgatcataagacgatgctggtagacgaaactaaagtggatgaatcaaccaaatgccaggatgggggtgctcgtcaagcgagtatcatttaacaacactaacgtagtgttatcccaggcaagccccggtgcatttgccaccttccttgtgtttacaaaattttatcacttatatgctgcattaggtgataggagttgagtgattaaacacttgatgcattaccattcttgaaaggttgattaccacaccttgtcacccgttttataaaagctagagatgcttagtcttgctgatagattaagaaacatatttttgatctatgactcatgtttttacaaaaaaagaaaatgggcttgggataatgaaagcatcaagacgttgataaattcattatccaggcatggcccctctgtcaggcgccaaatttttgaaatagtttaaaatgggaccagacgttgagcaggaaaggtcgcccgtctgtgtcgattaaggaccataccgattgttggcctgatgatct

SEQ ID NO: 14158 - DNA, 822 bp, Zea Mays
ccagcccccacctccatgatggccgagctctctctctctcccacggtcgtctccctcccctgctcgtccatggtgtccggtcgctgctcggattttgtccgtgccgagctcccttcgtcacgcccctgctccttgtctcacacgcgtccctgctccagtcttatccatggtcgctcctctcctttccctgattaatactaggcgcagcagcaacatgccagatctctatagcccaggtgagaccaactgcttgtgtcctgtttattccccaccgattcctatatttgattatttactgtatatgtttgtgtgtttgtggtggaggtaaatcctaggaaatttagatgagaagaaagctttagcgaggcgcttgccaagtgcttggtgaatcgcttcaaccggatgcggttgtcgatctcgcggagtcgagtcgagtttagtcgtggtacgttaactaatcgcatggtatggaggacaagagatggattgatcataagacgatgctgatggacgaaactaaagtggatgaatcaaccaaatgccaggatggggggtgctcgtcaagcgagtatcatttaacaacactaacgtagtgttataccaggcaagccccggtgcatttgccaccttccttgtgtttacaaaattttatcacttatatgctgcattaggtgataggagttgagtgattaaacacttgatgcattaccatccttgaaaggttgattaccacaccttgtcacccgttttataaaagctagagatgcttagtcttgctgatagattaagaaacatatttttgatctatgactcatgttttta

SEQ ID NO: 14159 - DNA, 1664 bp, Zea Mays
aaggcatcctcgtcgtatttttatttcgcccagcgccgcagcccgtctctcatcgcggctgcccctcggcgatctcaagagcctcggtcgcctctcttcctcagcccgctcgccccctcttcgatacccccgataaaacccccgacccgccccgtctccagctggccaccccatcctcgtcttctccaattccaaagtaagaaagccacacgcgaggccgaccgaggaagtccaatctcatggcgctctcctgcatgaggtgccccgcgggcgccggcgccgcctccgcccgacgcgccgcagcgcagccgttggccgcggaggctgcggtctccttcgccagatgccgcggcttcgggaggtccgccaccgctgcgactgccgcctggttttggcgcaaccatgccgttgcctcacagggagtgaaagctcccatggatgctgatgtcaagaatgctgtcatacctcctacctcaccaaaggtggaaagtggctctccttcagaaatcactctggatgaatttgaagacttgagcgctctatgcaagaatgatgattctactgttagcatcacagtagttggagcatctggtgaccttgccaagaagaagatatttcctgccctttttgctctctactatgaagattgccttcccaagcatttcaccatctttggctatgcacggagcaagatgacagatgctgaactgaggaacatggttagcaaaacactgacttgcagaatagataaaagggaaaattgtagcgagaaaatggaagagttcctcaaaagatgcttctatcattcaggccaatatgattcagaagagcatttcatagatctagacaagaagctaaagcaacatgagggttccagagtttctaaccgccttttctacttgtcaatacctcctaatatattcttggatgttgtaaaatgtgcaagcaaatcagcatcttcggtgaatggttggacacgagtaattgttgagaagcccttcggccgagactcagaatcctctgctgcattaacaagcggtctgaagcagtaccttgtagaggaccaaattttcaggattgaccattatttgggaaaagaactggtggagaatttgtctgtcctgcgcttctcaaatctcgtttttgagcctctctggtcaagacaatatataagaaatgtgcaacttatattctcagaagactttggtactgaaggacgtggaggatactttgatggctacggtattattcgagacataatgcagaatcatctcattcagatactagctttatttgctatggaaactcctattagtttggaagcagaggatataagaaatgagaaggttaaagttcttcgttccatgaagccgttgcagctggaagatgtggtcgtaggacagtataaaagtcacacaaaaggtggtaccacataccctggctataccgatgataagacagtgcccaaggatagtgtgactccaacgtttgctgctgcggcgcttttcataaataatgccagatgggatggagttccctttcttatgaaagctgggaaagctttgcacacaaaacgagctgagattagggtacagttccgacatgttcctggaaaagtccacaatgaaaaaacagcacaattgttaccctagtgtcagttcttc

SEQ ID NO: 14160 - DNA, 2502 bp, Zea Mays
aaggcatcctcgtcgtatttttatttcgcccagcgccgcagcccgtctctcatcgcggctgcccctcggcgatctcaagagcctcggtcgcctctcttcctcagcccgctcgccccctcttcgatacccccgataaaacccccgacccgccccgtctccagctggccaccccatcctcgtcttctccaattccaaagtaagaaagccacacgcgaggccgaccgaggaagtccaatctcatggcgctctcctgcatgaggtgccccgcgggcgccggcgccgcctccgcccgacgcgccgcagcgcagccgttggccgcggaggctgcggtctccttcgccagatgccgcggcttcgggaggtccgccaccgctgcgactgccgcctggttttggcgcaaccatgccgttgcctcacagggagtgaaagctcccatggatgctgatgtcaagaatgctgtcatacctcctacctcaccaaaggtggaaagtggctctccttcagaaatcactctggatgaatttgaagacttgagcgctctatgcaagaatgatgattctactgttagcatcacagtagttggagcatctggtgaccttgccaagaagaagatatttcctgccctttttgctctctactatgaagattgccttcccaagcatttcaccatctttggctatgcacggagcaagatgacagatgctgaactgaggaacatggttagcaaaacactgacttgcagaatagataaaagggaaaattgtagcgagaaaatggaagagttcctcaaaagatgcttctatcattcaggccaatatgattcagaagagcatttcatagatctagacaagaagctaaagcaacatgagggttccagagtttctaaccgccttttctacttgtcaatacctcctaatatattcttggatgttgtaaaatgtgcaagcaaatcagcatcttcggtgaatggttggacacgagtaattgttgagaagcccttcggccgagactcagaatcctctgctgcattaacaagcggtctgaagcagtaccttgtagaggaccaaattttcaggattgaccattatttgggaaaagaactggtggagaatttgtctgtcctgcgcttctcaaatctcgtttttgagcctctctggtcaagacaatatataagaaatgtgcaacttatattctcagaagactttggtactgaaggacgtggaggatactttgatggctacggtattattcgagacataatgcagaatcatctcattcagatactagctttatttgctatggaaactcctattagtttggaagcagaggatataagaaatgagaaggttaaagttcttcgttccatgaagccgttgcagctggaagatgtggtcgtaggacagtataaaagtcacacaaaaggtggtaccacataccctggctataccgatgataagacagtgcccaaggatagtgtgactccaacgtttgctgctgcggcgcttttcataaataatgccagatgggatggagttccctttcttatgaaagctgggaaagctttgcacacaaaacggtactcaaaggagatacctgatgcttacgagagactcctgcttgatgccatcgaaggagagcgcaggcttttcatccgctcagatgagttggatgctgcatggtcactcttcacacccctcctgaaggagctggaagagaagcggatagctcctgagctctacccatatggaagccgtggacctgtcggggcccactatctcgccgccaagtacaacgtaagatggggtgacttgagtgcggagcactacaaggcatgaaacgaagatggctatatctttgtgatattcttgcttttccatttctgtaagtttgcacgccctcgcagtgagatagatttaagagagaaaaaagatgagaataaggcgggcagttaactaggttggaaggcatgtatccattactagactgaatagctttgttggcataattgcagctgttagggctagtttgcaacctcatgtttccaaggaattttcattttcccaaagaaaattagtttatttttcctttggaaaatgagaatctcttgggaaaatttagttgccaaactagcccttaaaaatatgttgtcaaggaatcagttcatttttcacaggaacagtaaaggaaacggaaaaaaattgccgcatttcaaggcctcggaagtgaccattgatgagtgcaagaaacggttgacatgtttcaactagttaacatttgttggtctcatttgttggctacttcacatgtgtagacgttcaggttggcaagtcggttaggttccgcttcaactagttaacatttgtactgaactaaatgaacacgctgagaacaactatctcgtgggatttgattaatcgttctgtttgtaggctactctaacatgtaaagacgaccttagtgaagagttgagacacgttacaaggaaacaataactgtaggctt

SEQ ID NO: 14161 - DNA, 2697 bp, Zea Mays
aaggcatcctcgtcgtatttttatttcgcccagcgccgcagcccgtctctcatcgcggctgcccctcggcgatctcaagagcctcggtcgcctctcttcctcagcccgctcgccccctcttcgatacccccgataaaacccccgacccgccccgtctccagctggccaccccatcctcgtcttctccaattccaaagtaagaaagccacacgcgaggccgaccgaggaagtccaatctcatggcgctctcctgcatgaggtgccccgcgggcgccggcgccgcctccgcccgacgcgccgcagcgcagccgttggccgcggaggctgcggtctccttcgccagatgccgcggcttcgggaggtccgccaccgctgcgactgccgcctggttttggcgcaaccatgccgttgcctcacagggagctcccatggatgctgatgtcaagaatgctgtcatacctcctacctcaccaaaggtggaaagtggctctccttcagaaatcactctggatgaatttgaagacttgagcgctctatgcaagaatgatgattctactgttagcatcacagtagttggagcatctggtgaccttgccaagaagaagatatttcctgccctttttgctctctactatgaagattgccttcccaagcatttcaccatctttggctatgcacggagcaagatgacagatgctgaactgaggaacatggttagcaaaacactgacttgcagaatagataaaagggaaaattgtagcgagaaaatggaagagttcctcaaaagatgcttctatcattcaggccaatatgattcagaagagcatttcatagatctagacaagaagctaaagcaacatgagggttccagagtttctaaccgccttttctacttgtcaatacctcctaatatattcttggatgttgtaaaatgtgcaagcaaatcagcatcttcggtgaatggttggacacgagtaattgttgagaagcccttcggccgagactcagaatcctctgctgcattaacaagcggtctgaagcagtaccttgtagaggaccaaattttcaggattgaccattatttgggaaaagaactggtggagaatttgtctgtcctgcgcttctcaaatctcgtttttgagcctctctggtcaagacaatatataagaaatgtgcaacttatattctcagaagactttggtactgaaggacgtggaggatactttgatggctacggtattattcgagacataatgcagaatcatctcattcagatactagctttatttgctatggaaactcctattagtttggaagcagaggatataagaaatgagaaggttaaagttcttcgttccatgaagccgttgcagctggaagatgtggtcgtaggacagtataaaagtcacacaaaaggtggtaccacataccctggctataccgatgataagacagtgcccaaggatagtgtgactccaacgtttgctgctgcggcgcttttcataaataatgccagatgggatggagttccctttcttatgaaagctgggaaagctttgcacacaaaacgagctgagattagggtacagttccgacatgttcctggaaatctctacaaggggagttttggcacagatcttgatagggccactaatgagcttgtgatacgtgtgcaaccggatgaagcaatttacctaaagattaacaacaagattcctggtctcggtatgcgactagataggagtaacttgaatctccattatgccgcaaggtactcaaaggagatacctgatgcttacgagagactcctgcttgatgccatcgaaggagagcgcaggcttttcatccgctcagatgagttggatgctgcatggtcactcttcacacccctcctgaaggagctggaagagaagcggatagctcctgagctctacccatatggaagccgtggacctgtcggggcccactatctcgccgccaagtacaacgtaagatggggtgacttgagtgcggagcactacaaggcatgaaacgaagatggctatatctttgtgatattcttgcttttccatttctgtaagtttgcacgccctcgcagtgagatagatttaagagagaaaaaagatgagaataaggcgggcagttaactaggttggaaggcatgtatccattactagactgaatagctttgttggcataattgcagctgttagggctagtttgcaacctcatgtttccaaggaattttcattttcccaaagaaaattagtttatttttcctttggaaaatgagaatctcttgggaaaatttagttgccaaactagcccttaaaaatatgttgtcaaggaatcagttcatttttcacaggaacagtaaaggaaacggaaaaaaattgccgcatttcaaggcctcggaagtgaccattgatgagtgcaagaaacggttgacatgtttcaactagttaacatttgttggtctcatttgttggctacttcacatgtgtagacgttcaggttggcaagtcggttaggttccgcttcaactagttaacatttgtactgaactaaatgaacacgctgagaacaactatctcgtgggatttgattaatcgttctgtttgtaggctactctaacatgtaaagacgaccttagtgaagagttgagacacgttacaaggaaacaataactgtaggctt

SEQ ID NO: 14162 - DNA, 2307 bp, Zea Mays
atttcatattcgcaagtgattaatacgtgaaagctcccatggatgctgatgtcaagaatgctgtcatacctcctacctcaccaaaggtggaaagtggctctccttcagaaatcactctggatgaatttgaagacttgagcgctctatgcaagaatgatgattctactgttagcatcacagtagttggagcatctggtgaccttgccaagaagaagatatttcctgccctttttgctctctactatgaagattgccttcccaagcatttcaccatctttggctatgcacggagcaagatgacagatgctgaactgaggaacatggttagcaaaacactgacttgcagaatagataaaagggaaaattgtagcgagaaaatggaagagttcctcaaaagatgcttctatcattcaggccaatatgattcagaagagcatttcatagatctagacaagaagctaaagcaacatgagggttccagagtttctaaccgccttttctacttgtcaatacctcctaatatattcttggatgttgtaaaatgtgcaagcaaatcagcatcttcggtgaatggttggacacgagtaattgttgagaagcccttcggccgagactcagaatcctctgctgcattaacaagcggtctgaagcagtaccttgtagaggaccaaattttcaggattgaccattatttgggaaaagaactggtggagaatttgtctgtcctgcgcttctcaaatctcgtttttgagcctctctggtcaagacaatatataagaaatgtgcaacttatattctcagaagactttggtactgaaggacgtggaggatactttgatggctacggtattattcgagacataatgcagaatcatctcattcagatactagctttatttgctatggaaactcctattagtttggaagcagaggatataagaaatgagaaggttaaagttcttcgttccatgaagccgttgcagctggaagatgtggtcgtaggacagtataaaagtcacacaaaaggtggtaccacataccctggctataccgatgataagacagtgcccaaggatagtgtgactccaacgtttgctgctgcggcgcttttcataaataatgccagatgggatggagttccctttcttatgaaagctgggaaagctttgcacacaaaacgagctgagattagggtacagttccgacatgttcctggaaatctctacaaggggagttttggcacagatcttgatagggccactaatgagcttgtgatacgtgtgcaaccggatgaagcaatttacctaaagattaacaacaagattcctggtctcggtatgcgactagataggagtaacttgaatctccattatgccgcaaggtactcaaaggagatacctgatgcttacgagagactcctgcttgatgccatcgaaggagagcgcaggcttttcatccgctcagatgagttggatgctgcatggtcactcttcacacccctcctgaaggagctggaagagaagcggatagctcctgagctctacccatatggaagccgtggacctgtcggggcccactatctcgccgccaagtacaacgtaagatggggtgacttgagtgcggagcactacaaggcatgaaacgaagatggctatatctttgtgatattcttgcttttccatttctgtaagtttgcacgccctcgcagtgagatagatttaagagagaaaaaagatgagaataaggcgggcagttaactaggttggaaggcatgtatccattactagactgaatagctttgttggcataattgcagctgttagggctagtttgcaacctcatgtttccaaggaattttcattttcccaaagaaaattagtttatttttcctttggaaaatgagaatctcttgggaaaatttagttgccaaactagcccttaaaaatatgttgtcaaggaatcagttcatttttcacaggaacagtaaaggaaacggaaaaaaattgccgcatttcaaggcctcggaagtgaccattgatgagtgcaagaaacggttgacatgtttcaactagttaacatttgttggtctcatttgttggctacttcacatgtgtagacgttcaggttggcaagtcggttaggttccgcttcaactagttaacatttgtactgaactaaatgaacacgctgagaacaactatctcgtgggatttgattaatcgttctgtttgtaggctactctaacatgtaaagacgaccttagtgaagagttgagacacgttacaaggaaacaataactgtaggctt

SEQ ID NO: 14163 - DNA, 745 bp, Zea Mays
gctacagaagccatctgcacgctgcaacaacagcctctacgctacggttccttctatcctgaaggggcacgctactcccattccgccgcgcccgtagtcgccggtcctcttgctgcttcgtgctcccgcgcaatcagtgaatacctccacgcgcaacgccgcccgtcgactcctccatggaagctgatccgtcgccgccgtcggcgtgcgcgctgactgagtagctcgtggagaaggtcgtgctgcgcaccccatctgctgacccggcgatcctcgtccatgctgcactcgtctgcgcacgctggcgcatcgtgaagggcccgcggttgcgccgatgctgccgcaaccttcaccgcgagtgcgagggtcgcagcccccgatgcttggcttcctccccagcgccggcgcggggattcgcttcgtgctcacgtccaccttcggccccgcacgctggtggatggcgcgtgctggtcaccctccacggctgcgccctcctgtgcagtaacaccggcctccacgcgtccgtcgactctgattgatgcagttaaagagctggacgaatagatgagatggataagaagcaggttgaacttcctctgaagcaactggaaaccatcttgacataataaaaccaagctctaatatcattgtaagaatctatggtaggttttgttagttttactgataatgtttttcctctcatttattgctaatgaatggtcaatgaaaaaccaaaattttccat

SEQ ID NO: 14164 - DNA, 1785 bp, Zea Mays
gctacagaagccatctgcacgctgcaacaacagcctctacgctacggttccttctatcctgaaggggcacgctactcccattccgccgcgcccgtagtcgccggtcctcttgctgcttcgtgctcccgcgcaatcagtgaatacctccacgcgcaacgccgcccgtcgactcctccatggaagctgatccgtcgccgccgtcggcgtgcgcgctgactgagtagctcgtggagaaggtcgtgctgcgcaccccatctgctgacccggcgatcctcgtccatgctgcactcgtctgcgcacgctggcgcatcgtgaagggcccgcggttgcgccgatgctgccgcaaccttcaccgcgagtgcgagggtcgcagcccccgatgcttggcttcctccccagcgccggcgcggggattcgcttcgtgctcacgtccaccttcggccccgcacgctggtggatggcgcgtgctggtcaccctccacggctgcgccctcctgtgcagtaacaccggcctccacgcgtccgtcgactgtgagcttgttgtttgggatcccggccgccggacataatgttgtgggacccacaggctggccggtaaaacggttggcctttattacttccgacgggccgaggcggccgtcagagataggttatttccgacggcggccgtcggacataaggctattttcgacgccttatgtccgacggcataaaaccgtcggacataggttatctccgacggttcaatccttatgtccgacggctttggccgtcggaaattgttccttttactgtagtgcatatactcgtcggaggagggcgtatcactttttctggtcagcagtggcattccgaattttaagccaataatattgaaactaaagataatggtgcatatagcatcaaatatgcccaagtggtcaaatctgcaattctgatttctgaatgtgaactctattttgctagaaacctcagattctgaagttgataaactgtccttggggtattcgaatttgttgttgcagttaactctgaataccgcacagcagctaagtgcagctgattgatgcagttaaagagctggacgaatagatgagatggataagaagcaggttgaacttcctctgaagcaactggaaaccatcttgacataataaaaccaagctctaatatcattgtaagaatctatgttaccacagctatgccttcattgcgtgccggtcaattcatgcggtgaacaaactaaatccgtcgttcgtgtaccgtctgttggagaagttcttcaaggatcaggaacgttactataatcagccaacatacgaaaaatcaagagctacagtggtacggttgatgaaataaccaagaaccttgttgtgcccatcatcggtgaaactaatttggcggcattcagagcaggttttaacgattcacattctgatcaggctacaaggatatctttcaagaacggctgtgcacgaggtgtgaccgggacaccctacttctttgtgaatggcatacccatcaacgattcaggttctcctctggaatacaaggactggatttctatcctgggtcccttggttggaaagatgtagcgcggttgctagtttgttcatcaataaagtcctagtagagagtaaacagacaaaagctgaataataaataacattaatcagcatcgtcattctcagaataaaaagagtgctaactctcatcggattcaaattgtgtacaagcaacagttcattctttcaggcaacatatcatgcgtgtgcaactctcccg

SEQ ID NO: 14165 - DNA, 1832 bp, Zea Mays
gctacagaagccatctgcacgctgcaacaacagcctctacgctacggttccttctatcctgaaggggcacgctactcccattccgccgcgcccgtagtcgccggtcctcttgctgcttcgtgctcccgcgcaatcagtgaatacctccacgcgcaacgccgcccgtcgactcctccatggaagctgatccgtcgccgccgtcggcgtgcgcgctgactgagtagctcgtggagaaggtcgtgctgcgcaccccatctgctgacccggcgatcctcgtccatgctgcactcgtctgcgcacgctggcgcatcgtgaagggcccgcggttgcgccgatgctgccgcaaccttcaccgcgagtgcgagggtcgcagcccccgatgcttggcttcctccccagcgccggcgcggggattcgcttcgtgctcacgtccaccttcggccccgcacgctggtggatggcgcgtgctggtcaccctccacggctgcgccctcctgtgcagtaacaccggcctccacgcgtccgtcgactgtgagcttgttgtttgggatcccggccgccggacataatgttgtgggacccacaggctggccggtaaaacggttggcctttattacttccgacgggccgaggcggccgtcagagataggttatttccgacggcggccgtcggacataaggctattttcgacgccttatgtccgacggcataaaaccgtcggacataggttatctccgacggttcaatccttatgtccgacggctttggccgtcggaaattgttccttttactgtagtgcatatactcgtcggaggagggcgtatcactttttctggtcagcagtggcattccgaattttaagccaataatattgaaactaaagataatggtgcatatagcatcaaatatgcccaagtggtcaaatctgcaattctgatttctgaatgtgaactctattttgctagaaacctcagattctgaagttgataaactgtccttggggtattcgaatttgttgttgcagttaactctgaataccgcacagcagctaagctgattgatgcagttaaagagctggacgaatagatgagatggataagaagcaggttgaacttcctctgaagcaactggaaaccatcttgacataataaaaccaagctctaatatcattctgtgccggccggcccaggatcaatcaggatacacacgccctgacgcccatgaagtcgttgagagttaccacagctatgccttcattgcgtgccggtcaattcatgcggtgaacaaactaaatccgtcgttcgtgtaccgtctgttggagaagttcttcaaggatcaggaacgttactataatcagccaacatacgaaaaatcaagagctacagtggtacggttgatgaaataaccaagaaccttgttgtgcccatcatcggtgaaactaatttggcggcattcagagcaggttttaacgattcacattctgatcaggctacaaggatatctttcaagaacggctgtgcacgaggtgtgaccgggacaccctacttctttgtgaatggcatacccatcaacgattcaggttctcctctggaatacaaggactggatttctatcctgggtcccttggttggaaagatgtagcgcggttgctagtttgttcatcaataaagtcctagtagagagtaaacagacaaaagctgaataataaataacattaatcagcatcgtcattctcagaataaaaagagtgctaactctcatcggattcaaattgtgtacaagcaacagttcattctttcaggcaacatatcatgcgtgtgcaactctcccg

SEQ ID NO: 14166 - DNA, 5096 bp, Zea Mays
agcccgtagtctagaaccacacgccacggccacgcccgccgagctcacccgtacccgggatcgcgacggagaccccaccgcggccaattttatttttctcgcgggaaggaagaaaataaattctcgctcacggtcacgggctcaaggtcacggcagtcaaaatggaagatagggatgaggagcagaagaggaaacacagcgtgccgtggactcatctctcgctggccgctgctgcagctgcggagctgccactgcctccgcgggctccaccggggcaaatcgcccctgctggagaggctggagcgtctcttcgccttctctctctactttctctgtcctcgccactcacaagtcctcgccagcggcagcaagcacactgcgcttcctcttccgctccctccactgtgtgactcgcccatcatccatcaccctcgccgtgcgcgcgcgggcgctaggctttggagatctctcgcttggcttccgagatccgcgccgatccgcccgccgccgcattctcctcgggcgtggcggttgcgtgcgccgccgccgcacgatccgtttccttccggcgctgaatcgggggacgctgccagcgagcggggcgttccggtttctctgctcgcttccgcgctcgtggagcagagcaatggttcggagtgaccggcggcagcgacgatgaggtgcgtcgcgtggtgggcggtccttctcgcggccgcctcgttggttggcgcttgggggaaccacactgtatcggcgctcacgttggtatcggagacgtggtacgatgaccgcttggcgctggttcctgttgagtttggcggcggtgacggcgaggatgccgcggggcttcgcagtgagctcccgtgccagacatactccgcgaactcgaggtcctgcgaggaattgaacggctccgggtcgttcaacaccacctgcgtcataagttccagctcttcgctggacggtgatctgtgcgtatatggcgacgggagtgtggagattcggccccatgtcaagatcatctgccccttcagggggtgctacatcaccgtcaatgtctcagggagcgtcaggattggtgagcatgttgaggtgattgcagggtcggtaagcctgtacgcggccaatgtgtcgttggatcaccactccaccatcaacaccactgcactcgccggtgagcctcctcctcagacgagtgggacgccgcacagcctggaaggggcaggtggtggacatggtgggaggggtgcatcatgtaaagtgtcaaatgacaccaactggggaggtgatgtgtacgcgtggtcgacattggattggccttggagctatggcagcatgggtggcagcatgtccgccggtcagtttggagggtacggtggaggccgtgtcatgcttaggacatccggctttctgaatgttgatggacaggtgcttgctgaaggtggtgttggcagtctcaagggtggcggcggctctgggggaagcattataatacatgctttcaagctatctggaaatggcacaataagtgctgctggtggtaatggatggggtggcggtggcggtggaaggatatctctggactgttacagcattcaacaagatttggaaataacagttcatggtggccagagttttgggtgtgctcagaatgctggtgcagcaggtacaatatatgatagttcactgcagaccctaaaggtcagcaatgggaatttcaccacacgcacagaaactccattgcttggtttcccaatgactagactttggtccaatgtgcttgtggagcgctatgcaaaagtgctggttcccttgttgtggtccagagtacaggtgacaggtcaaattagattactaaccaagggtagtatctgctttgggttatcagaaaatccaatatcagaatttgagctggttgctgaagaacttttaatgagtgactctgttataaaggtctatggagctttcagaatgtatgttaaagtgctcttgatgtgggattcaaatattcagattgatggcggtgctaaggatgttgttcttgcatctatgcttgaggcaagaaaccttgtagtcctcaggcatgggtcagtgatatcttccaacactgatttaatggtatatggacaaggacttcttaacttgagtggccctggtgatggaatcaaagctaagcgactgtttctgtctctattttacaacattgaggtaagactacaatatatctagtactctgttattgtaactcagccagggagggaaagaccgccctcccggtacaatgcctgaggccggcactcaaggcgcacacatcccgctgatggctaagaagagactgttcatgttttgtcatgtcaaaattgcatgtgataagagttttgttctaattttttggactctccctttaccatgggcatgtgagcaggttggccctggttcccttgttcaggctccactcgacgaggctgttccaagcaacttggatgcactttcacgctgtgaaagtaaaacatgtcctagtgagcttattaccccacctgatgattgccatgtaaaccgctccttgtcatttacactacaaatttgtcgtgttgaagacataactgtcagtggcatagttaggggaagtataattcatattcatagagcaaggactgtgactattgcaaaggatggcacaattagtgcctcagagttaggttgcaaggaaggcatcggaaaaggaaagtttctcaagtatggagctggtggtggtgctgggcatggaggccgaggtggcacagggatttacaatggaatgagaagtgaaggaggcctagaatatggcaatgctgatcttccatgtgagctaggaagtggtagtggcggttctgctttgtcagcagataacactgccggtgggggattaattgttattggatccatgaaatggccactttcaaggttgctagtttatggctcgctgaactctgacggggaaagccatagaggcacatcgggaaattcaaatgggacttttaaaggtggagttggtggtggttctggaggatcaattcttttatttcttcaatggtttctgctagagaaaaactcatcattatcggcatctggtggcaatggaggtgtatacggtggtggtggaggtggtggtggtagaatacatttccattggtcatatattgctactggagatgaatatgttcacattgcttctgtcaatggcacaatagtatcaagtggtggatctggtaagaatgatggacattgtggagaagatggaacagtaacaggaaagaaatgccccaagggcctatatggaacattttgcactgaatgcccagttggtacatataaaaacgttgttgggtccaattcatctctgtgcatcccgtgttctgtggatagtcttccaaaccgtgctgaattcatatatataagaggtggtgttaccgagctgccatgcccgtataggtgcatatctgataagtacaagatgccaaactgttacacaccacttgaggaacttatgtatacttttggtggtccttggtctttttcaatcatcctttctttaacagttattcttttggcacttgtcttaagtgctctaagaattaagattggtgagagtgatatcacctaccgggcaactaatgcaatccacaatgatggttgttctttcccctttttgctttctttggccgaggtaccaggggcaagcagggcagaagaaactcagagccatgtccacagaatgtacttcatgggacctaatactttccgagagccctggcatctcccctactcacctcctgatgcgataattggaattgtttatgaagatgctttcaaccgttttattgatgagatcaatttggtggctgcatatgagtggtgggaaggatctatacatagtatactttctgttcttgcgtatccttgtgcctggtcttggaagcaatggcgcagaaggaaaaaaaaccatcgtcttcaagagtatgttaaatctgaatatgatcattcatgtctccgctcctgcaggtcacgggctctctataaaggcttgaaggttggttcaactccagacttgatggttgcgtacatagatttctttctcgggggtgatgagaaacgacttgatgtagcatccaccattcagaagaggtttcccatgtgtctaatttttggtggtgatggaagctatatgtccccatactatctacatagtgatacattgctatcaaatcttcttggccagtatgtatctactgcgatctggaatagattagtcgctggtttgaatgctcaattaaggacagtaagacaaggaagtgtccgttctactttgggccctgttgtttcttggatcaacagtcatgggaatccccaacttgagagacatggtgttcgagtggagttagggtggttccagtccactgcttctgcatattaccagcttggtattatcgtagctgtgaatgagaacttctacaagaatctccgccaccatgagcatgccacagaattttgtgaacgctcaaggaagaacgttgcagttccacttcaggatttcaatcaggcaaatctggatcagccttgcacaagctatgctgtttctagaaagcgattgacaggtggagtcaatggtgggatcataaatgagggaacgctcaagtcactgcactataaaagagactatctctttccattctcattgttattgcgtaattccaggcctctaggctatgcggaaacattgcaattgctcatttgtattgtacttctgggtgatttctccatcaccctgcttatgcttgtacagtactattggatatctgtcggagcttttcttgccatactgctcatcccccctcttgctttgctttcaccttttcttgctggtctcaatgcactttttagccgaggactaaaacgatcttcagtgacccgcatttttgcactttggaacattacttctgttgtaaacattcaatcatatacggctctttgtatttttggctctcttctttggcggtgtcctcagttcatcaagtatacaacacaaaaagtgatgtttttgctgtggatccaaaaaa

SEQ ID NO: 14167 - DNA, 5821 bp, Zea Mays
agcccgtagtctagaaccacacgccacggccacgcccgccgagctcacccgtacccgggatcgcgacggagaccccaccgcggccaattttatttttctcgcgggaaggaagaaaataaattctcgctcacggtcacgggctcaaggtcacggcagtcaaaatggaagatagggatgaggagcagaagaggaaacacagcgtgccgtggactcatctctcgctggccgctgctgcagctgcggagctgccactgcctccgcgggctccaccggggcaaatcgcccctgctggagaggctggagcgtctcttcgccttctctctctactttctctgtcctcgccactcacaagtcctcgccagcggcagcaagcacactgcgcttcctcttccgctccctccactgtgtgactcgcccatcatccatcaccctcgccgtgcgcgcgcgggcgctaggctttggagatctctcgcttggcttccgagatccgcgccgatccgcccgccgccgcattctcctcgggcgtggcggttgcgtgcgccgccgccgcacgatccgtttccttccggcgctgaatcgggggacgctgccagcgagcggggcgttccggtttctctgctcgcttccgcgctcgtggagcagagcaatggttcggagtgaccggcggcagcgacgatgaggtgcgtcgcgtggtgggcggtccttctcgcggccgcctcgttggttggcgcttgggggaaccacactgtatcggcgctcacgttggtatcggagacgtggtacgatgaccgcttggcgctggttcctgttgagtttggcggcggtgacggcgaggatgccgcggggcttcgcagtgagctcccgtgccagacatactccgcgaactcgaggtcctgcgaggaattgaacggctccgggtcgttcaacaccacctgcgtcataagttccagctcttcgctggacggtgatctgtgcgtatatggcgacgggagtgtggagattcggccccatgtcaagatcatctgccccttcagggggtgctacatcaccgtcaatgtctcagggagcgtcaggattggtgagcatgttgaggtgattgcagggtcggtaagcctgtacgcggccaatgtgtcgttggatcaccactccaccatcaacaccactgcactcgccggtgagcctcctcctcagacgagtgggacgccgcacagcctggaaggggcaggtggtggacatggtgggaggggtgcatcatgtaaagtgtcaaatgacaccaactggggaggtgatgtgtacgcgtggtcgacattggattggccttggagctatggcagcatgggtggcagcatgtccgccggtcagtttggagggtacggtggaggccgtgtcatgcttaggacatccggctttctgaatgttgatggacaggtgcttgctgaaggtggtgttggcagtctcaagggtggcggcggctctgggggaagcattataatacatgctttcaagctatctggaaatggcacaataagtgctgctggtggtaatggatggggtggcggtggcggtggaaggatatctctggactgttacagcattcaacaagatttggaaataacagttcatggtggccagagttttgggtgtgctcagaatgctggtgcagcaggtacaatatatgatagttcactgcagaccctaaaggtcagcaatgggaatttcaccacacgcacagaaactccattgcttggtttcccaatgactagactttggtccaatgtgcttgtggagcgctatgcaaaagtgctggttcccttgttgtggtccagagtacaggtgacaggtcaaattagattactaaccaagggtagtatctgctttgggttatcagaaaatccaatatcagaatttgagctggttgctgaagaacttttaatgagtgactctgttataaaggtctatggagctttcagaatgtatgttaaagtgctcttgatgtgggattcaaatattcagattgatggcggtgctaaggatgttgttcttgcatctatgcttgaggcaagaaaccttgtagtcctcaggcatgggtcagtgatatcttccaacactgatttaatggtatatggacaaggacttcttaacttgagtggccctggtgatggaatcaaagctaagcgactgtttctgtctctattttacaacattgaggtaagactacaatatatctagtactctgttattgtaactcagccagggagggaaagaccgccctcccggtacaatgcctgaggccggcactcaaggcgcacacatcccgctgatggctaagaagagactgttcatgttttgtcatgtcaaaattgcatgtgataagagttttgttctaattttttggactctccctttaccatgggcatgtgagcaggttggccctggttcccttgttcaggctccactcgacgaggctgttccaagcaacttggatgcactttcacgctgtgaaagtaaaacatgtcctagtgagcttattaccccacctgatgattgccatgtaaaccgctccttgtcatttacactacaaatttgtcgtgttgaagacataactgtcagtggcatagttaggggaagtataattcatattcatagagcaaggactgtgactattgcaaaggatggcacaattagtgcctcagagttgcaaggaaggcatcggaaaaggaaagtttctcaagtatggagctggtggtggtgctgggcatggaggccgaggtggcacagggatttacaatggaatgagaagtgaaggaggcctagaatatggcaatgctgatcttccatgtgagctaggaagtggtagtggcggttctgctttgtcagcagataacactgccggtgggggattaattgttattggatccatgaaatggccactttcaaggttgctagtttatggctcgctgaactctgacggggaaagccatagaggcacatcgggaaattcaaatgggacttttaaaggtggagttggtggtggttctggaggatcaattcttttatttcttcaatggtttctgctagagaaaaactcatcattatcggcatctggtggcaatggaggtgtatacggtggtggtggaggtggtggtggtagaatacatttccattggtcatatattgctactggagatgaatatgttcacattgcttctgtcaatggcacaatagtatcaagtggtggatctggtaagaatgatggacattgtggagaagatggaacagtaacaggaaagaaatgccccaagggcctatatggaacattttgcactgaatgcccagttggtacatataaaaacgttgttgggtccaattcatctctgtgcatcccgtgttctgtggatagtcttccaaaccgtgctgaattcatatatataagaggtggtgttaccgagctgccatgcccgtataggtgcatatctgataagtacaagatgccaaactgttacacaccacttgaggaacttatgtatacttttggtggtccttggtctttttcaatcatcctttctttaacagttattcttttggcacttgtcttaagtgctctaagaattaagattggtgagagtgatatcacctaccgggcaactaatgcaatccacaatgatggttgttctttcccctttttgctttctttggccgaggtaccaggggcaagcagggcagaagaaactcagagccatgtccacagaatgtacttcatgggacctaatactttccgagagccctggcatctcccctactcacctcctgatgcgataattggaattgtttatgaagatgctttcaaccgttttattgatgagatcaatttggtggctgcatatgagtggtgggaaggatctatacatagtatactttctgttcttgcgtatccttgtgcctggtcttggaagcaatggcgcagaaggaaaaaaaaccatcgtcttcaagagtatgttaaatctgaatatgatcattcatgtctccgctcctgcaggtcacgggctctctataaaggcttgaaggttggttcaactccagacttgatggttgcgtacatagatttctttctcgggggtgatgagaaacgacttgatgtagcatccaccattcagaagaggtttcccatgtgtctaatttttggtggtgatggaagctatatgtccccatactatctacatagtgatacattgctatcaaatcttcttggccagtatgtatctactgcgatctggaatagattagtcgctggtttgaatgctcaattaaggacagtaagacaaggaagtgtccgttctactttgggccctgttgtttcttggatcaacagtcatgggaatccccaacttgagagacatggtgttcgagtggagttagggtggttccagtccactgcttctgcatattaccagcttggtattatcgtagctgtgaatgagaacttctacaagaatctccgccaccatgagcatgccacagaattttgtgaacgctcaaggaagaacgttgcagttccacttcaggatttcaatcaggcaaatctggatcagccttgcacaagctatgctgtttctagaaagcgattgacaggtggagtcaatggtgggatcataaatgagggaacgctcaagtcactgcactataaaagagactatctctttccattctcattgttattgcgtaattccaggcctctaggctatgcggaaacattgcaattgctcatttgtattgtacttctgggtgatttctccatcaccctgcttatgcttgtacagtactattggatatctgtcggagcttttcttgccatactgctcatcccccctcttgctttgctttcaccttttcttgctggtctcaatgcactttttagccgaggactaaaacgatcttcagtgacccgcatttttgcactttggaacattacttctgttgtaaacattattgtagcaatcatatacggctctttgtatttttggctctcttctttggcggtgtcctcagttcatcaagtatacaacacaaaaagcttcaagagtagagaagacaatgaatggtggatactgcctactatcctttttctcatcaaatcactgcaagctggactagttaactggcacgttgccaatttggaaatccaggactactcgttatttagcccggacccagatagattctgggcaatgtagtcgcctgcagcaagctaagaattgcagaaagcatggtttagtgatcgcaagaatggcaagtattaattattggatgctgaatatttgcgttttgtcccttgcaacgtcatcagcccaatacaatctctgaatctgaaggggtctaacacgctggctggaacttccttctatttatgggaagcgctcctgcgtagtgcactagtgcagatatgttcattttctttttctcagtttttttcccgtcttggtcgtgtgcctagaataggtctgtcgctcggtggggattagatttgtgcattttctttggttcaaattaaaccgttgattcgagtgtacagcaagaaactattgtgattgtcgctctagatgtacatcactgtaagtataatagtagaaccatttcaactgtatacaatcctcaaaggaaagtatgtttctttctattttctttttcctattgtcatcgttgccaatttgtttccaagtaactgtcgttttcaattttgctcgctaacagaacaacatcgtttggtaagaaaatggggcaaaagtcccaacggattgagtaaactccgtttccttagcactct

SEQ ID NO: 14168 - DNA, 5604 bp, Zea Mays
agcccgtagtctagaaccacacgccacggccacgcccgccgagctcacccgtacccgggatcgcgacggagaccccaccgcggccaattttatttttctcgcgggaaggaagaaaataaattctcgctcacggtcacgggctcaaggtcacggcagtcaaaatggaagatagggatgaggagcagaagaggaaacacagcgtgccgtggactcatctctcgctggccgctgctgcagctgcggagctgccactgcctccgcgggctccaccggggcaaatcgcccctgctggagaggctggagcgtctcttcgccttctctctctactttctctgtcctcgccactcacaagtcctcgccagcggcagcaagcacactgcgcttcctcttccgctccctccactgtgtgactcgcccatcatccatcaccctcgccgtgcgcgcgcgggcgctaggctttggagatctctcgcttggcttccgagatccgcgccgatccgcccgccgccgcattctcctcgggcgtggcggttgcgtgcgccgccgccgcacgatccgtttccttccggcgctgaatcgggggacgctgccagcgagcggggcgttccggtttctctgctcgcttccgcgctcgtggagcagagcaatggttcggagtgaccggcggcagcgacgatgaggtgcgtcgcgtggtgggcggtccttctcgcggccgcctcgttggttggcgcttgggggaaccacactgtatcggcgctcacgttggtatcggagacgtggtacgatgaccgcttggcgctggttcctgttgagtttggcggcggtgacggcgaggatgccgcggggcttcgcagtgagctcccgtgccagacatactccgcgaactcgaggtcctgcgaggaattgaacggctccgggtcgttcaacaccacctgcgtcataagttccagctcttcgctggacggtgatctgtgcgtatatggcgacgggagtgtggagattcggccccatgtcaagatcatctgccccttcagggggtgctacatcaccgtcaatgtctcagggagcgtcaggattggtgagcatgttgaggtgattgcagggtcggtaagcctgtacgcggccaatgtgtcgttggatcaccactccaccatcaacaccactgcactcgccggtgagcctcctcctcagacgagtgggacgccgcacagcctggaaggggcaggtggtggacatggtgggaggggtgcatcatgtaaagtgtcaaatgacaccaactggggaggtgatgtgtacgcgtggtcgacattggattggccttggagctatggcagcatgggtggcagcatgtccgccggtcagtttggagggtacggtggaggccgtgtcatgcttaggacatccggctttctgaatgttgatggacaggtgcttgctgaaggtggtgttggcagtctcaagggtggcggcggctctgggggaagcattataatacatgctttcaagctatctggaaatggcacaataagtgctgctggtggtaatggatggggtggcggtggcggtggaaggatatctctggactgttacagcattcaacaagatttggaaataacagttcatggtggccagagttttgggtgtgctcagaatgctggtgcagcaggtacaatatatgatagttcactgcagaccctaaaggtcagcaatgggaatttcaccacacgcacagaaactccattgcttggtttcccaatgactagactttggtccaatgtgcttgtggagcgctatgcaaaagtgctggttcccttgttgtggtccagagtacaggtgacaggtcaaattagattactaaccaagggtagtatctgctttgggttatcagaaaatccaatatcagaatttgagctggttgctgaagaacttttaatgagtgactctgttataaaggtctatggagctttcagaatgtatgttaaagtgctcttgatgtgggattcaaatattcagattgatggcggtgctaaggatgttgttcttgcatctatgcttgaggcaagaaaccttgtagtcctcaggcatgggtcagtgatatcttccaacactgatttaatggtatatggacaaggacttcttaacttgagtggccctggtgatggaatcaaagctaagcgactgtttctgtctctattttacaacattgaggttggccctggttcccttgttcaggctccactcgacgaggctgttccaagcaacttggatgcactttcacgctgtgaaagtaaaacatgtcctagtgagcttattaccccacctgatgattgccatgtaaaccgctccttgtcatttacactacaaatttgtcgtgttgaagacataactgtcagtggcatagttaggggaagtataattcatattcatagagcaaggactgtgactattgcaaaggatggcacaattagtgcctcagagttgcaaggaaggcatcggaaaaggaaagtttctcaagtatggagctggtggtggtgctgggcatggaggccgaggtggcacagggatttacaatggaatgagaagtgaaggaggcctagaatatggcaatgctgatcttccatgtgagctaggaagtggtagtggcggttctgctttgtcagcagataacactgccggtgggggattaattgttattggatccatgaaatggccactttcaaggttgctagtttatggctcgctgaactctgacggggaaagccatagaggcacatcgggaaattcaaatgggacttttaaaggtggagttggtggtggttctggaggatcaattcttttatttcttcaatggtttctgctagagaaaaactcatcattatcggcatctggtggcaatggaggtgtatacggtggtggtggaggtggtggtggtagaatacatttccattggtcatatattgctactggagatgaatatgttcacattgcttctgtcaatggcacaatagtatcaagtggtggatctggtaagaatgatggacattgtggagaagatggaacagtaacaggaaagaaatgccccaagggcctatatggaacattttgcactgaatgcccagttggtacatataaaaacgttgttgggtccaattcatctctgtgcatcccgtgttctgtggatagtcttccaaaccgtgctgaattcatatatataagaggtggtgttaccgagctgccatgcccgtataggtgcatatctgataagtacaagatgccaaactgttacacaccacttgaggaacttatgtatacttttggtggtccttggtctttttcaatcatcctttctttaacagttattcttttggcacttgtcttaagtgctctaagaattaagattggtgagagtgatatcacctaccgggcaactaatgcaatccacaatgatggttgttctttcccctttttgctttctttggccgaggtaccaggggcaagcagggcagaagaaactcagagccatgtccacagaatgtacttcatgggacctaatactttccgagagccctggcatctcccctactcacctcctgatgcgataattggaattgtttatgaagatgctttcaaccgttttattgatgagatcaatttggtggctgcatatgagtggtgggaaggatctatacatagtatactttctgttcttgcgtatccttgtgcctggtcttggaagcaatggcgcagaaggaaaaaaaaccatcgtcttcaagagtatgttaaatctgaatatgatcattcatgtctccgctcctgcaggtcacgggctctctataaaggcttgaaggttggttcaactccagacttgatggttgcgtacatagatttctttctcgggggtgatgagaaacgacttgatgtagcatccaccattcagaagaggtttcccatgtgtctaatttttggtggtgatggaagctatatgtccccatactatctacatagtgatacattgctatcaaatcttcttggccagtatgtatctactgcgatctggaatagattagtcgctggtttgaatgctcaattaaggacagtaagacaaggaagtgtccgttctactttgggccctgttgtttcttggatcaacagtcatgggaatccccaacttgagagacatggtgttcgagtggagttagggtggttccagtccactgcttctgcatattaccagcttggtattatcgtagctgtgaatgagaacttctacaagaatctccgccaccatgagcatgccacagaattttgtgaacgctcaaggaagaacgttgcagttccacttcaggatttcaatcaggcaaatctggatcagccttgcacaagctatgctgtttctagaaagcgattgacaggtggagtcaatggtgggatcataaatgagggaacgctcaagtcactgcactataaaagagactatctctttccattctcattgttattgcgtaattccaggcctctaggctatgcggaaacattgcaattgctcatttgtattgtacttctgggtgatttctccatcaccctgcttatgcttgtacagtactattggatatctgtcggagcttttcttgccatactgctcatcccccctcttgctttgctttcaccttttcttgctggtctcaatgcactttttagccgaggactaaaacgatcttcagtgacccgcatttttgcactttggaacattacttctgttgtaaacattattgtagcaatcatatacggctctttgtatttttggctctcttctttggcggtgtcctcagttcatcaagtatacaacacaaaaagcttcaagagtagagaagacaatgaatggtggatactgcctactatcctttttctcatcaaatcactgcaagctggactagttaactggcacgttgccaatttggaaatccaggactactcgttatttagcccggacccagatagattctgggcaatgtagtcgcctgcagcaagctaagaattgcagaaagcatggtttagtgatcgcaagaatggcaagtattaattattggatgctgaatatttgcgttttgtcccttgcaacgtcatcagcccaatacaatctctgaatctgaaggggtctaacacgctggctggaacttccttctatttatgggaagcgctcctgcgtagtgcactagtgcagatatgttcattttctttttctcagtttttttcccgtcttggtcgtgtgcctagaataggtctgtcgctcggtggggattagatttgtgcattttctttggttcaaattaaaccgttgattcgagtgtacagcaagaaactattgtgattgtcgctctagatgtacatcactgtaagtataatagtagaaccatttcaactgtatacaatcctcaaaggaaagtatgtttctttctattttctttttcctattgtcatcgttgccaatttgtttccaagtaactgtcgttttcaattttgctcgctaacagaacaacatcgtttggtaagaaaatggggcaaaagtcccaacggattgagtaaactccgtttccttagcactct

SEQ ID NO: 14169 - DNA, 5705 bp, Zea Mays
agcccgtagtctagaaccacacgccacggccacgcccgccgagctcacccgtacccgggatcgcgacggagaccccaccgcggccaattttatttttctcgcgggaaggaagaaaataaattctcgctcacggtcacgggctcaaggtcacggcagtcaaaatggaagatagggatgaggagcagaagaggaaacacagcgtgccgtggactcatctctcgctggccgctgctgcagctgcggagctgccactgcctccgcgggctccaccggggcaaatcgcccctgctggagaggctggagcgtctcttcgccttctctctctactttctctgtcctcgccactcacaagtcctcgccagcggcagcaagcacactgcgcttcctcttccgctccctccactgtgtgactcgcccatcatccatcaccctcgccgtgcgcgcgcgggcgctaggctttggagatctctcgcttggcttccgagatccgcgccgatccgcccgccgccgcattctcctcgggcgtggcggttgcgtgcgccgccgccgcacgatccgtttccttccggcgctgaatcgggggacgctgccagcgagcggggcgttccggtttctctgctcgcttccgcgctcgtggagcagagcaatggttcggagtgaccggcggcagcgacgatgaggtgcgtcgcgtggtgggcggtccttctcgcggccgcctcgttggttggcgcttgggggaaccacactgtatcggcgctcacgttggtatcggagacgtggtacgatgaccgcttggcgctggttcctgttgagtttggcggcggtgacggcgaggatgccgcggggcttcgcagtgagctcccgtgccagacatactccgcgaactcgaggtcctgcgaggaattgaacggctccgggtcgttcaacaccacctgcgtcataagttccagctcttcgctggacggtgatctgtgcgtatatggcgacgggagtgtggagattcggccccatgtcaagatcatctgccccttcagggggtgctacatcaccgtcaatgtctcagggagcgtcaggattggtgagcatgttgaggtgattgcagggtcggtaagcctgtacgcggccaatgtgtcgttggatcaccactccaccatcaacaccactgcactcgccggtgagcctcctcctcagacgagtgggacgccgcacagcctggaaggggcaggtggtggacatggtgggaggggtgcatcatgtaaagtgtcaaatgacaccaactggggaggtgatgtgtacgcgtggtcgacattggattggccttggagctatggcagcatgggtggcagcatgtccgccggtcagtttggagggtacggtggaggccgtgtcatgcttaggacatccggctttctgaatgttgatggacaggtgcttgctgaaggtggtgttggcagtctcaagggtggcggcggctctgggggaagcattataatacatgctttcaagctatctggaaatggcacaataagtgctgctggtggtaatggatggggtggcggtggcggtggaaggatatctctggactgttacagcattcaacaagatttggaaataacagttcatggtggccagagttttgggtgtgctcagaatgctggtgcagcaggtacaatatatgatagttcactgcagaccctaaaggtcagcaatgggaatttcaccacacgcacagaaactccattgcttggtttcccaatgactagactttggtccaatgtgcttgtggagcgctatgcaaaagtgctggttcccttgttgtggtccagagtacaggtgacaggtcaaattagattactaaccaagggtagtatctgctttgggttatcagaaaatccaatatcagaatttgagctggttgctgaagaacttttaatgagtgactctgttataaaggtctatggagctttcagaatgtatgttaaagtgctcttgatgtgggattcaaatattcagattgatggcggtgctaaggatgttgttcttgcatctatgcttgaggcaagaaaccttgtagtcctcaggcatgggtcagtgatatcttccaacactgatttaatggtatatggacaaggacttcttaacttgagtggccctggtgatggaatcaaagctaagcgactgtttctgtctctattttacaacattgaggtaagactacaatatatctagtactctgttattgtaactcagccagggagggaaagaccgccctcccggtacaatgcctgaggccggcactcaaggcgcacacatcccgctgatggctaagaagagactgttcatgttttgtcatgtcaaaattgcatgtgataagagttttgttctaattttttggactctccctttaccatgggcatgtgagcaggttggccctggttcccttgttcaggctccactcgacgaggctgttccaagcaacttggatgcactttcacgctgtgaaagtaaaacatgtcctagtgagcttattaccccacctgatgattgccatgtaaaccgctccttgtcatttacactacaaatttgtcgtgttgaagacataactgtcagtggcatagttaggggaagtataattcatattcatagagcaaggactgtgactattgcaaaggatggcacaattagtgcctcagagttgcaaggaaggcatcggaaaaggaaagtttctcaagtatggagctggtggtggtgctgggcatggaggccgaggtggcacagggatttacaatggaatgagaagtgaaggaggcctagaatatggcaatgctgatcttccatgtgagctaggaagtggtagtggcggttctgctttgtcagcagataacactgccggtgggggattaattgttattggatccatgaaatggccactttcaaggttgctagtttatggctcgctgaactctgacggggaaagccatagaggcacatcgggaaattcaaatgggacttttaaaggtggagttggtggtggttctggaggatcaattcttttatttcttcaatggtttctgctagagaaaaactcatcattatcggcatctggtggcaatggaggtgtatacggtggtggtggaggtggtggtggtagaatacatttccattggtcatatattgctactggagatgaatatgttcacattgcttctgtcaatggcacaatagtatcaagtggtggatctggtaagaatgatggacattgtggagaagatggaacagtaacaggaaagaaatgccccaagggcctatatggaacattttgcactgaatgcccagttggtacatataaaaacgttgttgggtccaattcatctctgtgcatcccgtgttctgtggatagtcttccaaaccgtgctgaattcatatatataagaggtggtgttaccgagctgccatgcccgtataggtgcatatctgataagtacaagatgccaaactgttacacaccacttgaggaacttatgtatacttttggtggtccttggtctttttcaatcatcctttctttaacagttattcttttggcacttgtcttaagtgctctaagaattaagattggtgagagtgatatcacctaccgggcaactaatgcaatccacaatgatggttgttctttcccctttttgctttctttggccgaggtaccaggggcaagcagggcagaagaaactcagagccatgtccacagaatgtacttcatgggacctaatactttccgagagccctggcatctcccctactcacctcctgatgcgataattggaattgtttatgaagatgctttcaaccgttttattgatgagatcaatttggtggctgcatatgagtggtgggaaggatctatacatagtatactttctgttcttgcgtatccttgtgcctggtcttggaagcaatggcgcagaaggaaaaaaaaccatcgtcttcaagagtatgttaaatctgaatatgatcattcatgtctccgctcctgcaggtcacgggctctctataaaggcttgaaggttggttcaactccagacttgatggttgcgtacatagatttctttctcgggggtgatgagaaacgacttgatgtagcatccaccattcagaagaggtttcccatgtgtctaatttttggtggtgatggaagctatatgtccccatactatctacatagtgatacattgctatcaaatcttcttggccagtcatgggaatccccaacttgagagacatggtgttcgagtggagttagggtggttccagtccactgcttctgcatattaccagcttggtattatcgtagctgtgaatgagaacttctacaagaatctccgccaccatgagcatgccacagaattttgtgaacgctcaaggaagaacgttgcagttccacttcaggatttcaatcaggcaaatctggatcagccttgcacaagctatgctgtttctagaaagcgattgacaggtggagtcaatggtgggatcataaatgagggaacgctcaagtcactgcactataaaagagactatctctttccattctcattgttattgcgtaattccaggcctctaggctatgcggaaacattgcaattgctcatttgtattgtacttctgggtgatttctccatcaccctgcttatgcttgtacagtactattggatatctgtcggagcttttcttgccatactgctcatcccccctcttgctttgctttcaccttttcttgctggtctcaatgcactttttagccgaggactaaaacgatcttcagtgacccgcatttttgcactttggaacattacttctgttgtaaacattattgtagcaatcatatacggctctttgtatttttggctctcttctttggcggtgtcctcagttcatcaagtatacaacacaaaaagcttcaagagtagagaagacaatgaatggtggatactgcctactatcctttttctcatcaaatcactgcaagctggactagttaactggcacgttgccaatttggaaatccaggactactcgttatttagcccggacccagatagattctgggcaatgtagtcgcctgcagcaagctaagaattgcagaaagcatggtttagtgatcgcaagaatggcaagtattaattattggatgctgaatatttgcgttttgtcccttgcaacgtcatcagcccaatacaatctctgaatctgaaggggtctaacacgctggctggaacttccttctatttatgggaagcgctcctgcgtagtgcactagtgcagatatgttcattttctttttctcagtttttttcccgtcttggtcgtgtgcctagaataggtctgtcgctcggtggggattagatttgtgcattttctttggttcaaattaaaccgttgattcgagtgtacagcaagaaactattgtgattgtcgctctagatgtacatcactgtaagtataatagtagaaccatttcaactgtatacaatcctcaaaggaaagtatgtttctttctattttctttttcctattgtcatcgttgccaatttgtttccaagtaactgtcgttttcaattttgctcgctaacagaacaacatcgtttggtaagaaaatggggcaaaagtcccaacggattgagtaaactccgtttccttagcactct

SEQ ID NO: 14170 - DNA, 5602 bp, Zea Mays
agcccgtagtctagaaccacacgccacggccacgcccgccgagctcacccgtacccgggatcgcgacggagaccccaccgcggccaattttatttttctcgcgggaaggaagaaaataaattctcgctcacggtcacgggctcaaggtcacggcagtcaaaatggaagatagggatgaggagcagaagaggaaacacagcgtgccgtggactcatctctcgctggccgctgctgcagctgcggagctgccactgcctccgcgggctccaccggggcaaatcgcccctgctggagaggctggagcgtctcttcgccttctctctctactttctctgtcctcgccactcacaagtcctcgccagcggcagcaagcacactgcgcttcctcttccgctccctccactgtgtgactcgcccatcatccatcaccctcgccgtgcgcgcgcgggcgctaggctttggagatctctcgcttggcttccgagatccgcgccgatccgcccgccgccgcattctcctcgggcgtggcggttgcgtgcgccgccgccgcacgatccgtttccttccggcgctgaatcgggggacgctgccagcgagcggggcgttccggtttctctgctcgcttccgcgctcgtggagcagagcaatggttcggagtgaccggcggcagcgacgatgaggtgcgtcgcgtggtgggcggtccttctcgcggccgcctcgttggttggcgcttgggggaaccacactgtatcggcgctcacgttggtatcggagacgtggtacgatgaccgcttggcgctggttcctgttgagtttggcggcggtgacggcgaggatgccgcggggcttcgcagtgagctcccgtgccagacatactccgcgaactcgaggtcctgcgaggaattgaacggctccgggtcgttcaacaccacctgcgtcataagttccagctcttcgctggacggtgatctgtgcgtatatggcgacgggagtgtggagattcggccccatgtcaagatcatctgccccttcagggggtgctacatcaccgtcaatgtctcagggagcgtcaggattggtgagcatgttgaggtgattgcagggtcggtaagcctgtacgcggccaatgtgtcgttggatcaccactccaccatcaacaccactgcactcgccggtgagcctcctcctcagacgagtgggacgccgcacagcctggaaggggcaggtggtggacatggtgggaggggtgcatcatgtaaagtgtcaaatgacaccaactggggaggtgatgtgtacgcgtggtcgacattggattggccttggagctatggcagcatgggtggcagcatgtccgccggtcagtttggagggtacggtggaggccgtgtcatgcttaggacatccggctttctgaatgttgatggacaggtgcttgctgaaggtggtgttggcagtctcaagggtggcggcggctctgggggaagcattataatacatgctttcaagctatctggaaatggcacaataagtgctgctggtggtaatggatggggtggcggtggcggtggaaggatatctctggactgttacagcattcaacaagatttggaaataacagttcatggtggccagagttttgggtgtgctcagaatgctggtgcagcaggtacaatatatgatagttcactgcagaccctaaaggtcagcaatgggaatttcaccacacgcacagaaactccattgcttggtttcccaatgactagactttggtccaatgtgcttgtggagcgctatgcaaaagtgctggttcccttgttgtggtccagagtacaggtgacaggtcaaattagattactaaccaagggtagtatctgctttgggttatcagaaaatccaatatcagaatttgagctggttgctgaagaacttttaatgagtgactctgttataaaggtctatggagctttcagaatgtatgttaaagtgctcttgatgtgggattcaaatattcagattgatggcggtgctaaggatgttgttcttgcatctatgcttgaggcaagaaaccttgtagtcctcaggcatgggtcagtgatatcttccaacactgatttaatggtatatggacaaggacttcttaacttgagtggccctggtgatggaatcaaagctaagcgactgtttctgtctctattttacaacattgaggttggccctggttcccttgttcaggctccactcgacgaggctgttccaagcaacttggatgcactttcacgctgtgaaagtaaaacatgtcctagtgagcttattaccccacctgatgattgccatgtaaaccgctccttgtcatttacactacaaatttgtcgtgttgaagacataactgtcagtggcatagttaggggaagtataattcatattcatagagcaaggactgtgactattgcaaaggatggcacaattagtgcctcagagttaggttgcaaggaaggcatcggaaaaggaaagtttctcaagtatggagctggtggtggtgctgggcatggaggccgaggtggcacagggatttacaatggaatgagaagtgaaggaggcctagaatatggcaatgctgatcttccatgtgagctaggaagtggtagtggcggttctgctttgtcagcagataacactgccggtgggggattaattgttattggatccatgaaatggccactttcaaggttgctagtttatggctcgctgaactctgacggggaaagccatagaggcacatcgggaaattcaaatgggacttttaaaggtggagttggtggtggttctggaggatcaattcttttatttcttcaatggtttctgctagagaaaaactcatcattatcggcatctggtggcaatggaggtgtatacggtggtggtggaggtggtggtggtagaatacatttccattggtcatatattgctactggagatgaatatgttcacattgcttctgtcaatggcacaatagtatcaagtggtggatctggtaagaatgatggacattgtggagaagatggaacagtaacaggaaagaaatgccccaagggcctatatggaacattttgcactgaatgcccagttggtacatataaaaacgttgttgggtccaattcatctctgtgcatcccgtgttctgtggatagtcttccaaaccgtgctgaattcatatatataagaggtggtgttaccgagctgccatgcccgtataggtgcatatctgataagtacaagatgccaaactgttacacaccacttgaggaacttatgtatacttttggtggtccttggtctttttcaatcatcctttctttaacagttattcttttggcacttgtcttaagtgctctaagaattaagattggtgagagtgatatcacctaccgggcaactaatgcaatccacaatgatggttgttctttcccctttttgctttctttggccgaggggcaagcagggcagaagaaactcagagccatgtccacagaatgtacttcatgggacctaatactttccgagagccctggcatctcccctactcacctcctgatgcgataattggaattgtttatgaagatgctttcaaccgttttattgatgagatcaatttggtggctgcatatgagtggtgggaaggatctatacatagtatactttctgttcttgcgtatccttgtgcctggtcttggaagcaatggcgcagaaggaaaaaaaaccatcgtcttcaagagtatgttaaatctgaatatgatcattcatgtctccgctcctgcaggtcacgggctctctataaaggcttgaaggttggttcaactccagacttgatggttgcgtacatagatttctttctcgggggtgatgagaaacgacttgatgtagcatccaccattcagaagaggtttcccatgtgtctaatttttggtggtgatggaagctatatgtccccatactatctacatagtgatacattgctatcaaatcttcttggccagtatgtatctactgcgatctggaatagattagtcgctggtttgaatgctcaattaaggacagtaagacaaggaagtgtccgttctactttgggccctgttgtttcttggatcaacagtcatgggaatccccaacttgagagacatggtgttcgagtggagttagggtggttccagtccactgcttctgcatattaccagcttggtattatcgtagctgtgaatgagaacttctacaagaatctccgccaccatgagcatgccacagaattttgtgaacgctcaaggaagaacgttgcagttccacttcaggatttcaatcaggcaaatctggatcagccttgcacaagctatgctgtttctagaaagcgattgacaggtggagtcaatggtgggatcataaatgagggaacgctcaagtcactgcactataaaagagactatctctttccattctcattgttattgcgtaattccaggcctctaggctatgcggaaacattgcaattgctcatttgtattgtacttctgggtgatttctccatcaccctgcttatgcttgtacagtactattggatatctgtcggagcttttcttgccatactgctcatcccccctcttgctttgctttcaccttttcttgctggtctcaatgcactttttagccgaggactaaaacgatcttcagtgacccgcatttttgcactttggaacattacttctgttgtaaacattattgtagcaatcatatacggctctttgtatttttggctctcttctttggcggtgtcctcagttcatcaagtatacaacacaaaaagcttcaagagtagagaagacaatgaatggtggatactgcctactatcctttttctcatcaaatcactgcaagctggactagttaactggcacgttgccaatttggaaatccaggactactcgttatttagcccggacccagatagattctgggcaatgtagtcgcctgcagcaagctaagaattgcagaaagcatggtttagtgatcgcaagaatggcaagtattaattattggatgctgaatatttgcgttttgtcccttgcaacgtcatcagcccaatacaatctctgaatctgaaggggtctaacacgctggctggaacttccttctatttatgggaagcgctcctgcgtagtgcactagtgcagatatgttcattttctttttctcagtttttttcccgtcttggtcgtgtgcctagaataggtctgtcgctcggtggggattagatttgtgcattttctttggttcaaattaaaccgttgattcgagtgtacagcaagaaactattgtgattgtcgctctagatgtacatcactgtaagtataatagtagaaccatttcaactgtatacaatcctcaaaggaaagtatgtttctttctattttctttttcctattgtcatcgttgccaatttgtttccaagtaactgtcgttttcaattttgctcgctaacagaacaacatcgtttggtaagaaaatggggcaaaagtcccaacggattgagtaaactccgtttccttagcactct

SEQ ID NO: 14171 - DNA, 5569 bp, Zea Mays
agcccgtagtctagaaccacacgccacggccacgcccgccgagctcacccgtacccgggatcgcgacggagaccccaccgcggccaattttatttttctcgcgggaaggaagaaaataaattctcgctcacggtcacgggctcaaggtcacggcagtcaaaatggaagatagggatgaggagcagaagaggaaacacagcgtgccgtggactcatctctcgctggccgctgctgcagctgcggagctgccactgcctccgcgggctccaccggggcaaatcgcccctgctggagaggctggagcgtctcttcgccttctctctctactttctctgtcctcgccactcacaagtcctcgccagcggcagcaagcacactgcgcttcctcttccgctccctccactgtgtgactcgcccatcatccatcaccctcgccgtgcgcgcgcgggcgctaggctttggagatctctcgcttggcttccgagatccgcgccgatccgcccgccgccgcattctcctcgggcgtggcggttgcgtgcgccgccgccgcacgatccgtttccttccggcgctgaatcgggggacgctgccagcgagcggggcgttccggtttctctgctcgcttccgcgctcgtggagcagagcaatggttcggagtgaccggcggcagcgacgatgaggtgcgtcgcgtggtgggcggtccttctcgcggccgcctcgttggttggcgcttgggggaaccacactgtatcggcgctcacgttggtatcggagacgtggtacgatgaccgcttggcgctggttcctgttgagtttggcggcggtgacggcgaggatgccgcggggcttcgcagtgagctcccgtgccagacatactccgcgaactcgaggtcctgcgaggaattgaacggctccgggtcgttcaacaccacctgcgtcataagttccagctcttcgctggacggtgatctgtgcgtatatggcgacgggagtgtggagattcggccccatgtcaagatcatctgccccttcagggggtgctacatcaccgtcaatgtctcagggagcgtcaggattggtgagcatgttgaggtgattgcagggtcggtaagcctgtacgcggccaatgtgtcgttggatcaccactccaccatcaacaccactgcactcgccggtgagcctcctcctcagacgagtgggacgccgcacagcctggaaggggcaggtggtggacatggtgggaggggtgcatcatgtaaagtgtcaaatgacaccaactggggaggtgatgtgtacgcgtggtcgacattggattggccttggagctatggcagcatgggtggcagcatgtccgccggtcagtttggagggtacggtggaggccgtgtcatgcttaggacatccggctttctgaatgttgatggacaggtgcttgctgaaggtggtgttggcagtctcaagggtggcggcggctctgggggaagcattataatacatgctttcaagctatctggaaatggcacaataagtgctgctggtggtaatggatggggtggcggtggcggtggaaggatatctctggactgttacagcattcaacaagatttggaaataacagttcatggtggccagagttttgggtgtgctcagaatgctggtgcagcaggtacaatatatgatagttcactgcagaccctaaaggtcagcaatgggaatttcaccacacgcacagaaactccattgcttggtttcccaatgactagactttggtccaatgtgcttgtggagcgctatgcaaaagtgctggttcccttgttgtggtccagagtacaggtgacaggtcaaattagattactaaccaagggtagtatctgctttgggttatcagaaaatccaatatcagaatttgagctggttgctgaagaacttttaatgagtgactctgttataaaggtctatggagctttcagaatattgatggcggtgctaaggatgttgttcttgcatctatgcttgaggcaagaaaccttgtagtcctcaggcatgggtcagtgatatcttccaacactgatttaatggtatatggacaaggacttcttaacttgagtggccctggtgatggaatcaaagctaagcgactgtttctgtctctattttacaacattgaggttggccctggttcccttgttcaggctccactcgacgaggctgttccaagcaacttggatgcactttcacgctgtgaaagtaaaacatgtcctagtgagcttattaccccacctgatgattgccatgtaaaccgctccttgtcatttacactacaaatttgtcgtgttgaagacataactgtcagtggcatagttaggggaagtataattcatattcatagagcaaggactgtgactattgcaaaggatggcacaattagtgcctcagagttaggttgcaaggaaggcatcggaaaaggaaagtttctcaagtatggagctggtggtggtgctgggcatggaggccgaggtggcacagggatttacaatggaatgagaagtgaaggaggcctagaatatggcaatgctgatcttccatgtgagctaggaagtggtagtggcggttctgctttgtcagcagataacactgccggtgggggattaattgttattggatccatgaaatggccactttcaaggttgctagtttatggctcgctgaactctgacggggaaagccatagaggcacatcgggaaattcaaatgggacttttaaaggtggagttggtggtggttctggaggatcaattcttttatttcttcaatggtttctgctagagaaaaactcatcattatcggcatctggtggcaatggaggtgtatacggtggtggtggaggtggtggtggtagaatacatttccattggtcatatattgctactggagatgaatatgttcacattgcttctgtcaatggcacaatagtatcaagtggtggatctggtaagaatgatggacattgtggagaagatggaacagtaacaggaaagaaatgccccaagggcctatatggaacattttgcactgaatgcccagttggtacatataaaaacgttgttgggtccaattcatctctgtgcatcccgtgttctgtggatagtcttccaaaccgtgctgaattcatatatataagaggtggtgttaccgagctgccatgcccgtataggtgcatatctgataagtacaagatgccaaactgttacacaccacttgaggaacttatgtatacttttggtggtccttggtctttttcaatcatcctttctttaacagttattcttttggcacttgtcttaagtgctctaagaattaagattggtgagagtgatatcacctaccgggcaactaatgcaatccacaatgatggttgttctttcccctttttgctttctttggccgaggtaccaggggcaagcagggcagaagaaactcagagccatgtccacagaatgtacttcatgggacctaatactttccgagagccctggcatctcccctactcacctcctgatgcgataattggaattgtttatgaagatgctttcaaccgttttattgatgagatcaatttggtggctgcatatgagtggtgggaaggatctatacatagtatactttctgttcttgcgtatccttgtgcctggtcttggaagcaatggcgcagaaggaaaaaaaaccatcgtcttcaagagtatgttaaatctgaatatgatcattcatgtctccgctcctgcaggtcacgggctctctataaaggcttgaaggttggttcaactccagacttgatggttgcgtacatagatttctttctcgggggtgatgagaaacgacttgatgtagcatccaccattcagaagaggtttcccatgtgtctaatttttggtggtgatggaagctatatgtccccatactatctacatagtgatacattgctatcaaatcttcttggccagtatgtatctactgcgatctggaatagattagtcgctggtttgaatgctcaattaaggacagtaagacaaggaagtgtccgttctactttgggccctgttgtttcttggatcaacagtcatgggaatccccaacttgagagacatggtgttcgagtggagttagggtggttccagtccactgcttctgcatattaccagcttggtattatcgtagctgtgaatgagaacttctacaagaatctccgccaccatgagcatgccacagaattttgtgaacgctcaaggaagaacgttgcagttccacttcaggatttcaatcaggcaaatctggatcagccttgcacaagctatgctgtttctagaaagcgattgacaggtggagtcaatggtgggatcataaatgagggaacgctcaagtcactgcactataaaagagactatctctttccattctcattgttattgcgtaattccaggcctctaggctatgcggaaacattgcaattgctcatttgtattgtacttctgggtgatttctccatcaccctgcttatgcttgtacagtactattggatatctgtcggagcttttcttgccatactgctcatcccccctcttgctttgctttcaccttttcttgctggtctcaatgcactttttagccgaggactaaaacgatcttcagtgacccgcatttttgcactttggaacattacttctgttgtaaacattattgtagcaatcatatacggctctttgtatttttggctctcttctttggcggtgtcctcagttcatcaagtatacaacacaaaaagcttcaagagtagagaagacaatgaatggtggatactgcctactatcctttttctcatcaaatcactgcaagctggactagttaactggcacgttgccaatttggaaatccaggactactcgttatttagcccggacccagatagattctgggcaatgtagtcgcctgcagcaagctaagaattgcagaaagcatggtttagtgatcgcaagaatggcaagtattaattattggatgctgaatatttgcgttttgtcccttgcaacgtcatcagcccaatacaatctctgaatctgaaggggtctaacacgctggctggaacttccttctatttatgggaagcgctcctgcgtagtgcactagtgcagatatgttcattttctttttctcagtttttttcccgtcttggtcgtgtgcctagaataggtctgtcgctcggtggggattagatttgtgcattttctttggttcaaattaaaccgttgattcgagtgtacagcaagaaactattgtgattgtcgctctagatgtacatcactgtaagtataatagtagaaccatttcaactgtatacaatcctcaaaggaaagtatgtttctttctattttctttttcctattgtcatcgttgccaatttgtttccaagtaactgtcgttttcaattttgctcgctaacagaacaacatcgtttggtaagaaaatggggcaaaagtcccaacggattgagtaaactccgtttccttagcactct

SEQ ID NO: 14172 - DNA, 5500 bp, Zea Mays
agcccgtagtctagaaccacacgccacggccacgcccgccgagctcacccgtacccgggatcgcgacggagaccccaccgcggccaattttatttttctcgcgggaaggaagaaaataaattctcgctcacggtcacgggctcaaggtcacggcagtcaaaatggaagatagggatgaggagcagaagaggaaacacagcgtgccgtggactcatctctcgctggccgctgctgcagctgcggagctgccactgcctccgcgggctccaccggggcaaatcgcccctgctggagaggctggagcgtctcttcgccttctctctctactttctctgtcctcgccactcacaagtcctcgccagcggcagcaagcacactgcgcttcctcttccgctccctccactgtgtgactcgcccatcatccatcaccctcgccgtgcgcgcgcgggcgctaggctttggagatctctcgcttggcttccgagatccgcgccgatccgcccgccgccgcattctcctcgggcgtggcggttgcgtgcgccgccgccgcacgatccgtttccttccggcgctgaatcgggggacgctgccagcgagcggggcgttccggtttctctgctcgcttccgcgctcgtggagcagagcaatggttcggagtgaccggcggcagcgacgatgaggtgcgtcgcgtggtgggcggtccttctcgcggccgcctcgttggttggcgcttgggggaaccacactgtatcggcgctcacgttggtatcggagacgtggtacgatgaccgcttggcgctggttcctgttgagtttggcggcggtgacggcgaggatgccgcggggcttcgcagtgagctcccgtgccagacatactccgcgaactcgaggtcctgcgaggaattgaacggctccgggtcgttcaacaccacctgcgtcataagttccagctcttcgctggacggtgatctgtgcgtatatggcgacgggagtgtggagattcggccccatgtcaagatcatctgccccttcagggggtgctacatcaccgtcaatgtctcagggagcgtcaggattggtgagcatgttgaggtgattgcagggtcggtaagcctgtacgcggccaatgtgtcgttggatcaccactccaccatcaacaccactgcactcgccggtgagcctcctcctcagacgagtgggacgccgcacagcctggaaggggcaggtggtggacatggtgggaggggtgcatcatgtaaagtgtcaaatgacaccaactggggaggtgatgtgtacgcgtggtcgacattggattggccttggagctatggcagcatgggtggcagcatgtccgccggtcagtttggagggtacggtggaggccgtgtcatgcttaggacatccggctttctgaatgttgatggacaggtgcttgctgaaggtggtgttggcagtctcaagggtggcggcggctctgggggaagcattataatacatgctttcaagctatctggaaatggcacaataagtgctgctggtggtaatggatggggtggcggtggcggtggaaggatatctctggactgttacagcattcaacaagatttggaaataacagttcatggtggccagagttttgggtgtgctcagaatgctggtgcagcaggtacaatatatgatagttcactgcagaccctaaaggtcagcaatgggaatttcaccacacgcacagaaactccattgcttggtttcccaatgactagactttggtccaatgtgcttgtggagcgctatgcaaaagtgctggttcccttgttgtggtccagagtacaggtgacaggtcaaattagattactaaccaagggtagtatctgctttgggttatcagaaaatccaatatcagaatttgagctggttgctgaagaacttttaatgagtgactctgttataaagattgatggcggtgctaaggatgttgttcttgcatctatgcttgaggcaagaaaccttgtagtcctcagggacttcttaacttgagtggccctggtgatggaatcaaagctaagcgactgtttctgtctctattttacaacattgaggttggccctggttcccttgttcaggctccactcgacgaggctgttccaagcaacttggatgcactttcacgctgtgaaagtaaaacatgtcctagtgagcttattaccccacctgatgattgccatgtaaaccgctccttgtcatttacactacaaatttgtcgtgttgaagacataactgtcagtggcatagttaggggaagtataattcatattcatagagcaaggactgtgactattgcaaaggatggcacaattagtgcctcagagttaggttgcaaggaaggcatcggaaaaggaaagtttctcaagtatggagctggtggtggtgctgggcatggaggccgaggtggcacagggatttacaatggaatgagaagtgaaggaggcctagaatatggcaatgctgatcttccatgtgagctaggaagtggtagtggcggttctgctttgtcagcagataacactgccggtgggggattaattgttattggatccatgaaatggccactttcaaggttgctagtttatggctcgctgaactctgacggggaaagccatagaggcacatcgggaaattcaaatgggacttttaaaggtggagttggtggtggttctggaggatcaattcttttatttcttcaatggtttctgctagagaaaaactcatcattatcggcatctggtggcaatggaggtgtatacggtggtggtggaggtggtggtggtagaatacatttccattggtcatatattgctactggagatgaatatgttcacattgcttctgtcaatggcacaatagtatcaagtggtggatctggtaagaatgatggacattgtggagaagatggaacagtaacaggaaagaaatgccccaagggcctatatggaacattttgcactgaatgcccagttggtacatataaaaacgttgttgggtccaattcatctctgtgcatcccgtgttctgtggatagtcttccaaaccgtgctgaattcatatatataagaggtggtgttaccgagctgccatgcccgtataggtgcatatctgataagtacaagatgccaaactgttacacaccacttgaggaacttatgtatacttttggtggtccttggtctttttcaatcatcctttctttaacagttattcttttggcacttgtcttaagtgctctaagaattaagattggtgagagtgatatcacctaccgggcaactaatgcaatccacaatgatggttgttctttcccctttttgctttctttggccgaggtaccaggggcaagcagggcagaagaaactcagagccatgtccacagaatgtacttcatgggacctaatactttccgagagccctggcatctcccctactcacctcctgatgcgataattggaattgtttatgaagatgctttcaaccgttttattgatgagatcaatttggtggctgcatatgagtggtgggaaggatctatacatagtatactttctgttcttgcgtatccttgtgcctggtcttggaagcaatggcgcagaaggaaaaaaaaccatcgtcttcaagagtatgttaaatctgaatatgatcattcatgtctccgctcctgcaggtcacgggctctctataaaggcttgaaggttggttcaactccagacttgatggttgcgtacatagatttctttctcgggggtgatgagaaacgacttgatgtagcatccaccattcagaagaggtttcccatgtgtctaatttttggtggtgatggaagctatatgtccccatactatctacatagtgatacattgctatcaaatcttcttggccagtatgtatctactgcgatctggaatagattagtcgctggtttgaatgctcaattaaggacagtaagacaaggaagtgtccgttctactttgggccctgttgtttcttggatcaacagtcatgggaatccccaacttgagagacatggtgttcgagtggagttagggtggttccagtccactgcttctgcatattaccagcttggtattatcgtagctgtgaatgagaacttctacaagaatctccgccaccatgagcatgccacagaattttgtgaacgctcaaggaagaacgttgcagttccacttcaggatttcaatcaggcaaatctggatcagccttgcacaagctatgctgtttctagaaagcgattgacaggtggagtcaatggtgggatcataaatgagggaacgctcaagtcactgcactataaaagagactatctctttccattctcattgttattgcgtaattccaggcctctaggctatgcggaaacattgcaattgctcatttgtattgtacttctgggtgatttctccatcaccctgcttatgcttgtacagtactattggatatctgtcggagcttttcttgccatactgctcatcccccctcttgctttgctttcaccttttcttgctggtctcaatgcactttttagccgaggactaaaacgatcttcagtgacccgcatttttgcactttggaacattacttctgttgtaaacattattgtagcaatcatatacggctctttgtatttttggctctcttctttggcggtgtcctcagttcatcaagtatacaacacaaaaagcttcaagagtagagaagacaatgaatggtggatactgcctactatcctttttctcatcaaatcactgcaagctggactagttaactggcacgttgccaatttggaaatccaggactactcgttatttagcccggacccagatagattctgggcaatgtagtcgcctgcagcaagctaagaattgcagaaagcatggtttagtgatcgcaagaatggcaagtattaattattggatgctgaatatttgcgttttgtcccttgcaacgtcatcagcccaatacaatctctgaatctgaaggggtctaacacgctggctggaacttccttctatttatgggaagcgctcctgcgtagtgcactagtgcagatatgttcattttctttttctcagtttttttcccgtcttggtcgtgtgcctagaataggtctgtcgctcggtggggattagatttgtgcattttctttggttcaaattaaaccgttgattcgagtgtacagcaagaaactattgtgattgtcgctctagatgtacatcactgtaagtataatagtagaaccatttcaactgtatacaatcctcaaaggaaagtatgtttctttctattttctttttcctattgtcatcgttgccaatttgtttccaagtaactgtcgttttcaattttgctcgctaacagaacaacatcgtttggtaagaaaatggggcaaaagtcccaacggattgagtaaactccgtttccttagcactct

SEQ ID NO: 14173 - DNA, 5771 bp, Zea Mays
agcccgtagtctagaaccacacgccacggccacgcccgccgagctcacccgtacccgggatcgcgacggagaccccaccgcggccaattttatttttctcgcgggaaggaagaaaataaattctcgctcacggtcacgggctcaaggtcacggcagtcaaaatggaagatagggatgaggagcagaagaggaaacacagcgtgccgtggactcatctctcgctggccgctgctgcagctgcggagctgccactgcctccgcgggctccaccggggcaaatcgcccctgctggagaggctggagcgtctcttcgccttctctctctactttctctgtcctcgccactcacaagtcctcgccagcggcagcaagcacactgcgcttcctcttccgctccctccactgtgtgactcgcccatcatccatcaccctcgccgtgcgcgcgcgggcgctaggctttggagatctctcgcttggcttccgagatccgcgccgatccgcccgccgccgcattctcctcgggcgtggcggttgcgtgcgccgccgccgcacgatccgtttccttccggcgctgaatcgggggacgctgccagcgagcggggcgttccggtttctctgctcgcttccgcgctcgtggagcagagcaatggttcggagtgaccggcggcagcgacgatgaggtgcgtcgcgtggtgggcggtccttctcgcggccgcctcgttggttggcgcttgggggaaccacactgtatcggcgctcacgttggtatcggagacgtggtacgatgaccgcttggcgctggttcctgttgagtttggcggcggtgacggcgaggatgccgcggggcttcgcagtgagctcccgtgccagacatactccgcgaactcgaggtcctgcgaggaattgaacggctccgggtcgttcaacaccacctgcgtcataagttccagctcttcgctggacggtgatctgtgcgtatatggcgacgggagtgtggagattcggccccatgtcaagatcatctgccccttcagggggtgctacatcaccgtcaatgtctcagggagcgtcaggattggtgagcatgttgaggtgattgcagggtcggtaagcctgtacgcggccaatgtgtcgttggatcaccactccaccatcaacaccactgcactcgccggtgagcctcctcctcagacgagtgggacgccgcacagcctggaaggggcaggtggtggacatggtgggaggggtgcatcatgtaaagtgtcaaatgacaccaactggggaggtgatgtgtacgcgtggtcgacattggattggccttggagctatggcagcatgggtggcagcatgtccgccggtcagtttggagggtacggtggaggccgtgtcatgcttaggacatccggctttctgaatgttgatggacaggtgcttgctgaaggtggtgttggcagtctcaagggtggcggcggctctgggggaagcattataatacatgctttcaagctatctggaaatggcacaataagtgctgctggtggtaatggatggggtggcggtggcggtggaaggatatctctggactgttacagcattcaacaagatttggaaataacagttcatggtggccagagttttgggtgtgctcagaatgctggtgcagcaggtacaatatatgatagttcactgcagaccctaaaggtcagcaatgggaatttcaccacacgcacagaaactccattgcttggtttcccaatgactagactttggtccaatgtgcttgtggagcgctatgcaaaagtgctggttcccttgttgtggtccagagtacagaaaatccaatatcagaatttgagctggttgctgaagaacttttaatgagtgactctgttataaaggtctatggagctttcagaatgtatgttaaagtgctcttgatgtgggattcaaatattcagattgatggcggtgctaaggatgttgttcttgcatctatgcttgaggcaagaaaccttgtagtcctcaggcatgggtcagtgatatcttccaacactgatttaatggtatatggacaaggacttcttaacttgagtggccctggtgatggaatcaaagctaagcgactgtttctgtctctattttacaacattgaggtaagactacaatatatctagtactctgttattgtaactcagccagggagggaaagaccgccctcccggtacaatgcctgaggccggcactcaaggcgcacacatcccgctgatggctaagaagagactgttcatgttttgtcatgtcaaaattgcatgtgataagagttttgttctaattttttggactctccctttaccatgggcatgtgagcaggttggccctggttcccttgttcaggctccactcgacgaggctgttccaagcaacttggatgcactttcacgctgtgaaagtaaaacatgtcctagtgagcttattaccccacctgatgattgccatgtaaaccgctccttgtcatttacactacaaatttgtcgtgttgaagacataactgtcagtggcatagttaggggaagtataattcatattcatagagcaaggactgtgactattgcaaaggatggcacaattagtgcctcagagttaggttgcaaggaaggcatcggaaaaggaaagtttctcaagtatggagctggtggtggtgctgggcatggaggccgaggtggcacagggatttacaatggaatgagaagtgaaggaggcctagaatatggcaatgctgatcttccatgtgagctaggaagtggtagtggcggttctgctttgtcagcagataacactgccggtgggggattaattgttattggatccatgaaatggccactttcaaggttgctagtttatggctcgctgaactctgacggggaaagccatagaggcacatcgggaaattcaaatgggacttttaaaggtggagttggtggtggttctggaggatcaattcttttatttcttcaatggtttctgctagagaaaaactcatcattatcggcatctggtggcaatggaggtgtatacggtggtggtggaggtggtggtggtagaatacatttccattggtcatatattgctactggagatgaatatgttcacattgcttctgtcaatggcacaatagtatcaagtggtggatctggtaagaatgatggacattgtggagaagatggaacagtaacaggaaagaaatgccccaagggcctatatggaacattttgcactgaatgcccagttggtacatataaaaacgttgttgggtccaattcatctctgtgcatcccgtgttctgtggatagtcttccaaaccgtgctgaattcatatatataagaggtggtgttaccgagctgccatgcccgtataggtgcatatctgataagtacaagatgccaaactgttacacaccacttgaggaacttatgtatacttttggtggtccttggtctttttcaatcatcctttctttaacagttattcttttggcacttgtcttaagtgctctaagaattaagattggtgagagtgatatcacctaccgggcaactaatgcaatccacaatgatggttgttctttcccctttttgctttctttggccgaggtaccaggggcaagcagggcagaagaaactcagagccatgtccacagaatgtacttcatgggacctaatactttccgagagccctggcatctcccctactcacctcctgatgcgataattggaattgtttatgaagatgctttcaaccgttttattgatgagatcaatttggtggctgcatatgagtggtgggaaggatctatacatagtatactttctgttcttgcgtatccttgtgcctggtcttggaagcaatggcgcagaaggaaaaaaaaccatcgtcttcaagagtatgttaaatctgaatatgatcattcatgtctccgctcctgcaggtcacgggctctctataaaggcttgaaggttggttcaactccagacttgatggttgcgtacatagatttctttctcgggggtgatgagaaacgacttgatgtagcatccaccattcagaagaggtttcccatgtgtctaatttttggtggtgatggaagctatatgtccccatactatctacatagtgatacattgctatcaaatcttcttggccagtatgtatctactgcgatctggaatagattagtcgctggtttgaatgctcaattaaggacagtaagacaaggaagtgtccgttctactttgggccctgttgtttcttggatcaacagtcatgggaatccccaacttgagagacatggtgttcgagtggagttagggtggttccagtccactgcttctgcatattaccagcttggtattatcgtagctgtgaatgagaacttctacaagaatctccgccaccatgagcatgccacagaattttgtgaacgctcaaggaagaacgttgcagttccacttcaggatttcaatcaggcaaatctggatcagccttgcacaagctatgctgtttctagaaagcgattgacaggtggagtcaatggtgggatcataaatgagggaacgctcaagtcactgcactataaaagagactatctctttccattctcattgttattgcgtaattccaggcctctaggctatgcggaaacattgcaattgctcatttgtattgtacttctgggtgatttctccatcaccctgcttatgcttgtacagtactattggatatctgtcggagcttttcttgccatactgctcatcccccctcttgctttgctttcaccttttcttgctggtctcaatgcactttttagccgaggactaaaacgatcttcagtgacccgcatttttgcactttggaacattacttctgttgtaaacattattgtagcaatcatatacggctctttgtatttttggctctcttctttggcggtgtcctcagttcatcaagtatacaacacaaaaagcttcaagagtagagaagacaatgaatggtggatactgcctactatcctttttctcatcaaatcactgcaagctggactagttaactggcacgttgccaatttggaaatccaggactactcgttatttagcccggacccagatagattctgggcaatgtagtcgcctgcagcaagctaagaattgcagaaagcatggtttagtgatcgcaagaatggcaagtattaattattggatgctgaatatttgcgttttgtcccttgcaacgtcatcagcccaatacaatctctgaatctgaaggggtctaacacgctggctggaacttccttctatttatgggaagcgctcctgcgtagtgcactagtgcagatatgttcattttctttttctcagtttttttcccgtcttggtcgtgtgcctagaataggtctgtcgctcggtggggattagatttgtgcattttctttggttcaaattaaaccgttgattcgagtgtacagcaagaaactattgtgattgtcgctctagatgtacatcactgtaagtataatagtagaaccatttcaactgtatacaatcctcaaaggaaagtatgtttctttctattttctttttcctattgtcatcgttgccaatttgtttccaagtaactgtcgttttcaattttgctcgctaacagaacaacatcgtttggtaagaaaatggggcaaaagtcccaacggattgagtaaactccgtttccttagcactct

SEQ ID NO: 14174 - DNA, 5766 bp, Zea Mays
agcccgtagtctagaaccacacgccacggccacgcccgccgagctcacccgtacccgggatcgcgacggagaccccaccgcggccaattttatttttctcgcgggaaggaagaaaataaattctcgctcacggtcacgggctcaaggtcacggcagtcaaaatggaagatagggatgaggagcagaagaggaaacacagcgtgccgtggactcatctctcgctggccgctgctgcagctgcggagctgccactgcctccgcgggctccaccggggcaaatcgcccctgctggagaggctggagcgtctcttcgccttctctctctactttctctgtcctcgccactcacaagtcctcgccagcggcagcaagcacactgcgcttcctcttccgctccctccactgtgtgactcgcccatcatccatcaccctcgccgtgcgcgcgcgggcgctaggctttggagatctctcgcttggcttccgagatccgcgccgatccgcccgccgccgcattctcctcgggcgtggcggttgcgtgcgccgccgccgcacgatccgtttccttccggcgctgaatcgggggacgctgccagcgagcggggcgttccggtttctctgctcgcttccgcgctcgtggagcagagcaatggttcggagtgaccggcggcagcgacgatgaggtgcgtcgcgtggtgggcggtccttctcgcggccgcctcgttggttggcgcttgggggaaccacactgtatcggcgctcacgttggtatcggagacgtggtacgatgaccgcttggcgctggttcctgttgagtttggcggcggtgacggcgaggatgccgcggggcttcgcagtgagctcccgtgccagacatactccgcgaactcgaggtcctgcgaggaattgaacggctccgggtcgttcaacaccacctgcgtcataagttccagctcttcgctggacggtgatctgtgcgtatatggcgacgggagtgtggagattcggccccatgtcaagatcatctgccccttcagggggtgctacatcaccgtcaatgtctcagggagcgtcaggattggtgagcatgttgaggtgattgcagggtcggtaagcctgtacgcggccaatgtgtcgttggatcaccactccaccatcaacaccactgcactcgccggtgagcctcctcctcagacgagtgggacgccgcacagcctggaaggggcaggtggtggacatggtgggaggggtgcatcatgtaaagtgtcaaatgacaccaactggggaggtgatgtgtacgcgtggtcgacattggattggccttggagctatggcagcatgggtggcagcatgtccgccggtcagtttggagggtacggtggaggccgtgtcatgcttaggacatccggctttctgaatgttgatggacaggtgcttgctgaaggtggtgttggcagtctcaagggtggcggcggctctgggggaagcattataatacatgctttcaagctatctggaaatggcacaataagtgctgctggtggtaatggatggggtggcggtggcggtggaaggatatctctggactgttacagcattcaacaagatttggaaataacagttcatggtggccagagttttgggtgtgctcagaatgctggtgcagcaggtacaatatatgatagttcactgcagaccctaaaggtcagcaatgggaatttcaccacacgcacagaaactccattgcttggtttcccaatgactagactttggtccaatgtgcttgtggagcgctatgcaaaagtgctggttcccttgttgtggtccagagtacaggtgacaggtcaaattagattactaaccaagggtagtatctgctttgggttatcagaaaatccaatatcagaatttgagctggttgctgaagaacttttaatgagtgactctgttataaagattgatggcggtgctaaggatgttgttcttgcatctatgcttgaggcaagaaaccttgtagtcctcaggcatgggtcagtgatatcttccaacactgatttaatggtatatggacaaggacttcttaacttgagtggccctggtgatggaatcaaagctaagcgactgtttctgtctctattttacaacattgaggtaagactacaatatatctagtactctgttattgtaactcagccagggagggaaagaccgccctcccggtacaatgcctgaggccggcactcaaggcgcacacatcccgctgatggctaagaagagactgttcatgttttgtcatgtcaaaattgcatgtgataagagttttgttctaattttttggactctccctttaccatgggcatgtgagcaggttggccctggttcccttgttcaggctccactcgacgaggctgttccaagcaacttggatgcactttcacgctgtgaaagtaaaacatgtcctagtgagcttattaccccacctgatgattgccatgtaaaccgctccttgtcatttacactacaaatttgtcgtgttgaagacataactgtcagtggcatagttaggggaagtataattcatattcatagagcaaggactgtgactattgcaaaggatggcacaattagtgcctcagagttaggttgcaaggaaggcatcggaaaaggaaagtttctcaagtatggagctggtggtggtgctgggcatggaggccgaggtggcacagggatttacaatggaatgagaagtgaaggaggcctagaatatggcaatgctgatcttccatgtgagctaggaagtggtagtggcggttctgctttgtcagcagataacactgccggtgggggattaattgttattggatccatgaaatggccactttcaaggttgctagtttatggctcgctgaactctgacggggaaagccatagaggcacatcgggaaattcaaatgggacttttaaaggtggagttggtggtggttctggaggatcaattcttttatttcttcaatggtttctgctagagaaaaactcatcattatcggcatctggtggcaatggaggtgtatacggtggtggtggaggtggtggtggtagaatacatttccattggtcatatattgctactggagatgaatatgttcacattgcttctgtcaatggcacaatagtatcaagtggtggatctggtaagaatgatggacattgtggagaagatggaacagtaacaggaaagaaatgccccaagggcctatatggaacattttgcactgaatgcccagttggtacatataaaaacgttgttgggtccaattcatctctgtgcatcccgtgttctgtggatagtcttccaaaccgtgctgaattcatatatataagaggtggtgttaccgagctgccatgcccgtataggtgcatatctgataagtacaagatgccaaactgttacacaccacttgaggaacttatgtatacttttggtggtccttggtctttttcaatcatcctttctttaacagttattcttttggcacttgtcttaagtgctctaagaattaagattggtgagagtgatatcacctaccgggcaactaatgcaatccacaatgatggttgttctttcccctttttgctttctttggccgaggtaccaggggcaagcagggcagaagaaactcagagccatgtccacagaatgtacttcatgggacctaatactttccgagagccctggcatctcccctactcacctcctgatgcgataattggaattgtttatgaagatgctttcaaccgttttattgatgagatcaatttggtggctgcatatgagtggtgggaaggatctatacatagtatactttctgttcttgcgtatccttgtgcctggtcttggaagcaatggcgcagaaggaaaaaaaaccatcgtcttcaagagtatgttaaatctgaatatgatcattcatgtctccgctcctgcaggtcacgggctctctataaaggcttgaaggttggttcaactccagacttgatggttgcgtacatagatttctttctcgggggtgatgagaaacgacttgatgtagcatccaccattcagaagaggtttcccatgtgtctaatttttggtggtgatggaagctatatgtccccatactatctacatagtgatacattgctatcaaatcttcttggccagtatgtatctactgcgatctggaatagattagtcgctggtttgaatgctcaattaaggacagtaagacaaggaagtgtccgttctactttgggccctgttgtttcttggatcaacagtcatgggaatccccaacttgagagacatggtgttcgagtggagttagggtggttccagtccactgcttctgcatattaccagcttggtattatcgtagctgtgaatgagaacttctacaagaatctccgccaccatgagcatgccacagaattttgtgaacgctcaaggaagaacgttgcagttccacttcaggatttcaatcaggcaaatctggatcagccttgcacaagctatgctgtttctagaaagcgattgacaggtggagtcaatggtgggatcataaatgagggaacgctcaagtcactgcactataaaagagactatctctttccattctcattgttattgcgtaattccaggcctctaggctatgcggaaacattgcaattgctcatttgtattgtacttctgggtgatttctccatcaccctgcttatgcttgtacagtactattggatatctgtcggagcttttcttgccatactgctcatcccccctcttgctttgctttcaccttttcttgctggtctcaatgcactttttagccgaggactaaaacgatcttcagtgacccgcatttttgcactttggaacattacttctgttgtaaacattattgtagcaatcatatacggctctttgtatttttggctctcttctttggcggtgtcctcagttcatcaagtatacaacacaaaaagcttcaagagtagagaagacaatgaatggtggatactgcctactatcctttttctcatcaaatcactgcaagctggactagttaactggcacgttgccaatttggaaatccaggactactcgttatttagcccggacccagatagattctgggcaatgtagtcgcctgcagcaagctaagaattgcagaaagcatggtttagtgatcgcaagaatggcaagtattaattattggatgctgaatatttgcgttttgtcccttgcaacgtcatcagcccaatacaatctctgaatctgaaggggtctaacacgctggctggaacttccttctatttatgggaagcgctcctgcgtagtgcactagtgcagatatgttcattttctttttctcagtttttttcccgtcttggtcgtgtgcctagaataggtctgtcgctcggtggggattagatttgtgcattttctttggttcaaattaaaccgttgattcgagtgtacagcaagaaactattgtgattgtcgctctagatgtacatcactgtaagtataatagtagaaccatttcaactgtatacaatcctcaaaggaaagtatgtttctttctattttctttttcctattgtcatcgttgccaatttgtttccaagtaactgtcgttttcaattttgctcgctaacagaacaacatcgtttggtaagaaaatggggcaaaagtcccaacggattgagtaaactccgtttccttagcactct

SEQ ID NO: 14175 - DNA, 5554 bp, Zea Mays
agcccgtagtctagaaccacacgccacggccacgcccgccgagctcacccgtacccgggatcgcgacggagaccccaccgcggccaattttatttttctcgcgggaaggaagaaaataaattctcgctcacggtcacgggctcaaggtcacggcagtcaaaatggaagatagggatgaggagcagaagaggaaacacagcgtgccgtggactcatctctcgctggccgctgctgcagctgcggagctgccactgcctccgcgggctccaccggggcaaatcgcccctgctggagaggctggagcgtctcttcgccttctctctctactttctctgtcctcgccactcacaagtcctcgccagcggcagcaagcacactgcgcttcctcttccgctccctccactgtgtgactcgcccatcatccatcaccctcgccgtgcgcgcgcgggcgctaggctttggagatctctcgcttggcttccgagatccgcgccgatccgcccgccgccgcattctcctcgggcgtggcggttgcgtgcgccgccgccgcacgatccgtttccttccggcgctgaatcgggggacgctgccagcgagcggggcgttccggtttctctgctcgcttccgcgctcgtggagcagagcaatggttcggagtgaccggcggcagcgacgatgaggtgcgtcgcgtggtgggcggtccttctcgcggccgcctcgttggttggcgcttgggggaaccacactgtatcggcgctcacgttggtatcggagacgtggtacgatgaccgcttggcgctggttcctgttgagtttggcggcggtgacggcgaggatgccgcggggcttcgcagtgagctcccgtgccagacatactccgcgaactcgaggtcctgcgaggaattgaacggctccgggtcgttcaacaccacctgcgtcataagttccagctcttcgctggacggtgatctgtgcgtatatggcgacgggagtgtggagattcggccccatgtcaagatcatctgccccttcagggggtgctacatcaccgtcaatgtctcagggagcgtcaggattggtgagcatgttgaggtgattgcagggtcggtaagcctgtacgcggccaatgtgtcgttggatcaccactccaccatcaacaccactgcactcgccggtgagcctcctcctcagacgagtgggacgccgcacagcctggaaggggcaggtggtggacatggtgggaggggtgcatcatgtaaagtgtcaaatgacaccaactggggaggtgatgtgtacgcgtggtcgacattggattggccttggagctatggcagcatgggtggcagcatgtccgccggtcagtttggagggtacggtggaggccgtgtcatgcttaggacatccggctttctgaatgttgatggacaggtgcttgctgaaggtggtgttggcagtctcaagggtggcggcggctctgggggaagcattataatacatgctttcaagctatctggaaatggcacaataagtgctgctggtggtaatggatggggtggcggtggcggtggaaggatatctctggactgttacagcattcaacaagatttggaaataacagttcatggtggccagagttttgggtgtgctcagaatgctggtgcagcaggtacaatatatgatagttcactgcagaccctaaaggtcagcaatgggaatttcaccacacgcacagaaactccattgcttggtttcccaatgactagactttggtccaatgtgcttgtggagcgctatgcaaaagtgctggttcccttgttgtggtccagagtacagaaaatccaatatcagaatttgagctggttgctgaagaacttttaatgagtgactctgttataaaggtctatggagctttcagaatgtatgttaaagtgctcttgatgtgggattcaaatattcagattgatggcggtgctaaggatgttgttcttgcatctatgcttgaggcaagaaaccttgtagtcctcaggcatgggtcagtgatatcttccaacactgatttaatggtatatggacaaggacttcttaacttgagtggccctggtgatggaatcaaagctaagcgactgtttctgtctctattttacaacattgaggttggccctggttcccttgttcaggctccactcgacgaggctgttccaagcaacttggatgcactttcacgctgtgaaagtaaaacatgtcctagtgagcttattaccccacctgatgattgccatgtaaaccgctccttgtcatttacactacaaatttgtcgtgttgaagacataactgtcagtggcatagttaggggaagtataattcatattcatagagcaaggactgtgactattgcaaaggatggcacaattagtgcctcagagttaggttgcaaggaaggcatcggaaaaggaaagtttctcaagtatggagctggtggtggtgctgggcatggaggccgaggtggcacagggatttacaatggaatgagaagtgaaggaggcctagaatatggcaatgctgatcttccatgtgagctaggaagtggtagtggcggttctgctttgtcagcagataacactgccggtgggggattaattgttattggatccatgaaatggccactttcaaggttgctagtttatggctcgctgaactctgacggggaaagccatagaggcacatcgggaaattcaaatgggacttttaaaggtggagttggtggtggttctggaggatcaattcttttatttcttcaatggtttctgctagagaaaaactcatcattatcggcatctggtggcaatggaggtgtatacggtggtggtggaggtggtggtggtagaatacatttccattggtcatatattgctactggagatgaatatgttcacattgcttctgtcaatggcacaatagtatcaagtggtggatctggtaagaatgatggacattgtggagaagatggaacagtaacaggaaagaaatgccccaagggcctatatggaacattttgcactgaatgcccagttggtacatataaaaacgttgttgggtccaattcatctctgtgcatcccgtgttctgtggatagtcttccaaaccgtgctgaattcatatatataagaggtggtgttaccgagctgccatgcccgtataggtgcatatctgataagtacaagatgccaaactgttacacaccacttgaggaacttatgtatacttttggtggtccttggtctttttcaatcatcctttctttaacagttattcttttggcacttgtcttaagtgctctaagaattaagattggtgagagtgatatcacctaccgggcaactaatgcaatccacaatgatggttgttctttcccctttttgctttctttggccgaggtaccaggggcaagcagggcagaagaaactcagagccatgtccacagaatgtacttcatgggacctaatactttccgagagccctggcatctcccctactcacctcctgatgcgataattggaattgtttatgaagatgctttcaaccgttttattgatgagatcaatttggtggctgcatatgagtggtgggaaggatctatacatagtatactttctgttcttgcgtatccttgtgcctggtcttggaagcaatggcgcagaaggaaaaaaaaccatcgtcttcaagagtatgttaaatctgaatatgatcattcatgtctccgctcctgcaggtcacgggctctctataaaggcttgaaggttggttcaactccagacttgatggttgcgtacatagatttctttctcgggggtgatgagaaacgacttgatgtagcatccaccattcagaagaggtttcccatgtgtctaatttttggtggtgatggaagctatatgtccccatactatctacatagtgatacattgctatcaaatcttcttggccagtatgtatctactgcgatctggaatagattagtcgctggtttgaatgctcaattaaggacagtaagacaaggaagtgtccgttctactttgggccctgttgtttcttggatcaacagtcatgggaatccccaacttgagagacatggtgttcgagtggagttagggtggttccagtccactgcttctgcatattaccagcttggtattatcgtagctgtgaatgagaacttctacaagaatctccgccaccatgagcatgccacagaattttgtgaacgctcaaggaagaacgttgcagttccacttcaggatttcaatcaggcaaatctggatcagccttgcacaagctatgctgtttctagaaagcgattgacaggtggagtcaatggtgggatcataaatgagggaacgctcaagtcactgcactataaaagagactatctctttccattctcattgttattgcgtaattccaggcctctaggctatgcggaaacattgcaattgctcatttgtattgtacttctgggtgatttctccatcaccctgcttatgcttgtacagtactattggatatctgtcggagcttttcttgccatactgctcatcccccctcttgctttgctttcaccttttcttgctggtctcaatgcactttttagccgaggactaaaacgatcttcagtgacccgcatttttgcactttggaacattacttctgttgtaaacattattgtagcaatcatatacggctctttgtatttttggctctcttctttggcggtgtcctcagttcatcaagtatacaacacaaaaagcttcaagagtagagaagacaatgaatggtggatactgcctactatcctttttctcatcaaatcactgcaagctggactagttaactggcacgttgccaatttggaaatccaggactactcgttatttagcccggacccagatagattctgggcaatgtagtcgcctgcagcaagctaagaattgcagaaagcatggtttagtgatcgcaagaatggcaagtattaattattggatgctgaatatttgcgttttgtcccttgcaacgtcatcagcccaatacaatctctgaatctgaaggggtctaacacgctggctggaacttccttctatttatgggaagcgctcctgcgtagtgcactagtgcagatatgttcattttctttttctcagtttttttcccgtcttggtcgtgtgcctagaataggtctgtcgctcggtggggattagatttgtgcattttctttggttcaaattaaaccgttgattcgagtgtacagcaagaaactattgtgattgtcgctctagatgtacatcactgtaagtataatagtagaaccatttcaactgtatacaatcctcaaaggaaagtatgtttctttctattttctttttcctattgtcatcgttgccaatttgtttccaagtaactgtcgttttcaattttgctcgctaacagaacaacatcgtttggtaagaaaatggggcaaaagtcccaacggattgagtaaactccgtttccttagcactct

SEQ ID NO: 14176 - DNA, 5675 bp, Zea Mays
agcccgtagtctagaaccacacgccacggccacgcccgccgagctcacccgtacccgggatcgcgacggagaccccaccgcggccaattttatttttctcgcgggaaggaagaaaataaattctcgctcacggtcacgggctcaaggtcacggcagtcaaaatggaagatagggatgaggagcagaagaggaaacacagcgtgccgtggactcatctctcgctggccgctgctgcagctgcggagctgccactgcctccgcgggctccaccggggcaaatcgcccctgctggagaggctggagcgtctcttcgccttctctctctactttctctgtcctcgccactcacaagtcctcgccagcggcagcaagcacactgcgcttcctcttccgctccctccactgtgtgactcgcccatcatccatcaccctcgccgtgcgcgcgcgggcgctaggctttggagatctctcgcttggcttccgagatccgcgccgatccgcccgccgccgcattctcctcgggcgtggcggttgcgtgcgccgccgccgcacgatccgtttccttccggcgctgaatcgggggacgctgccagcgagcggggcgttccggtttctctgctcgcttccgcgctcgtggagcagagcaatggttcggagtgaccggcggcagcgacgatgaggtgcgtcgcgtggtgggcggtccttctcgcggccgcctcgttggttggcgcttgggggaaccacactgtatcggcgctcacgttggtatcggagacgtggtacgatgaccgcttggcgctggttcctgttgagtttggcggcggtgacggcgaggatgccgcggggcttcgcagtgagctcccgtgccagacatactccgcgaactcgaggtcctgcgaggaattgaacggctccgggtcgttcaacaccacctgcgtcataagttccagctcttcgctggacggtgatctgtgcgtatatggcgacgggagtgtggagattcggccccatgtcaagatcatctgccccttcagggggtgctacatcaccgtcaatgtctcagggagcgtcaggattggtgagcatgttgaggtgattgcagggtcggtaagcctgtacgcggccaatgtgtcgttggatcaccactccaccatcaacaccactgcactcgccggtgagcctcctcctcagacgagtgggacgccgcacagcctggaaggggcaggtggtggacatggtgggaggggtgcatcatgtaaagtgtcaaatgacaccaactggggaggtgatgtgtacgcgtggtcgacattggattggccttggagctatggcagcatgggtggcagcatgtccgccggtcagtttggagggtacggtggaggccgtgtcatgcttaggacatccggctttctgaatgttgatggacaggtgcttgctgaaggtggtgttggcagtctcaagggtggcggcggctctgggggaagcattataatacatgctttcaagctatctggaaatggcacaataagtgctgctggtggtaatggatggggtggcggtggcggtggaaggatatctctggactgttacagcattcaacaagatttggaaataacagttcatggtggccagagttttgggtgtgctcagaatgctggtgcagcaggtacaatatatgatagttcactgcagaccctaaaggtcagcaatgggaatttcaccacacgcacagaaactccattgcttggtttcccaatgactagactttggtccaatgtgcttgtggagcgctatgcaaaagtgctggttcccttgttgtggtccagagtacaggtgacaggtcaaattagattactaaccaagggtagtatctgctttgggttatcagaaaatccaatatcagaatttgagctggttgctgaagaacttttaatgagtgactctgttataaaggtctatggagctttcagaatattgatggcggtgctaaggatgttgttcttgcatctatgcttgaggcaagaaaccttgtagtcctcaggcatgggtcagtgatatcttccaacactgatttaatggtatatggacaaggacttcttaacttgagtggccctggtgatggaatcaaagctaagcgactgtttctgtctctattttacaacattgaggtaagactacaatatatctagtactctgttattgtaactcagccagggagggaaagaccgccctcccggtacaatgcctgaggccggcactcaaggcgcacacatcccgctgatggctaagaagagactgttcatgttttgtcatgtcaaaattgcatgtgataagagttttgttctaattttttggactctccctttaccatgggcatgtgagcaggttggccctggttcccttgttcaggctccactcgacgaggctgttccaagcaacttggatgcactttcacgctgtgaaagtaaaacatgtcctagtgagcttattaccccacctgatgattgccatgtaaaccgctccttgtcatttacactacaaatttgtcgtgttgaagacataactgtcagtggcatagttaggggaagtataattcatattcatagagcaaggactgtgactattgcaaaggatggcacaattagtgcctcagagttaggttgcaaggaaggcatcggaaaaggaaagtttctcaagtatggagctggtggtggtgctgggcatggaggccgaggtggcacagggatttacaatggaatgagaagtgaaggaggcctagaatatggcaatgctgatcttccatgtgagctaggaagtggtagtggcggttctgctttgtcagcagataacactgccggtgggggattaattgttattggatccatgaaatggccactttcaaggttgctagtttatggctcgctgaactctgacggggaaagccatagaggcacatcgggaaattcaaatgggacttttaaaggtggagttggtggtggtggtagaatacatttccattggtcatatattgctactggagatgaatatgttcacattgcttctgtcaatggcacaatagtatcaagtggtggatctggtaagaatgatggacattgtggagaagatggaacagtaacaggaaagaaatgccccaagggcctatatggaacattttgcactgaatgcccagttggtacatataaaaacgttgttgggtccaattcatctctgtgcatcccgtgttctgtggatagtcttccaaaccgtgctgaattcatatatataagaggtggtgttaccgagctgccatgcccgtataggtgcatatctgataagtacaagatgccaaactgttacacaccacttgaggaacttatgtatacttttggtggtccttggtctttttcaatcatcctttctttaacagttattcttttggcacttgtcttaagtgctctaagaattaagattggtgagagtgatatcacctaccgggcaactaatgcaatccacaatgatggttgttctttcccctttttgctttctttggccgaggtaccaggggcaagcagggcagaagaaactcagagccatgtccacagaatgtacttcatgggacctaatactttccgagagccctggcatctcccctactcacctcctgatgcgataattggaattgtttatgaagatgctttcaaccgttttattgatgagatcaatttggtggctgcatatgagtggtgggaaggatctatacatagtatactttctgttcttgcgtatccttgtgcctggtcttggaagcaatggcgcagaaggaaaaaaaaccatcgtcttcaagagtatgttaaatctgaatatgatcattcatgtctccgctcctgcaggtcacgggctctctataaaggcttgaaggttggttcaactccagacttgatggttgcgtacatagatttctttctcgggggtgatgagaaacgacttgatgtagcatccaccattcagaagaggtttcccatgtgtctaatttttggtggtgatggaagctatatgtccccatactatctacatagtgatacattgctatcaaatcttcttggccagtatgtatctactgcgatctggaatagattagtcgctggtttgaatgctcaattaaggacagtaagacaaggaagtgtccgttctactttgggccctgttgtttcttggatcaacagtcatgggaatccccaacttgagagacatggtgttcgagtggagttagggtggttccagtccactgcttctgcatattaccagcttggtattatcgtagctgtgaatgagaacttctacaagaatctccgccaccatgagcatgccacagaattttgtgaacgctcaaggaagaacgttgcagttccacttcaggatttcaatcaggcaaatctggatcagccttgcacaagctatgctgtttctagaaagcgattgacaggtggagtcaatggtgggatcataaatgagggaacgctcaagtcactgcactataaaagagactatctctttccattctcattgttattgcgtaattccaggcctctaggctatgcggaaacattgcaattgctcatttgtattgtacttctgggtgatttctccatcaccctgcttatgcttgtacagtactattggatatctgtcggagcttttcttgccatactgctcatcccccctcttgctttgctttcaccttttcttgctggtctcaatgcactttttagccgaggactaaaacgatcttcagtgacccgcatttttgcactttggaacattacttctgttgtaaacattattgtagcaatcatatacggctctttgtatttttggctctcttctttggcggtgtcctcagttcatcaagtatacaacacaaaaagcttcaagagtagagaagacaatgaatggtggatactgcctactatcctttttctcatcaaatcactgcaagctggactagttaactggcacgttgccaatttggaaatccaggactactcgttatttagcccggacccagatagattctgggcaatgtagtcgcctgcagcaagctaagaattgcagaaagcatggtttagtgatcgcaagaatggcaagtattaattattggatgctgaatatttgcgttttgtcccttgcaacgtcatcagcccaatacaatctctgaatctgaaggggtctaacacgctggctggaacttccttctatttatgggaagcgctcctgcgtagtgcactagtgcagatatgttcattttctttttctcagtttttttcccgtcttggtcgtgtgcctagaataggtctgtcgctcggtggggattagatttgtgcattttctttggttcaaattaaaccgttgattcgagtgtacagcaagaaactattgtgattgtcgctctagatgtacatcactgtaagtataatagtagaaccatttcaactgtatacaatcctcaaaggaaagtatgtttctttctattttctttttcctattgtcatcgttgccaatttgtttccaagtaactgtcgttttcaattttgctcgctaacagaacaacatcgtttggtaagaaaatggggcaaaagtcccaacggattgagtaaactccgtttccttagcactct

SEQ ID NO: 14177 - DNA, 5585 bp, Zea Mays
agcccgtagtctagaaccacacgccacggccacgcccgccgagctcacccgtacccgggatcgcgacggagaccccaccgcggccaattttatttttctcgcgggaaggaagaaaataaattctcgctcacggtcacgggctcaaggtcacggcagtcaaaatggaagatagggatgaggagcagaagaggaaacacagcgtgccgtggactcatctctcgctggccgctgctgcagctgcggagctgccactgcctccgcgggctccaccggggcaaatcgcccctgctggagaggctggagcgtctcttcgccttctctctctactttctctgtcctcgccactcacaagtcctcgccagcggcagcaagcacactgcgcttcctcttccgctccctccactgtgtgactcgcccatcatccatcaccctcgccgtgcgcgcgcgggcgctaggctttggagatctctcgcttggcttccgagatccgcgccgatccgcccgccgccgcattctcctcgggcgtggcggttgcgtgcgccgccgccgcacgatccgtttccttccggcgctgaatcgggggacgctgccagcgagcggggcgttccggtttctctgctcgcttccgcgctcgtggagcagagcaatggttcggagtgaccggcggcagcgacgatgaggtgcgtcgcgtggtgggcggtccttctcgcggccgcctcgttggttggcgcttgggggaaccacactgtatcggcgctcacgttggtatcggagacgtggtacgatgaccgcttggcgctggttcctgttgagtttggcggcggtgacggcgaggatgccgcggggcttcgcagtgagctcccgtgccagacatactccgcgaactcgaggtcctgcgaggaattgaacggctccgggtcgttcaacaccacctgcgtcataagttccagctcttcgctggacggtgatctgtgcgtatatggcgacgggagtgtggagattcggccccatgtcaagatcatctgccccttcagggggtgctacatcaccgtcaatgtctcagggagcgtcaggattggtgagcatgttgaggtgattgcagggtcggtaagcctgtacgcggccaatgtgtcgttggatcaccactccaccatcaacaccactgcactcgccggtgagcctcctcctcagacgagtgggacgccgcacagcctggaaggggcaggtggtggacatggtgggaggggtgcatcatgtaaagtgtcaaatgacaccaactggggaggtgatgtgtacgcgtggtcgacattggattggccttggagctatggcagcatgggtggcagcatgtccgccggtcagtttggagggtacggtggaggccgtgtcatgcttaggacatccggctttctgaatgttgatggacaggtgcttgctgaaggtggtgttggcagtctcaagggtggcggcggctctgggggaagcattataatacatgctttcaagctatctggaaatggcacaataagtgctgctggtggtaatggatggggtggcggtggcggtggaaggatatctctggactgttacagcattcaacaagatttggaaataacagttcatggtggccagagttttgggtgtgctcagaatgctggtgcagcaggtacaatatatgatagttcactgcagaccctaaaggtcagcaatgggaatttcaccacacgcacagaaactccattgcttggtttcccaatgactagactttggtccaatgtgcttgtggagcgctatgcaaaagtgctggttcccttgttgtggtccagagtacaggtgacaggtcaaattagattactaaccaagggtagtatctgctttgggttatcagaaaatccaatatcagaatttgagctggttgctgaagaacttttaatgagtgactctgttataaaggtctatggagctttcagaatgtatgttaaagtgctcttgatgtgggattcaaatattcagattgatggcggtgctaaggatgttgttcttgcatctatgcttgagcatgggtcagtgatatcttccaacactgatttaatggtatatggacaaggacttcttaacttgagtggccctggtgatggaatcaaagctaagcgactgtttctgtctctattttacaacattgaggttggccctggttcccttgttcaggctccactcgacgaggctgttccaagcaacttggatgcactttcacgctgtgaaagtaaaacatgtcctagtgagcttattaccccacctgatgattgccatgtaaaccgctccttgtcatttacactacaaatttgtcgtgttgaagacataactgtcagtggcatagttaggggaagtataattcatattcatagagcaaggactgtgactattgcaaaggatggcacaattagtgcctcagagttaggttgcaaggaaggcatcggaaaaggaaagtttctcaagtatggagctggtggtggtgctgggcatggaggccgaggtggcacagggatttacaatggaatgagaagtgaaggaggcctagaatatggcaatgctgatcttccatgtgagctaggaagtggtagtggcggttctgctttgtcagcagataacactgccggtgggggattaattgttattggatccatgaaatggccactttcaaggttgctagtttatggctcgctgaactctgacggggaaagccatagaggcacatcgggaaattcaaatgggacttttaaaggtggagttggtggtggttctggaggatcaattcttttatttcttcaatggtttctgctagagaaaaactcatcattatcggcatctggtggcaatggaggtgtatacggtggtggtggaggtggtggtggtagaatacatttccattggtcatatattgctactggagatgaatatgttcacattgcttctgtcaatggcacaatagtatcaagtggtggatctggtaagaatgatggacattgtggagaagatggaacagtaacaggaaagaaatgccccaagggcctatatggaacattttgcactgaatgcccagttggtacatataaaaacgttgttgggtccaattcatctctgtgcatcccgtgttctgtggatagtcttccaaaccgtgctgaattcatatatataagaggtggtgttaccgagctgccatgcccgtataggtgcatatctgataagtacaagatgccaaactgttacacaccacttgaggaacttatgtatacttttggtggtccttggtctttttcaatcatcctttctttaacagttattcttttggcacttgtcttaagtgctctaagaattaagattggtgagagtgatatcacctaccgggcaactaatgcaatccacaatgatggttgttctttcccctttttgctttctttggccgaggtaccaggggcaagcagggcagaagaaactcagagccatgtccacagaatgtacttcatgggacctaatactttccgagagccctggcatctcccctactcacctcctgatgcgataattggaattgtttatgaagatgctttcaaccgttttattgatgagatcaatttggtggctgcatatgagtggtgggaaggatctatacatagtatactttctgttcttgcgtatccttgtgcctggtcttggaagcaatggcgcagaaggaaaaaaaaccatcgtcttcaagagtatgttaaatctgaatatgatcattcatgtctccgctcctgcaggtcacgggctctctataaaggcttgaaggttggttcaactccagacttgatggttgcgtacatagatttctttctcgggggtgatgagaaacgacttgatgtagcatccaccattcagaagaggtttcccatgtgtctaatttttggtggtgatggaagctatatgtccccatactatctacatagtgatacattgctatcaaatcttcttggccagtatgtatctactgcgatctggaatagattagtcgctggtttgaatgctcaattaaggacagtaagacaaggaagtgtccgttctactttgggccctgttgtttcttggatcaacagtcatgggaatccccaacttgagagacatggtgttcgagtggagttagggtggttccagtccactgcttctgcatattaccagcttggtattatcgtagctgtgaatgagaacttctacaagaatctccgccaccatgagcatgccacagaattttgtgaacgctcaaggaagaacgttgcagttccacttcaggatttcaatcaggcaaatctggatcagccttgcacaagctatgctgtttctagaaagcgattgacaggtggagtcaatggtgggatcataaatgagggaacgctcaagtcactgcactataaaagagactatctctttccattctcattgttattgcgtaattccaggcctctaggctatgcggaaacattgcaattgctcatttgtattgtacttctgggtgatttctccatcaccctgcttatgcttgtacagtactattggatatctgtcggagcttttcttgccatactgctcatcccccctcttgctttgctttcaccttttcttgctggtctcaatgcactttttagccgaggactaaaacgatcttcagtgacccgcatttttgcactttggaacattacttctgttgtaaacattattgtagcaatcatatacggctctttgtatttttggctctcttctttggcggtgtcctcagttcatcaagtatacaacacaaaaagcttcaagagtagagaagacaatgaatggtggatactgcctactatcctttttctcatcaaatcactgcaagctggactagttaactggcacgttgccaatttggaaatccaggactactcgttatttagcccggacccagatagattctgggcaatgtagtcgcctgcagcaagctaagaattgcagaaagcatggtttagtgatcgcaagaatggcaagtattaattattggatgctgaatatttgcgttttgtcccttgcaacgtcatcagcccaatacaatctctgaatctgaaggggtctaacacgctggctggaacttccttctatttatgggaagcgctcctgcgtagtgcactagtgcagatatgttcattttctttttctcagtttttttcccgtcttggtcgtgtgcctagaataggtctgtcgctcggtggggattagatttgtgcattttctttggttcaaattaaaccgttgattcgagtgtacagcaagaaactattgtgattgtcgctctagatgtacatcactgtaagtataatagtagaaccatttcaactgtatacaatcctcaaaggaaagtatgtttctttctattttctttttcctattgtcatcgttgccaatttgtttccaagtaactgtcgttttcaattttgctcgctaacagaacaacatcgtttggtaagaaaatggggcaaaagtcccaacggattgagtaaactccgtttccttagcactct

SEQ ID NO: 14178 - DNA, 4147 bp, Zea Mays
aagaggttgagttggaccctggttgccttgatcacatagtgccttgatctggaaatggcacaataagtgctgctggtggtaatggatggggtggcggtggcggtggaaggatatctctggactgttacagcattcaacaagatttggaaataacagttcatggtggccagagttttgggtgtgctcagaatgctggtgcagcaggtacaatatatgatagttcactgcagaccctaaaggtcagcaatgggaatttcaccacacgcacagaaactccattgcttggtttcccaatgactagactttggtccaatgtgcttgtggagcgctatgcaaaagtgctggttcccttgttgtggtccagagtacaggtgacaggtcaaattagattactaaccaagggtagtatctgctttgggttatcagaaaatccaatatcagaatttgagctggttgctgaagaacttttaatgagtgactctgttataaaggtctatggagctttcagaatgtatgttaaagtgctcttgatgtgggattcaaatattcagattgatggcggtgctaaggatgttgttcttgcatctatgcttgaggcaagaaaccttgtagtcctcaggcatgggtcagtgatatcttccaacactgatttaatggtatatggacaaggacttcttaacttgagtggccctggtgatggaatcaaagctaagcgactgtttctgtctctattttacaacattgaggttggccctggttcccttgttcaggctccactcgacgaggctgttccaagcaacttggatgcactttcacgctgtgaaagtaaaacatgtcctagtgagcttattaccccacctgatgattgccatgtaaaccgctccttgtcatttacactacaaatttgtcgtgttgaagacataactgtcagtggcatagttaggggaagtataattcatattcatagagcaaggactgtgactattgcaaaggatggcacaattagtgcctcagagttaggttgcaaggaaggcatcggaaaaggaaagtttctcaagtatggagctggtggtggtgctgggcatggaggccgaggtggcacagggatttacaatggaatgagaagtgaaggaggcctagaatatggcaatgctgatcttccatgtgagctaggaagtggtagtggcggttctgctttgtcagcagataacactgccggtgggggattaattgttattggatccatgaaatggccactttcaaggttgctagtttatggctcgctgaactctgacggggaaagccatagaggcacatcgggaaattcaaatgggacttttaaaggtggagttggtggtggttctggaggatcaattcttttatttcttcaatggtttctgctagagaaaaactcatcattatcggcatctggtggcaatggaggtgtatacggtggtggtggaggtggtggtggtagaatacatttccattggtcatatattgctactggagatgaatatgttcacattgcttctgtcaatggcacaatagtatcaagtggtggatctggtaagaatgatggacattgtggagaagatggaacagtaacaggaaagaaatgccccaagggcctatatggaacattttgcactgaatgcccagttggtacatataaaaacgttgttgggtccaattcatctctgtgcatcccgtgttctgtggatagtcttccaaaccgtgctgaattcatatatataagaggtggtgttaccgagctgccatgcccgtataggtgcatatctgataagtacaagatgccaaactgttacacaccacttgaggaacttatgtatacttttggtggtccttggtctttttcaatcatcctttctttaacagttattcttttggcacttgtcttaagtgctctaagaattaagattggtgagagtgatatcacctaccgggcaactaatgcaatccacaatgatggttgttctttcccctttttgctttctttggccgaggtaccaggggcaagcagggcagaagaaactcagagccatgtccacagaatgtacttcatgggacctaatactttccgagagccctggcatctcccctactcacctcctgatgcgataattggaattgtttatgaagatgctttcaaccgttttattgatgagatcaatttggtggctgcatatgagtggtgggaaggatctatacatagtatactttctgttcttgcgtatccttgtgcctggtcttggaagcaatggcgcagaaggaaaaaaaaccatcgtcttcaagagtatgttaaatctgaatatgatcattcatgtctccgctcctgcaggtcacgggctctctataaaggcttgaaggttggttcaactccagacttgatggttgcgtacatagatttctttctcgggggtgatgagaaacgacttgatgtagcatccaccattcagaagaggtttcccatgtgtctaatttttggtggtgatggaagctatatgtccccatactatctacatagtgatacattgctatcaaatcttcttggccagtatgtatctactgcgatctggaatagattagtcgctggtttgaatgctcaattaaggacagtaagacaaggaagtgtccgttctactttgggccctgttgtttcttggatcaacagtcatgggaatccccaacttgagagacatggtgttcgagtggagttagggtggttccagtccactgcttctgcatattaccagcttggtattatcgtagctgtgaatgagaacttctacaagaatctccgccaccatgagcatgccacagaattttgtgaacgctcaaggaagaacgttgcagttccacttcaggatttcaatcaggcaaatctggatcagccttgcacaagctatgctgtttctagaaagcgattgacaggtggagtcaatggtgggatcataaatgagggaacgctcaagtcactgcactataaaagagactatctctttccattctcattgttattgcgtaattccaggcctctaggctatgcggaaacattgcaattgctcatttgtattgtacttctgggtgatttctccatcaccctgcttatgcttgtacagtactattggatatctgtcggagcttttcttgccatactgctcatcccccctcttgctttgctttcaccttttcttgctggtctcaatgcactttttagccgaggactaaaacgatcttcagtgacccgcatttttgcactttggaacattacttctgttgtaaacattattgtagcaatcatatacggctctttgtatttttggctctcttctttggcggtgtcctcagttcatcaagtatacaacacaaaaagcttcaagagtagagaagacaatgaatggtggatactgcctactatcctttttctcatcaaatcactgcaagctggactagttaactggcacgttgccaatttggaaatccaggactactcgttatttagcccggacccagatagattctgggcaatgtagtcgcctgcagcaagctaagaattgcagaaagcatggtttagtgatcgcaagaatggcaagtattaattattggatgctgaatatttgcgttttgtcccttgcaacgtcatcagcccaatacaatctctgaatctgaaggggtctaacacgctggctggaacttccttctatttatgggaagcgctcctgcgtagtgcactagtgcagatatgttcattttctttttctcagtttttttcccgtcttggtcgtgtgcctagaataggtctgtcgctcggtggggattagatttgtgcattttctttggttcaaattaaaccgttgattcgagtgtacagcaagaaactattgtgattgtcgctctagatgtacatcactgtaagtataatagtagaaccatttcaactgtatacaatcctcaaaggaaagtatgtttctttctattttctttttcctattgtcatcgttgccaatttgtttccaagtaactgtcgttttcaattttgctcgctaacagaacaacatcgtttggtaagaaaatggggcaaaagtcccaacggattgagtaaactccgtttccttagcactct

SEQ ID NO: 14179 - DNA, 3531 bp, Zea Mays
cccccgcgctgcaagtatttcatttggcttgcatctctcaatcgatgttggacggctgatcgactggcacgtcatggaatggatcatccagatagttgtcccttgtgtgatcagcaggatgagacagtgcatcacttgctggtggattgtgtttttacgagggaagtttggtttagaacactaagcaggctaggtttgcaacatcttgctcccacgtctgatgctacagggtttcaagattggtggagtgaggcagaaagactagtgtctaagcataagaaaaaagatttgtcgtgttgaagacataactgtcagtggcatagttaggggaagtataattcatattcatagagcaaggactgtgactattgcaaaggatggcacaattagtgcctcagagttaggttgcaaggaaggcatcggaaaaggaaagtttctcaagtatggagctggtggtggtgctgggcatggaggccgaggtggcacagggatttacaatggaatgagaagtgaaggaggcctagaatatggcaatgctgatcttccatgtgagctaggaagtggtagtggcggttctgctttgtcagcagataacactgccggtgggggattaattgttattggatccatgaaatggccactttcaaggttgctagtttatggctcgctgaactctgacggggaaagccatagaggcacatcgggaaattcaaatgggacttttaaaggtggagttggtggtggttctggaggatcaattcttttatttcttcaatggtttctgctagagaaaaactcatcattatcggcatctggtggcaatggaggtgtatacggtggtggtggaggtggtggtggtagaatacatttccattggtcatatattgctactggagatgaatatgttcacattgcttctgtcaatggcacaatagtatcaagtggtggatctggtaagaatgatggacattgtggagaagatggaacagtaacaggaaagaaatgccccaagggcctatatggaacattttgcactgaatgcccagttggtacatataaaaacgttgttgggtccaattcatctctgtgcatcccgtgttctgtggatagtcttccaaaccgtgctgaattcatatatataagaggtggtgttaccgagctgccatgcccgtataggtgcatatctgataagtacaagatgccaaactgttacacaccacttgaggaacttatgtatacttttggtggtccttggtctttttcaatcatcctttctttaacagttattcttttggcacttgtcttaagtgctctaagaattaagattggtgagagtgatatcacctaccgggcaactaatgcaatccacaatgatggttgttctttcccctttttgctttctttggccgaggtaccaggggcaagcagggcagaagaaactcagagccatgtccacagaatgtacttcatgggacctaatactttccgagagccctggcatctcccctactcacctcctgatgcgataattggaattgtttatgaagatgctttcaaccgttttattgatgagatcaatttggtggctgcatatgagtggtgggaaggatctatacatagtatactttctgttcttgcgtatccttgtgcctggtcttggaagcaatggcgcagaaggaaaaaaaaccatcgtcttcaagagtatgttaaatctgaatatgatcattcatgtctccgctcctgcaggtcacgggctctctataaaggcttgaaggttggttcaactccagacttgatggttgcgtacatagatttctttctcgggggtgatgagaaacgacttgatgtagcatccaccattcagaagaggtttcccatgtgtctaatttttggtggtgatggaagctatatgtccccatactatctacatagtgatacattgctatcaaatcttcttggccagtatgtatctactgcgatctggaatagattagtcgctggtttgaatgctcaattaaggacagtaagacaaggaagtgtccgttctactttgggccctgttgtttcttggatcaacagtcatgggaatccccaacttgagagacatggtgttcgagtggagttagggtggttccagtccactgcttctgcatattaccagcttggtattatcgtagctgtgaatgagaacttctacaagaatctccgccaccatgagcatgccacagaattttgtgaacgctcaaggaagaacgttgcagttccacttcaggatttcaatcaggcaaatctggatcagccttgcacaagctatgctgtttctagaaagcgattgacaggtggagtcaatggtgggatcataaatgagggaacgctcaagtcactgcactataaaagagactatctctttccattctcattgttattgcgtaattccaggcctctaggctatgcggaaacattgcaattgctcatttgtattgtacttctgggtgatttctccatcaccctgcttatgcttgtacagtactattggatatctgtcggagcttttcttgccatactgctcatcccccctcttgctttgctttcaccttttcttgctggtctcaatgcactttttagccgaggactaaaacgatcttcagtgacccgcatttttgcactttggaacattacttctgttgtaaacattattgtagcaatcatatacggctctttgtatttttggctctcttctttggcggtgtcctcagttcatcaagtatacaacacaaaaagcttcaagagtagagaagacaatgaatggtggatactgcctactatcctttttctcatcaaatcactgcaagctggactagttaactggcacgttgccaatttggaaatccaggactactcgttatttagcccggacccagatagattctgggcaatgtagtcgcctgcagcaagctaagaattgcagaaagcatggtttagtgatcgcaagaatggcaagtattaattattggatgctgaatatttgcgttttgtcccttgcaacgtcatcagcccaatacaatctctgaatctgaaggggtctaacacgctggctggaacttccttctatttatgggaagcgctcctgcgtagtgcactagtgcagatatgttcattttctttttctcagtttttttcccgtcttggtcgtgtgcctagaataggtctgtcgctcggtggggattagatttgtgcattttctttggttcaaattaaaccgttgattcgagtgtacagcaagaaactattgtgattgtcgctctagatgtacatcactgtaagtataatagtagaaccatttcaactgtatacaatcctcaaaggaaagtatgtttctttctattttctttttcctattgtcatcgttgccaatttgtttccaagtaactgtcgttttcaattttgctcgctaacagaacaacatcgtttggtaagaaaatggggcaaaagtcccaacggattgagtaaactccgtttccttagcactct

SEQ ID NO: 14180 - DNA, 3142 bp, Zea Mays
ttgcagatttgtcgtgttgaagacataactgtcagtggcatagttaggggaagtataattcatattcatagagcaaggactgtgactattgcaaaggatggcacaattagtgcctcagagttaggttgcaaggaaggcatcggaaaaggaaagtttctcaagtatggagctggtggtggtgctgggcatggaggccgaggtggcacagggatttacaatggaatgagaagtgaaggaggcctagaatatggcaatgctgatcttccatgtgagctaggaagtggtagtggcggttctgctttgtcagcagataacactgccggtgggggattaattgttattggatccatgaaatggccactttcaaggttgctagtttatggctcgctgaactctgacggggaaagccatagaggcacatcgggaaattcaaatgggacttttaaaggtggagttggtggtggttctggaggatcaattcttttatttcttcaatggtttctgctagagaaaaactcatcattatcggcatctggtggcaatggaggtgtatacggtggtggtggaggtggtggtggtagaatacatttccattggtcatatattgctactggagatgaatatgttcacattgcttctgtcaatggcacaatagtatcaagtggtggatctggtaagaatgatggacattgtggagaagatggaacagtaacaggaaagaaatgccccaagggcctatatggaacattttgcactgtggtgttaccgagctgccatgcccgtataggtgcatatctgataagtacaagatgccaaactgttacacaccacttgaggaacttatgtatacttttggtggtccttggtctttttcaatcatcctttctttaacagttattcttttggcacttgtcttaagtgctctaagaattaagattggtgagagtgatatcacctaccgggcaactaatgcaatccacaatgatggttgttctttcccctttttgctttctttggccgaggtaccaggggcaagcagggcagaagaaactcagagccatgtccacagaatgtacttcatgggacctaatactttccgagagccctggcatctcccctactcacctcctgatgcgataattggaattgtttatgaagatgctttcaaccgttttattgatgagatcaatttggtggctgcatatgagtggtgggaaggatctatacatagtatactttctgttcttgcgtatccttgtgcctggtcttggaagcaatggcgcagaaggaaaaaaaaccatcgtcttcaagagtatgttaaatctgaatatgatcattcatgtctccgctcctgcaggtcacgggctctctataaaggcttgaaggttggttcaactccagacttgatggttgcgtacatagatttctttctcgggggtgatgagaaacgacttgatgtagcatccaccattcagaagaggtttcccatgtgtctaatttttggtggtgatggaagctatatgtccccatactatctacatagtgatacattgctatcaaatcttcttggccagtatgtatctactgcgatctggaatagattagtcgctggtttgaatgctcaattaaggacagtaagacaaggaagtgtccgttctactttgggccctgttgtttcttggatcaacagtcatgggaatccccaacttgagagacatggtgttcgagtggagttagggtggttccagtccactgcttctgcatattaccagcttggtattatcgtagctgtgaatgagaacttctacaagaatctccgccaccatgagcatgccacagaattttgtgaacgctcaaggaagaacgttgcagttccacttcaggatttcaatcaggcaaatctggatcagccttgcacaagctatgctgtttctagaaagcgattgacaggtggagtcaatggtgggatcataaatgagggaacgctcaagtcactgcactataaaagagactatctctttccattctcattgttattgcgtaattccaggcctctaggctatgcggaaacattgcaattgctcatttgtattgtacttctgggtgatttctccatcaccctgcttatgcttgtacagtactattggatatctgtcggagcttttcttgccatactgctcatcccccctcttgctttgctttcaccttttcttgctggtctcaatgcactttttagccgaggactaaaacgatcttcagtgacccgcatttttgcactttggaacattacttctgttgtaaacattattgtagcaatcatatacggctctttgtatttttggctctcttctttggcggtgtcctcagttcatcaagtatacaacacaaaaagcttcaagagtagagaagacaatgaatggtggatactgcctactatcctttttctcatcaaatcactgcaagctggactagttaactggcacgttgccaatttggaaatccaggactactcgttatttagcccggacccagatagattctgggcaatgtagtcgcctgcagcaagctaagaattgcagaaagcatggtttagtgatcgcaagaatggcaagtattaattattggatgctgaatatttgcgttttgtcccttgcaacgtcatcagcccaatacaatctctgaatctgaaggggtctaacacgctggctggaacttccttctatttatgggaagcgctcctgcgtagtgcactagtgcagatatgttcattttctttttctcagtttttttcccgtcttggtcgtgtgcctagaataggtctgtcgctcggtggggattagatttgtgcattttctttggttcaaattaaaccgttgattcgagtgtacagcaagaaactattgtgattgtcgctctagatgtacatcactgtaagtataatagtagaaccatttcaactgtatacaatcctcaaaggaaagtatgtttctttctattttctttttcctattgtcatcgttgccaatttgtttccaagtaactgtcgttttcaattttgctcgctaacagaacaacatcgtttggtaagaaaatggggcaaaagtcccaacggattgagtaaactccgtttccttagcactct

SEQ ID NO: 14181 - DNA, 3241 bp, Zea Mays
ttgcagatttgtcgtgttgaagacataactgtcagtggcatagttaggggaagtataattcatattcatagagcaaggactgtgactattgcaaaggatggcacaattagtgcctcagagttaggttgcaaggaaggcatcggaaaaggaaagtttctcaagtatggagctggtggtggtgctgggcatggaggccgaggtggcacagggatttacaatggaatgagaagtgaaggaggcctagaatatggcaatgctgatcttccatgtgagctaggaagtggtagtggcggttctgctttgtcagcagataacactgccggtgggggattaattgttattggatccatgaaatggccactttcaaggttgctagtttatggctcgctgaactctgacggggaaagccatagaggcacatcgggaaattcaaatgggacttttaaaggtggagttggtggtggttctggaggatcaattcttttatttcttcaatggtttctgctagagaaaaactcatcattatcggcatctggtggcaatggaggtgtatacggtggtggtggaggtggtggtggtagaatacatttccattggtcatatattgctactggagatgaatatgttcacattgcttctgtcaatggcacaatagtatcaagtggtggatctggtaagaatgatggacattgtggagaagatggaacagtaacaggaaagaaatgccccaagggcctatatggaacattttgcactttggtacatataaaaacgttgttgggtccaattcatctctgtgcatcccgtgttctgtggatagtcttccaaaccgtgctgaattcatatatataagaggtggtgttaccgagctgccatgcccgtataggtgcatatctgataagtacaagatgccaaactgttacacaccacttgaggaacttatgtatacttttggtggtccttggtctttttcaatcatcctttctttaacagttattcttttggcacttgtcttaagtgctctaagaattaagattggtgagagtgatatcacctaccgggcaactaatgcaatccacaatgatggttgttctttcccctttttgctttctttggccgaggtaccaggggcaagcagggcagaagaaactcagagccatgtccacagaatgtacttcatgggacctaatactttccgagagccctggcatctcccctactcacctcctgatgcgataattggaattgtttatgaagatgctttcaaccgttttattgatgagatcaatttggtggctgcatatgagtggtgggaaggatctatacatagtatactttctgttcttgcgtatccttgtgcctggtcttggaagcaatggcgcagaaggaaaaaaaaccatcgtcttcaagagtatgttaaatctgaatatgatcattcatgtctccgctcctgcaggtcacgggctctctataaaggcttgaaggttggttcaactccagacttgatggttgcgtacatagatttctttctcgggggtgatgagaaacgacttgatgtagcatccaccattcagaagaggtttcccatgtgtctaatttttggtggtgatggaagctatatgtccccatactatctacatagtgatacattgctatcaaatcttcttggccagtatgtatctactgcgatctggaatagattagtcgctggtttgaatgctcaattaaggacagtaagacaaggaagtgtccgttctactttgggccctgttgtttcttggatcaacagtcatgggaatccccaacttgagagacatggtgttcgagtggagttagggtggttccagtccactgcttctgcatattaccagcttggtattatcgtagctgtgaatgagaacttctacaagaatctccgccaccatgagcatgccacagaattttgtgaacgctcaaggaagaacgttgcagttccacttcaggatttcaatcaggcaaatctggatcagccttgcacaagctatgctgtttctagaaagcgattgacaggtggagtcaatggtgggatcataaatgagggaacgctcaagtcactgcactataaaagagactatctctttccattctcattgttattgcgtaattccaggcctctaggctatgcggaaacattgcaattgctcatttgtattgtacttctgggtgatttctccatcaccctgcttatgcttgtacagtactattggatatctgtcggagcttttcttgccatactgctcatcccccctcttgctttgctttcaccttttcttgctggtctcaatgcactttttagccgaggactaaaacgatcttcagtgacccgcatttttgcactttggaacattacttctgttgtaaacattattgtagcaatcatatacggctctttgtatttttggctctcttctttggcggtgtcctcagttcatcaagtatacaacacaaaaagcttcaagagtagagaagacaatgaatggtggatactgcctactatcctttttctcatcaaatcactgcaagctggactagttaactggcacgttgccaatttggaaatccaggactactcgttatttagcccggacccagatagattctgggcaatgtagtcgcctgcagcaagctaagaattgcagaaagcatggtttagtgatcgcaagaatggcaagtattaattattggatgctgaatatttgcgttttgtcccttgcaacgtcatcagcccaatacaatctctgaatctgaaggggtctaacacgctggctggaacttccttctatttatgggaagcgctcctgcgtagtgcactagtgcagatatgttcattttctttttctcagtttttttcccgtcttggtcgtgtgcctagaataggtctgtcgctcggtggggattagatttgtgcattttctttggttcaaattaaaccgttgattcgagtgtacagcaagaaactattgtgattgtcgctctagatgtacatcactgtaagtataatagtagaaccatttcaactgtatacaatcctcaaaggaaagtatgtttctttctattttctttttcctattgtcatcgttgccaatttgtttccaagtaactgtcgttttcaattttgctcgctaacagaacaacatcgtttggtaagaaaatggggcaaaagtcccaacggattgagtaaactccgtttccttagcactct

SEQ ID NO: 14182 - DNA, 1940 bp, Zea Mays
  misc_feature (1939)..(1940): n is a, c, g, or t
cccaaaacgccgctaccccctctcattttcttcctcgtctccacctccttctctcctcctcgatacatccgagcacgccgaacgctgtcggaaggcacaaagcggcgagcggcgccgggcttcccctctctttctcgcccccgatctgcgccgatcggggcgaccgctctctggggacgccgatcgaaggtcgggcggcgatgcttccgatatacggaagcagtttctagttttcttcagttggtcgccacagtttccagcgctttcagccagttgtctaataacttgttgttgttgttgtacttaaggatcaccgtactgtcttcctcagagaccttccaacttggttctagttccagcaaccctgtcatggatcatcagaatttacttcccaacaactctaatgtggatgaacagattttactcccaaatgcattagagcatgaggactgcccacactatttgctcaacggtcatgatgtgggtgtgccaaatggaagcttgattggtcagcaaaatacaagcttgagcttgtgggaaccagctggatctagctcaatgagctgcttagttgatcatgacaactttttccaggcaaaaagggagcatcttgcctcttctctgtctattggaggccccttaaatatagacaggaggagacatgaaggcactagttcattgcctttacacaacctaaacatagacctcaacattaatcaggctgatcaatttggctctgatgatgttgatcttgtacatggtaatggacaatcaagtgcaaatactgtcacagcccacaggggctctttcataactgatcatattatgcatcatggagtttcttcagatgctacaggaagttcatcatggaatgcagaatgttttaatggtgcagcaagccagcacagtcgtcatccagcttttaagagaaagtatcttgatggatgtcaatgtcatgcagagtcttctgctaatggaagctcacacaattgtcaccagaatgatagtactctgctacctcttcggaccacctgtgaaagtttgactatgccaaccacgacaaattttagtgttccacatcctcctgtggaacagctaaaccagagcactaatatttctgcaaattctactttgattgaccactattcttcttatagtggtccacatgcaaacgaattcatgcgaaatacacggatgcgaataaaccctagtgattatgatcaatcactgcccagccttttacctgaagggagtttcaggtgcccagcttatcagcatacacagcagcagtcatcatttaggccagtgcaacctagacaagtgagctcttctggttctcatagtcgacctcacttgcctgttgttactcaattttcgcaaaatcttcaccgtccttcagcaaatattagttttggatcaaggattgggagttcttccagttctggttctacagtactgatacctgcttcacaagatcccagtacaagcttgataggaagtgattttcctgagccccttttgttaggttctttgtttacagctgattcaacaaatttcttatctgcatctggaaacagaagtaaccagcaaaattctggatccagctctagttccatgcttagacctgctgtaaatgttgcagctcaacaagtccctgggttcaacgtatctcagccaagtacaactctaagaggttcagctgatgtgtctaggaggtccttaactgctgctggtgtttctcattttagaagttcaagcatggcattgcagcaccgtgggacttcatccacaccgcatgagattcggagtcaccagccaggatcaagctctcgtgcccatcagcagtcattaagacctggtcattcctcgatagacaggcagagctctggttacttggaccttcagtcttttatgcagtccatagcttcaagggaaggann

SEQ ID NO: 14183 - DNA, 1972 bp, Zea Mays
  misc_feature (1971)..(1972): n is a, c, g, or t
cccaaaacgccgctaccccctctcattttcttcctcgtctccacctccttctctcctcctcgatacatccgagcacgccgaacgctgtcggaaggcacaaagcggcgagcggcgccgggcttcccctctctttctcgcccccgatctgcgccgatcggggcgaccgctctctggggacgccgatcgaaggtcgggcggcgatgcttccgatatacggaagcagtttctagttttcttcagttggtcgccacagtttccagcgctttcagccagttgtctaataacttgttgttgttgttgtacttaaggggtacactaaatccttgatgcaacataataggatcaccgtactgtcttcctcagagaccttccaacttggttctagttccagcaaccctgtcatggatcatcagaatttacttcccaacaactctaatgtggatgaacagattttactcccaaatgcattagagcatgaggactgcccacactatttgctcaacggtcatgatgtgggtgtgccaaatggaagcttgattggtcagcaaaatacaagcttgagcttgtgggaaccagctggatctagctcaatgagctgcttagttgatcatgacaactttttccaggcaaaaagggagcatcttgcctcttctctgtctattggaggccccttaaatatagacaggaggagacatgaaggcactagttcattgcctttacacaacctaaacatagacctcaacattaatcaggctgatcaatttggctctgatgatgttgatcttgtacatggtaatggacaatcaagtgcaaatactgtcacagcccacaggggctctttcataactgatcatattatgcatcatggagtttcttcagatgctacaggaagttcatcatggaatgcagaatgttttaatggtgcagcaagccagcacagtcgtcatccagcttttaagagaaagtatcttgatggatgtcaatgtcatgcagagtcttctgctaatggaagctcacacaattgtcaccagaatgatagtactctgctacctcttcggaccacctgtgaaagtttgactatgccaaccacgacaaattttagtgttccacatcctcctgtggaacagctaaaccagagcactaatatttctgcaaattctactttgattgaccactattcttcttatagtggtccacatgcaaacgaattcatgcgaaatacacggatgcgaataaaccctagtgattatgatcaatcactgcccagccttttacctgaagggagtttcaggtgcccagcttatcagcatacacagcagcagtcatcatttaggccagtgcaacctagacaagtgagctcttctggttctcatagtcgacctcacttgcctgttgttactcaattttcgcaaaatcttcaccgtccttcagcaaatattagttttggatcaaggattgggagttcttccagttctggttctacagtactgatacctgcttcacaagatcccagtacaagcttgataggaagtgattttcctgagccccttttgttaggttctttgtttacagctgattcaacaaatttcttatctgcatctggaaacagaagtaaccagcaaaattctggatccagctctagttccatgcttagacctgctgtaaatgttgcagctcaacaagtccctgggttcaacgtatctcagccaagtacaactctaagaggttcagctgatgtgtctaggaggtccttaactgctgctggtgtttctcattttagaagttcaagcatggcattgcagcaccgtgggacttcatccacaccgcatgagattcggagtcaccagccaggatcaagctctcgtgcccatcagcagtcattaagacctggtcattcctcgatagacaggcagagctctggttacttggaccttcagtcttttatgcagtccatagcttcaagggaaggann

SEQ ID NO: 14184 - DNA, 1804 bp, Zea Mays
  misc_feature (1803)..(1804): n is a, c, g, or t
cccaaaacgccgctaccccctctcattttcttcctcgtctccacctccttctctcctcctcgatacatccgagcacgccgaacgctgtcggaaggcacaaagcggcgagcggcgccgggcttcccctctctttctcgcccccgatctgcgccgatcggggcgaccgctctctggggacgccgatcgaaggatatacggaagcagtttctagttttcttcagttggtcgccacagtttccagcgctttcagccagttgtctaataacttgttgttgttgttgtacttaaggatcaccgtactgtcttcctcagagaccttccaacttggttctagttccagcaaccctgtcatggatcatcagaatttacttcccaacaactctaatgtggatgaacagattttactcccaaatgcattagagcatgaggactgcccacactatttgctcaacggtcatgatgtgggtgtgccaaatggaagcttgattggtcagcaaaatacaagcttgagcttgtgggaaccagctggatctagctcaatgagctgcttagttgatcatgacaactttttccaggcaaaaagggagcatcttgcctcttctctgtctattggaggccccttaaatatagacaggaggagacatgaaggcactagttcattgcctttacacaacctaaacatagacctcaacattaatcaggctgatcaatttggctctgatgatgttgatcttgtacatggtaatggacaatcaagtgcaaatactgtcacagcccacaggggctctttcataactgatcatattatgcatcatggagtttcttcagatgctacaggaagttcatcatggaatgcagaatgttttaatggtgcagcaagccagcacagtcgtcatccagcttttaagagaaagtatcttgatggatgtcaatgtcatgcagagtcttctgctaatggaagctcacacaattgtcaccagaatgatagtactctgctacctcttcggaccacctgtgaaagtttgactatgccaaccacgacaaattttagtgttccacatcctcctgtggaacagctaaaccagagcactaatatttctgcaaattctactttgattgaccactattcttcttatagtggtccacatgcaaacgaattcatgcgaaatacacggatgcgaataaaccctagtgattatgatcaatcactgcccagccttttacctgaagggagtttcaggtgcccagcttatcagcatacacagcagcagtcatcatttaggccagtgcaacctagacaagtgagctcttctggttctcatagtcgacctcacttgcctgttgttactcaattttcgcaaaatcttcaccgtccttcagcaaatattagttttggatcaaggattgggagttcttccagttctggttctacagtactgatacctgcttcacaagatcccagtacaagcttgataggaagtgattttcctgagccccttttgttagctcaacaagtccctgggttcaacgtatctcagccaagtacaactctaagaggttcagctgatgtgtctaggaggtccttaactgctgctggtgtttctcattttagaagttcaagcatggcattgcagcaccgtgggacttcatccacaccgcatgagattcggagtcaccagccaggatcaagctctcgtgcccatcagcagtcattaagacctggtcattcctcgatagacaggcagagctctggttacttggaccttcagtcttttatgcagtccatagcttcaagggaaggann

SEQ ID NO: 14185 - DNA, 2031 bp, Zea Mays
  misc_feature (2030)..(2031): n is a, c, g, or t
cccaaaacgccgctaccccctctcattttcttcctcgtctccacctccttctctcctcctcgatacatccgagcacgccgaacgctgtcggaaggcacaaagcggcgagcggcgccgggcttcccctctctttctcgcccccgatctgcgccgatcggggcgaccgctctctggggacgccgatcgaaggatatacggaagcagtttctagttttcttcagttggtcgccacagtttccagcgctttcagccagttgtctaataacttgttgttgttgttgtacttaagattgacacgcttcgtgttgtaaagcattgccatgtttggggcatgacttgtttttgttgaaatcaattgacttccaaggggtacactaaatccttgatgcaacataataggatcaccgtactgtcttcctcagagaccttccaacttggttctagttccagcaaccctgtcatggatcatcagaatttacttcccaacaactctaatgtggatgaacagattttactcccaaatgcattagagcatgaggactgcccacactatttgctcaacggtcatgatgtgggtgtgccaaatggaagcttgattggtcagcaaaatacaagcttgagcttgtgggaaccagctggatctagctcaatgagctgcttagttgatcatgacaactttttccaggcaaaaagggagcatcttgcctcttctctgtctattggaggccccttaaatatagacaggaggagacatgaaggcactagttcattgcctttacacaacctaaacatagacctcaacattaatcaggctgatcaatttggctctgatgatgttgatcttgtacatggtaatggacaatcaagtgcaaatactgtcacagcccacaggggctctttcataactgatcatattatgcatcatggagtttcttcagatgctacaggaagttcatcatggaatgcagaatgttttaatggtgcagcaagccagcacagtcgtcatccagcttttaagagaaagtatcttgatggatgtcaatgtcatgcagagtcttctgctaatggaagctcacacaattgtcaccagaatgatagtactctgctacctcttcggaccacctgtgaaagtttgactatgccaaccacgacaaattttagtgttccacatcctcctgtggaacagctaaaccagagcactaatatttctgcaaattctactttgattgaccactattcttcttatagtggtccacatgcaaacgaattcatgcgaaatacacggatgcgaataaaccctagtgattatgatcaatcactgcccagccttttacctgaagggagtttcaggtgcccagcttatcagcatacacagcagcagtcatcatttaggccagtgcaacctagacaagtgagctcttctggttctcatagtcgacctcacttgcctgttgttactcaattttcgcaaaatcttcaccgtccttcagcaaatattagttttggatcaaggattgggagttcttccagttctggttctacagtactgatacctgcttcacaagatcccagtacaagcttgataggaagtgattttcctgagccccttttgttaggttctttgtttacagctgattcaacaaatttcttatctgcatctggaaacagaagtaaccagcaaaattctggatccagctctagttccatgcttagacctgctgtaaatgttgcagctcaacaagtccctgggttcaacgtatctcagccaagtacaactctaagaggttcagctgatgtgtctaggaggtccttaactgctgctggtgtttctcattttagaagttcaagcatggcattgcagcaccgtgggacttcatccacaccgcatgagattcggagtcaccagccaggatcaagctctcgtgcccatcagcagtcattaagacctggtcattcctcgatagacaggcagagctctggttacttggaccttcagtcttttatgcagtccatagcttcaagggaaggann

SEQ ID NO: 14186 - DNA, 1695 bp, Zea Mays
ctctataaagatatagatacatgtatagatatatagacatagatttataaaattatgtgtcgtgttaaagtgtgtgtatatatagcttatattgctacatacccaacattcttagaatcatatagtcacagctgaaactagcaaatataaacaaaccatggggggcaagaagatccccagcaccacatcgtgttcaccactaccctccactgattctgatcaccggggcatcagtgacgggcacgtcttgctcctgccatacccgggagcgcaagggcacaccaacccgctgctccagtttggccgccgcctcgcctaccacggcctccaccccacgctcgtcactacgcggtacgtgctctccaccacgccgcctcctggtgaaccattcagggtggccaacatctcggacggtttcgacgattgcggcgcggccgcgtgcccggacctctccgagtactggcgccagcttcaggccatcggctcggtgacgctagcagagcttatccggtcggaggcctccgagggtcggcccgtgcgcgtgctggtttacgaccctttcctgccatggtcacggcgggtggcgcaggaggctggggtggcggcggtggcgttcctgtcgcaatcatgcgccgtcgacgtcgtgtacggggaggtgttgtcggggcggctgccgctgccagtggtaaatgggaaggagctctttgcgcgcgggctgctcggtgtcgagctcgggcccgacgacgtgccgccgttcgtggcaaagcctgactggtgccctttgttccttcgggcatcgctgcagcaattcgaggggctggaggacgccgacgacgtgctcgtcaactcattccacgatattgaacccaaggaggcagattatatggcactaacatggcgtgcaaagacaataggcccaaccttgccatcattttatcttgatgatgaccgttttccgttgaacaagacctatggtttcaacctcttcaacagcagcgagccatgtctggcttggcttgacaaacagcttccgcgttctgttattcttgtatcctacggtactgtctctaattacgatgaagcacagttagaagagcttggcaatggattgtacaattctggcaaaccattcatttgggttgtgaggtcaaatgaagaacacaagttgtccgatgaacttcgtgacaagtgcaaggaacgtggccttattgtttcttggtgcccccagcttgaagttctagcacataaagctacagcaattgttaatggtgtgccaatggtggcaataccacactgggcagaccagccgaccatatcaaaatatatggagagcatgtggggcttgggtgtccgggtgcgcaaggatgagaaaggcttggtgacgagggacgaggtggaaaggtgcatcaaggatgtcatggatggtgatagtaaggataagtataggaagagtgccactatgtggatgcaaaaggccaaggcagctatgcagaatggagggagctcggacaagaatattacagaattcgccgcgaagtactcatcaggtcaaaaaaatatagtggcatagaattagtaggtgagcaatttgtagtcaatatttgttggaggtatcttctgaaatgtggagcgagccaaaagaaaatttatgacggaaccgtccaatttaactagttttaaatgtccccatcacta

SEQ ID NO: 14187 - DNA, 2141 bp, Zea Mays
cttcactcaaggcaccggggccgtacgcttccgtgcccaccgccatgccattgctcagcgaccctggtcctggtgcgcgcgccatggcgaagcagttgaaggtgctgcttcctccttccttccacaagatgcgcatctccgacgaactctctggttgcttcgaggccggcgacggggcgccagagccgacggctctagtggtcagtcccttcggcaaggtgtggcgtgtggctgtgggccgggacggcgacggtgcattcctggggcgcgggtgggcggagttcttggccgctcacggcatcggcctcggtttctttgtggtgctgcggcacgagggtggcggcacgctcaccgtcaaggtgttcgacaccagcttgtgcattaaagggttcagcgctccggctgcagttatgacatccagaggcagcaaaggtgttatctgtaagccacagttcatcaggatttttcatccatatctctcagaaaagatgatattgcctgctaggtttgtgaaatattacatcacagacgagtggctaaacagccagacggccatcattctcagcccccttggcaaattttggcgtattgagcttaagaatgatcaatcaggcatcttcttcacaggtggctggtcacagtttctggaattccatggaatatgtaatggtgatgttttgcacttgagatacgaagggaacatggttttcaaattcaaagcatttggtcttggtggatgccagaaagatttcaagaaccagaacgctgggattcgatcaagtaaggaaaaacgacaggaaacaccttccatcaggaaacgtaaaagcaatgatgagaagtcaagaagtgaagaaaacaagaggccaaaaggtccaaagaattcccgattactagaaccctatcgtattgggacatcatcttggataaggaaaagcatcaacacctatgcacttgagcaccttcttccgttgtcaaaggagttctgcggtcggattgggttccagatggcttgcaagatcacgcttaagacaaaaatggacagcgccagatcatggctggtgcatggtgctgcatacaagaactactgctgcctcgtcggagtggcctggaagagcttctgccaggagaacaggatcaagccaggcgacctgtgcaccttcaacatcatcgaaaccacactgtggcatgtcactatcacgcactgtactaacagaaagcaagaagggtcaccttgctcatccagaagagaggacaggaccaagaagggtggttcaagaagtaaaggaacaaaggaacggaaatcccctatggcatctttgaccaagcaggctccatcatacacaagatgagtctacggcattggaccactattttggatgatacggaaggagatgaataccaacggccctctcggaagttagtaggttcacgtcgttaagttacgtagcgctgtcaactagctaactttctaggggctatagtaagccgtctaactttctagagacccagtaagcctctaggatgttaatttgactagcattataaatgatgtttatttttattttacaccacattccacaacataacaaatatatcaatagctatagcacaatatattttcacataaaacatctcacacacaatcacataacaacaattaaatccatagtcttatcaattacatcacaaaagtctcattcatagtcataagacacaacatcttatccagtcataatagtagacaatatcacaacatctcatacatagtcataagacacaaaagtctcaagtatcacaacacataaaatggaagctcactatctccgatcaccatcgaggtacaacgacgagtgatggtcggtacctccactagtgaagagggcttcaacaaagtctaactcgtcatctcgttcctacgtcggcaaggtagctggagggtctaatatatctgtacaaatgatatttgctgagttacaccataatataactaacaacaagtaaatgatgatgaatacctgatgttcggtaggtggaggtaatgatatttgctgagttacaccataatataactaacaacaagtaaatgatgatgaatttgcatacctgatgttcggtaggtagaggtggaggtgaagaccaag

SEQ ID NO: 14188 - DNA, 3555 bp, Zea Mays
aaaaataaaaatcaacacttgcttgctccctctcttctccccttcgtccaggcgccggatctgacacctctcccaccaccaagcttggctgcgctgccgcgcctcgcagatcccgatctccccatgcctcctcgcccccgctgaccccactgcggctgccgacagccacgatggcgtcgcgcccgcccctccgcactacctccgtcgcctccgtcttttcctccaccgactcctccacttccaccggcccccccggtggcgtcccgcagtccatcaccgcgctcctcaacaacccgctcccctcctccgccgcctcctcgtactcctggttgtcgtggccgcccaccaccataacgctacccgatgcggctccaccgccgccgtcgcacccctgcgagatcacccgcgccgacttcgcaccctaccttgccgccgtctccgaccccttcgcgcgcttcgccgacatccgcctccatgcccacgccgagcttgccgcctcttctgacgccgagggcgcccccgcggcctcctccggcctcgccgcctgtctccgtgaggtgcccgcgctcttctttaaggaggacttcgcgctcgaagacgggcccaccttccaggccgcctgcccgctcgacgacgatgcgctgcaggagcgcctcggacagcacctcgacgtcgttgaggcccaccttgtgcgggagatagcactccggtctgagtccttctatgaggcgcagggccggctgcgcgggcttgatggggagatcgtcacggcggtagggaggatccgcgagctcagagaggtggtccaggttctcacgggggacctcgtcggggcagcgaggcaggtgcaagagctcaatgctacccgaggcaaccttgtggcgctgcagcagaagctcactgtcatcctctatgttagccaggcgcttaccgcgctgaagctgcttgttgcagctgcagattgtgctggtgcactcgatgtcatcgataacttgcaaaatctgctagatactgatgaacttgctgggctttattgctttcggcatattcgagatcagctgggaacatcactagattccgtgaacagaatttgtgcatgctgctgttcctgatggaaaagctgtagatgctatgattttatcaactgtgaaaagaaaggcttcgagcccattgaatgggacagaccatgagggtaacatagacgaggaggaaagttttattctcagggaccggctcctccccctcattatttgcctactgagaacggacaaatttcctgcagttctcagaatttaccgggatacacttataactgttatgaaagcttcaatcaaagcaacagtagcggaattactccctgttttaactgccagaccaatagattctgattcagtaactggaggcagagctaccgatgctgacgctggaggccagtccttggcaaataagttgcggagtctttcatctgaaggatttgttcaacttttatctgccattttcaggatagtacaggtacatttacagcaagcagctgaagtgaaaagaatagttgagtggatcatgggaaaccttgatgaaacattaagtattgatgctagtaatcctacattacaacatggtggttcagttatttatgatacccaagagaatgactcttcacggggctctaatactcttgcacggagtacttccaagatcccatttgtccaaggaaaaataaatgatttttccattataagttcaataaagaatgttcgggctgatgtcttgagagaaaacactgaagcagttttcgcggcttgtgatgctgcccatggacgatgggctaagctactaggtgttcgtgctggattacatcccaggttaaggcttgaagaattcttgatcatctacagcataacagaagaatttatagctgctacagaaaagattggaggcaggttgggttacaacattcgtggaatcctacaacaacaatcaaagcaatttgttgattatcagcataatgttcggatgacaaaaatcaaggcagttcttgaccaagagacgtgggttgctgtggatgttcctgaagagtttcaagcaatcgttctttcactttcatccacttactcttctgttaatggcatggagatgcctagcactgatgataactcaaagttcagtgatcatcagcctacaagtcaagaactgacatattctgctgaaaataatgctgataatggcaaagtaacatccgggactggtgaaaaccaggttgaatccacttctcagagtgcaaataatgttgccgggaatctgaaatccaccttgcaaacaattgtacatggaggtgttggctatcatatggtaaactgcggtttgatactgttgaagatgttatctgaatatgttgacatcagtaaatgtttaccatcactatctttggaggtggtccaacgtgttgtggaaatattgaagcttttcaacactaggacttgccaacttgttctcggtgcaggggccatgcagatatcagacgagtgcttttcctgaaaatacctgaagcacgcaaacagttgctaatgtctgagctggatagagtggctcaggactacaagatccatcgcgatgagattcacagtaaacttgtccagatcatgagagagaggctgcttgcaaatcttagaaaattaccccaaattgtggaaggctggaatgccccacaggataatgatgtgcagccgagtcaatttgctaaagctgttacaaaggaagttacctatttgcaccgtatcctttctcaaacactgcttgaggttgaggtgcaaacaatattcaggcaagtggttcaaatatttcattcacatattacagaagcatttacaaaattggaagtcagtactcctcaggcaaaggatagattatgccgagatgttcagcatattcttgcatgcatccggaagttgccagctgacaacttcagttcagaaactattccaaattatggtcttcttgacgaattcttggctgagaactttgggacgaaagttggtgaatgattgactgtacattaggaactgactcatgtctataaatgttcaatggtggaaactggaaactatgttgattgggacgtggtccaagatgttgccgtttttggcgtgaattctgtgcaggtattgctgtgcgggtttgtgaaaaaaaaatcagctgctctgatgttcaacaaactaacatgctgatcctcacacttcccgagatgaatttttgggtccacagctttgccatttcaggcaattttttgtttttattttgattcaatagtaatttgattcccgtttggcaagctgatatcggttagatgctggtatagaggaaacctgagttttggcagcacgacctaatctttgcatggtgcttcatgctgttaggtccactgtatcgaacatgccgttgagatggcaacccatgtattttatccctgtaatgtttgtaattattcttcctggtgcgaaagtaatcaattgttaaatgctaatgtaggcagaacttcaagctccgtcagtgtctatt

SEQ ID NO: 14189 - DNA, 1215 bp, Zea Mays
caacacttgcttgctccctctcttctccccttcgtccaggcgccggatctgacacctctcccaccaccaagcttggctgcgctgccgcgcctcgcagatcccgatctccccatgcctcctcgcccccgctgaccccactgcggctgccgacagccacgatggcgtcgcgcccgcccctccgcactacctccgtcgcctccgtcttttcctccaccgactcctccacttccaccggcccccccggtggcgtcccgcagtccatcaccgcgctcctcaacaacccgctcccctcctccgccgcctcctcgtactcctggttgtcgtggccgcccaccaccataacgctacccgatgcggctccaccgccgccgtcgcacccctgcgagatcacccgcgccgacttcgcaccctaccttgccgccgtctccgaccccttcgcgcgcttcgccgacatccgcctccatgcccacgccgagcttgccgcctcttctgacgccgagggcgcccccgcggcctcctccggcctcgccgcctgtctccgtgaggtgcccgcgctcttctttaaggaggacttcgcgctcgaagacgggcccaccttccaggccgcctgcccgctcgacgacgatgcgctgcaggagcgcctcggacagcacctcgacgtcgttgaggcccaccttgtgcgggagatagcactccggtctgagtccttctatgaggcgcagggccggctgcgcgggcttgatggggagatcgtcacggcggtagggaggatccgcgagctcagagaggtggtccaggttctcacgggggacctcgtcggggcagcgaggcaggtgcaagagctcaatgctacccgaggcaaccttgtggcgctgcagcagaagctcactgtcatcctctatgttagccaggcgcttaccgcgctgaagctgcttgttgcagctgcagattgtgctggtgcactcgatgtcatcgataacttgcaaaatctgctagatactgatgaacttgctgggctttattgctttcggcatattcgagatcagctgggaacatcactagattccgtgaacaggctactcttgatgtggaaacataggtgcgagttctgactgaaacgttggcaatattctctagccacagagataagctggcttgttttagaaagggccaataagtgttccctttttgtatttcgtcccaatgtgaaaataa

SEQ ID NO: 14190 - DNA, 3546 bp, Zea Mays
caacacttgcttgctccctctcttctccccttcgtccaggcgccggatctgacacctctcccaccaccaagcttggctgcgctgccgcgcctcgcagatcccgatctccccatgcctcctcgcccccgctgaccccactgcggctgccgacagccacgatggcgtcgcgcccgcccctccgcactacctccgtcgcctccgtcttttcctccaccgactcctccacttccaccggcccccccggtggcgtcccgcagtccatcaccgcgctcctcaacaacccgctcccctcctccgccgcctcctcgtactcctggttgtcgtggccgcccaccaccataacgctacccgatgcggctccaccgccgccgtcgcacccctgcgagatcacccgcgccgacttcgcaccctaccttgccgccgtctccgaccccttcgcgcgcttcgccgacatccgcctccatgcccacgccgagcttgccgcctcttctgacgccgagggcgcccccgcggcctcctccggcctcgccgcctgtctccgtgaggtgcccgcgctcttctttaaggaggacttcgcgctcgaagacgggcccaccttccaggccgcctgcccgctcgacgacgatgcgctgcaggagcgcctcggacagcacctcgacgtcgttgaggcccaccttgtgcgggagatagcactccggtctgagtccttctatgaggcgcagggccggctgcgcgggcttgatggggagatcgtcacggcggtagggaggatccgcgagctcagagaggtggtccaggttctcacgggggacctcgtcggggcagcgaggcaggtgcaagagctcaatgctacccgaggcaaccttgtggcgctgcagcagaagctcactgtcatcctctatgttagccaggcgcttaccgcgctgaagctgcttgttgcagctgcagattgtgctggtgcactcgatgtcatcgataacttgcaaaatctgctagatactgatgaacttgctgggctttattgctttcggcatattcgagatcagctgggaacatcactagattccgtgaacagcagaatttgtgcatgctgctgttcctgatggaaaagctgtagatgctatgattttatcaactgtgaaaagaaaggcttcgagcccattgaatgggacagaccatgagggtaacatagacgaggaggaaagttttattctcagggaccggctcctccccctcattatttgcctactgagaacggacaaatttcctgcagttctcagaatttaccgggatacacttataactgttatgaaagcttcaatcaaagcaacagtagcggaattactccctgttttaactgccagaccaatagattctgattcagtaactggaggcagagctaccgatgctgacgctggaggccagtccttggcaaataagttgcggagtctttcatctgaaggatttgttcaacttttatctgccattttcaggatagtacaggtacatttacagcaagcagctgaagtgaaaagaatagttgagtggatcatgggaaaccttgatgaaacattaagtattgatgctagtaatcctacattacaacatggtggttcagttatttatgatacccaagagaatgactcttcacggggctctaatactcttgcacggagtacttccaagatcccatttgtccaaggaaaaataaatgatttttccattataagttcaataaagaatgttcgggctgatgtcttgagagaaaacactgaagcagttttcgcggcttgtgatgctgcccatggacgatgggctaagctactaggtgttcgtgctggattacatcccaggttaaggcttgaagaattcttgatcatctacagcataacagaagaatttatagctgctacagaaaagattggaggcaggttgggttacaacattcgtggaatcctacaacaacaatcaaagcaatttgttgattatcagcataatgttcggatgacaaaaatcaaggcagttcttgaccaagagacgtgggttgctgtggatgttcctgaagagtttcaagcaatcgttctttcactttcatccacttactcttctgttaatggcatggagatgcctagcactgatgataactcaaagttcagtgatcatcagcctacaagtcaagaactgacatattctgctgaaaataatgctgataatggcaaagtaacatccgggactggtgaaaaccaggttgaatccacttctcagagtgcaaataatgttgccgggaatctgaaatccaccttgcaaacaattgtacatggaggtgttggctatcatatggtaaactgcggtttgatactgttgaagatgttatctgaatatgttgacatcagtaaatgtttaccatcactatctttggaggtggtccaacgtgttgtggaaatattgaagcttttcaacactaggacttgccaacttgttctcggtgcaggggccatgcagatatcagacgagtgcttttcctgaaaatacctgaagcacgcaaacagttgctaatgtctgagctggatagagtggctcaggactacaagatccatcgcgatgagattcacagtaaacttgtccagatcatgagagagaggctgcttgcaaatcttagaaaattaccccaaattgtggaaggctggaatgccccacaggataatgatgtgcagccgagtcaatttgctaaagctgttacaaaggaagttacctatttgcaccgtatcctttctcaaacactgcttgaggttgaggtgcaaacaatattcaggcaagtggttcaaatatttcattcacatattacagaagcatttacaaaattggaagtcagtactcctcaggcaaaggatagattatgccgagatgttcagcatattcttgcatgcatccggaagttgccagctgacaacttcagttcagaaactattccaaattatggtcttcttgacgaattcttggctgagaactttgggacgaaagttggtgaatgattgactgtacattaggaactgactcatgtctataaatgttcaatggtggaaactggaaactatgttgattgggacgtggtccaagatgttgccgtttttggcgtgaattctgtgcaggtattgctgtgcgggtttgtgaaaaaaaaatcagctgctctgatgttcaacaaactaacatgctgatcctcacacttcccgagatgaatttttgggtccacagctttgccatttcaggcaattttttgtttttattttgattcaatagtaatttgattcccgtttggcaagctgatatcggttagatgctggtatagaggaaacctgagttttggcagcacgacctaatctttgcatggtgcttcatgctgttaggtccactgtatcgaacatgccgttgagatggcaacccatgtattttatccctgtaatgtttgtaattattcttcctggtgcgaaagtaatcaattgttaaatgctaatgtaggcagaacttcaagctccgtcagtgtctatt

SEQ ID NO: 14191 - DNA, 1155 bp, Zea Mays
ggctcctccccctcattatttgcctactgagaacggtacatttacagcaagcagctgaagtgaaaagaatagttgagtggatcatgggaaaccttgatgaaacattaagtattgatgctagtaatcctacattacaacatggtggttcagttatttatgatacccaagagaatgactcttcacggggctctaatactcttgcacggagtacttccaagatcccatttgtccaaggaaaaataaatgatttttccattataagttcaataaagaatgttcgggctgatgtcttgagagaaaacactgaagcagttttcgcggcttgtgatgctgcccatggacgatgggctaagctactaggtgttcgtgctggattacatcccaggttaaggcttgaagaattcttgatcatctacagcataacagaagaatttatagctgctacagaaaagattggaggcaggttgggttacaacattcgtggaatcctacaacaacaatcaaagcaatttgttgattatcagcataatgttcggatgacaaaaatcaaggcagttcttgaccaagagacgtgggttgctgtggatgttcctgaagagtttcaagcaatcgttctttcactttcatccacttactcttctgttaatggcatggagatgcctagcactgatgataactcaaagttcagtgatcatcagcctacaagtcaagaactgacatattctgctgaaaataatgctgataatggcaaagtaacatccgggactggtgaaaaccaggttgaatccacttctcagagtgcaaataatgttgccgggaatctgaaatccaccttgcaaacaattgtacatggaggtgttggctatcatatggtaaactgcggtttgatactgttgaagatgttatctgaatatgttgacatcagtaaatgtttaccatcactatctttggaggtggtccaacgtgttgtggaaatattgaagcttttcaacactaggacttgccaacttgttctcggtgcaggggccatgcagaacctgagctgcatacattgattgaaccacatgcatcagtgcatgaagcaactgtttgcaaaataagctgttcctatatggacactattttaatcatttttttctcgaacgcgcaggagag

SEQ ID NO: 14192 - DNA, 941 bp, Zea Mays
cacttcaacaattcaaggacctctaccttgacatctaacttgcggatgagctactagaagaagcggggctgatgtcttgagagaaaacactgaagcagttttcgcggcttgtgatgctgcccatggacgatgggctaagctactaggtgttcgtgctggattacatcccaggttaaggcttgaagaattcttgatcatctacagcataacagaagaatttatagctgctacagaaaagattggaggcaggttgggttacaacattcgtggaatcctacaacaacaatcaaagcaatttgttgattatcagcataatgttcggatgacaaaaatcaaggcagttcttgaccaagagacgtgggttgctgtggatgttcctgaagagtttcaagcaatcgttctttcactttcatccacttactcttctgttaatggcatggagatgcctagcactgatgataactcaaagttcagtgatcatcagcctacaagtcaagaactgacatattctgctgaaaataatgctgataatggcaaagtaacatccgggactggtgaaaaccaggttgaatccacttctcagagtgcaaataatgttgccgggaatctgaaatccaccttgcaaacaattgtacatggaggtgttggctatcatatggtaaactgcggtttgatactgttgaagatgttatctgaatatgttgacatcagtaaatgtttaccatcactatctttggaggtggtccaacgtgttgtggaaatattgaagcttttcaacactaggacttgccaacttgttctcggtgcaggggccatgcagaacctgagctgcatacattgattgaaccacatgcatcagtgcatgaagcaactgtttgcaaaataagctgttcctatatggacactattttaatcatttttttctcgaacgcgcaggagag

SEQ ID NO: 14193 - DNA, 942 bp, Zea Mays
atcaactacgggagcgcagcccctcggcggagatcgatctcctcgagggcggcagcagcggaaggggaagcctagggctgatgtcttgagagaaaacactgaagcagttttcgcggcttgtgatgctgcccatggacgatgggctaagctactaggtgttcgtgctggattacatcccaggttaaggcttgaagaattcttgatcatctacagcataacagaagaatttatagctgctacagaaaagattggaggcaggttgggttacaacattcgtggaatcctacaacaacaatcaaagcaatttgttgattatcagcataatgttcggatgacaaaaatcaaggcagttcttgaccaagagacgtgggttgctgtggatgttcctgaagagtttcaagcaatcgttctttcactttcatccacttactcttctgttaatggcatggagatgcctagcactgatgataactcaaagttcagtgatcatcagcctacaagtcaagaactgacatattctgctgaaaataatgctgataatggcaaagtaacatccgggactggtgaaaaccaggttgaatccacttctcagagtgcaaataatgttgccgggaatctgaaatccaccttgcaaacaattgtacatggaggtgttggctatcatatgcggtttgatactgttgaagatgttatctgaatatgttgacatcagtaaatgtttaccatcactatctttggaggtggtccaacgtgttgtggaaatattgaagcttttcaacactaggacttgccaacttgttctcggtgcaggggccatgcagaacctgagctgcatacattgattgaaccacatgcatcagtgcatgaagcaactgtttgcaaaataagctgttcctatatggacactattttaatcatttttttctcgaacgcgcaggagag

SEQ ID NO: 14194 - DNA, 882 bp, Zea Mays
atggcaggagctttgcctttcattaagaggggaaaagaaatgtacaatagaagggagtttgacaagctcccgaggccttgccaaggttttgagtcatccgtccaatcctaccaaagccagcggagcctgagcgcacgtccaaacttctcaaggtcgaggaccccaagttcgcccaagtctttaggtctactcaccgttgtccaattgaccagtttttataagtttttttttgaaactgcagatatcagacgagtgcttttcctgaaaatacctgaagcacgcaaacagttgctaatgtctgagctggatagagtggctcaggactacaagatccatcgcgatgagattcacagtaaacttgtccagatcatgagagagaggctgcttgcaaatcttagaaaattaccccaaattgtggaaggctggaatgccccacaggataatgatgtgcagccgagtcaatttgctaaagctgttacaaaggcaagtggttcaaatatttcattcacatattacagaagcatttacaaaattggaagtcagtactcctcaggcaaaggatagattatgccgagatgttcagcatattcttgcatgcatccggaagttgccagctgacaacttcagttcagaaactattccaaattatggtcttcttgacgaattcttggctgagaactttgggacgaaagttggtgaatgattgactgtacattaggaactgactcatgtctataaatgttcaatggtggaaactggaaactatgttgattgggacgtggtccaagatgttgccgtttttggcgtgaattctgtgcagcatcaacaacatcaatatggccttttagtcccaaacaagttggcttaggttagagttgaaac

SEQ ID NO: 14195 - DNA, 950 bp, Zea Mays
atggcaggagctttgcctttcattaagaggggaaaagaaatgtacaatagaagggagtttgacaagctcccgaggccttgccaaggttttgagtcatccgtccaatcctaccaaagccagcggagcctgagcgcacgtccaaacttctcaaggtcgaggaccccaagttcgcccaagtctttaggtctactcaccgttgtccaattgaccagtttttataagtttttttttgaaactgcagatatcagacgagtgcttttcctgaaaatacctgaagcacgcaaacagttgctaatgtctgagctggatagagtggctcaggactacaagatccatcgcgatgagattcacagtaaacttgtccagatcatgagagagaggctgcttgcaaatcttagaaaattaccccaaattgtggaaggctggaatgccccacaggataatgatgtgcagccgagtcaatttgctaaagctgttacaaaggaagttacctatttgcaccgtatcctttctcaaacactgcttgaggttgaggtgcaaacaatattcaggcaagtggttcaaatatttcattcacatattacagaagcatttacaaaattggaagtcagtactcctcaggcaaaggatagattatgccgagatgttcagcatattcttgcatgcatccggaagttgccagctgacaacttcagttcagaaactattccaaattatggtcttcttgacgaattcttggctgagaactttgggacgaaagttggtgaatgattgactgtacattaggaactgactcatgtctataaatgttcaatggtggaaactggaaactatgttgattgggacgtggtccaagatgttgccgtttttggcgtgaattctgtgcagcatcaacaacatcaatatggccttttagtcccaaacaagttggcttaggttagagttgaaac

SEQ ID NO: 14196 - DNA, 948 bp, Zea Mays
atggcaggagctttgcctttcattaagaggggaaaagaaatgtacaatagaagggagtttgacaagctcccgaggccttgccaaggttttgagtcatccgtccaatcctaccaaagccagcggagcctgagcgcacgtccaaacttctcaaggtcgaggaccccaagttcgcccaagtctttaggtctactcaccgttgtccaattgaccagtttttataagtttttttttgaaactgcagatatcagacgagtgcttttcctgaaaatacctgaagcacgcaaacagttgctaatgtctgagctggatagagtggctcaggactacaagatccatcgcgatgagattcacagtaaacttgtccagatcatgagagagaggctgcttgcaaatcttagaaaattaccccaaattgtggaaggctggaatgccccacaggataatgatgtgcagccgagtcaatttgctaaagctgttacaaaggaagttacctatttgcaccgtatcctttctcaaacactgcttgaggttgaggtgcaaacaatattcaggtattgctgtgcgggtttgtgaaaaaaaaatcagctgctctgatgttcaacaaactaacatgctgatcctcacacttcccgagatgaatttttgggtccacagctttgccatttcaggcaattttttgtttttattttgattcaatagtaatttgattcccgtttggcaagctgatatcggttagatgctggtatagaggaaacctgagttttggcagcacgacctaatctttgcatggtgcttcatgctgttaggtccactgtatcgaacatgccgttgagatggcaacccatgtattttatccctgtaatgtttgtaattattcttcctggtgcgaaagtaatcaattgttaaatgctaatgtaggcagaacttcaagctccgtcagtgtctatt

SEQ ID NO: 14197 - DNA, 2026 bp, Zea Mays
cgcagtctcgcacaccacaccaccccccacgcggacgccaaggcgcaacggagagaaagaaagagaagggggatggagcgagaagaataagacatcgtcttcgaccaccccggccggcccctccactcgatctcccagcccctccgtcagccacctcgatctcatccgatgctctagctaggcaggctagcttcgcatggattcacccgcggctgcgtcgtcgctgctcctggaccactcgtgccgccgctcttcctcttcctcttcctccgccgcctgatggtgatggccagcgccggcgtcaacgtgcccggcggcgacgaggtacggaacccgaccgctgcgtccgcgtccaccccagaatgccggatgcgcaggcgccaccgcctcgagccccaaggatccggcgacgccgccgccgctgcggcgccgggcccgagctgggtgcgccgtctccgtcctgcggcctcccggttctcgccgtcgccgtcgccatcgctgtcgccgtcgtcgtcccagagctctgcggacaggcccaacgacgaggagcaggaagagctcgaccatgaggtggaggtggagctcgcgccggcggggccgcagctcgagcccggcgaggctgaaggtgaacctgaagccgaggccgtcgccgtcgccccgcaggtgtggcccgtggccttcggctccctgtccatggcggggcggatgcggatgatggaggacgccgtctcgctccatccggacttgtgcacctgggccgccgacggctcgcccatgcacttcttcggcgtctttgacggccacggcggctcccatgtgtccgcgttatgccgggaccggatgcacgaggtggtggcggaggagctggccagggagggagccaccttcctgcggcggcggcaggagtcggcggcgtcgggcagcgccgcctggtcggagcgggcggaggaggagcgcgcgtggcgcgcggcgctgcagcggggcttccggcgggtggacgatatggcggcgctggcgtgcgcgtgcgggcgcgtggcgcggccaagctgcagctgcccgctcgccggcacctcctccggcatcgtcggctccaccgccgtggtggccctcctcgtccgcggccgcctcgtcgtcgccaactgcggcgactcccgcgccgtgctctgccgcgggcccgccgggacgccgcccgtcccgctctcctccgaccacaagccaaatcgggcagacgagaaggcgcggatcgaggcggccggcgggcgggtggtgttcaacaacgggcaccgcgtgcgtgggatcctcgccatgtcgcgcgcactaggctgctgaggccggaagtgatcgctgagccggagatcaccgtgacggagcgaacggtggaggacgagtgcctgatcctggcgagcgacgggatgtgggacgtgatcagcaacgacatcgcctgcaacgtggcccgccaatgcctggaggacgggaacccgcctcccgccgaccccactgcgggaggaggaggaggagctccggccgccggcgtagtcgtcgtcgccgcccgcgaggccgagccccggtgcctccgcgccgcctcgctcctggccaggctcgccatcggcagggagacacaggataacgtcagcatcgtcgtcgtcgacctcaagcacagggactgagtcagtgagtgagtggtggtatccggtttctgatcctgcagcgcatcagcgtaatcgatctagggctgagctgaactgatactgtgaggaggtgatcgtctagatcgtctagacctttgacatttccttggttctttcgattctaagatataagatttgtagcctgtttcttttctttcggtcgaaatgtatgtgtggagagaaagaaagtggatggaagatttgccgtcctcaactgaaggtggggggaaaaaacggaggacaaaaggaacaatgaaaaagagagcaattgtacagagtatgacaacatgatgctacatttatgtgcattattaataccaacttgtttccgttttctt

SEQ ID NO: 14198 - DNA, 429 bp, Zea Mays
ctccccaaccaaatagaccactagtactctcggtgttgcttcgcttctagaagatagaccgggactcccgccatcatgtgtggattctacgactaacttgaactcggcgcgataatcatcagagggagtgggattgctcgtcgtgatcgctgtggcaccatggagtcgccttcgacgtcgtcaggggccttcgcgtcatcaccgctaatcaggaacagatatcgctagaggaggattactatgatgagttcgacaagttctatgccattgtttcctagtcaaccacacttgtggagaagttatcttagctcggtttattttatttagttatttttgtaaagacatttgttacgaaataaagtatgtgacactagttactatatactaagttgtcatctgtgtgaaacttgatcatggcacatatatgag

SEQ ID NO: 14199 - DNA, 1506 bp, Zea Mays
gggggctccggacatcgaggggcggggttgccggctcggttttggtttggttcgacgtacggttcagtttccgattttaaagtgcccagtcctagaaacgaagaagcgcacgaacccatcgtttgaccgaccaactgcccaacaaacgatggccggcgtgtcagcaagcatcccgtgcgtggtgctcaacacgggccacgcgatgcccgtgctgggcttcgggaccggctcctccagcacgccggaggatctgccggcgaccatcctccacgccgtccgccttggctaccgccacatcgacacggcctccatgtacggcacggagggggcggtcggagccgccgtctccgacgccgtcgctgcgggggccgtcacctcccgcgctgacctcttcatcacctccaagctcgtgatgaaggacgcgcatccggaccgcgtgctccccgcgatccgggagtcgctggcccgcctaggcctggactacctcgacctcttcctcgtccactggcccgtcgccgccgacgagaacaacaagcccgtgccgttcgacatggaaggcgtctggcacgccatggaggagtgccaccgcatcggccttgctaggtccgtcggcgtcagcaacttctctgcggccaagatgtcccggctgctcgccttcgccgccgtaccgccggctgtgaaccaggtggaggtgaacgtcggctggcgtcaagagaaggtcagggaggcctgcgccaagaacggcgtcgtcgtcaccgccttctcgccgctgggcgcgatcggcacggcgtggggatccaacgccgtcatggaaagcggcgcgctggaggacatcgccgccaggagaggcaagaccattgctcagcgttgaggtggcttcacgagcaaggggtgtgctttgtggcgaggagctttaacaaggagaggttgaagcaaaacatggagcttttcgattgggagttgagcgtcgatgacaaggagaagatcatggggattccacagaggagagcatgccgtgcagagttctttttgtcaccagacgggccgtacaagaccttggaggagctatgggacggggagatatgagataccatgtagctgttgtatctattgtttgtcgacatcgttgttgcttgctgctgtggggaaatatcttcggaatactctctgaatgaatgtggactaacagttggtcctggacaattgccttgcatgtcagtatacattttgttgcattctagctaggttgggtgtggtagtactgctagtgattaagattattagggcttttcttagatcatgtacaacctttagtttgccaaataataacttgattttgtgtcattaaaccaaatatctggatcgatagtgcttggcctatgacgagtacatcccagctcatcatatttcatcacatgaacagcattcaccatctaagtgatagattgtaatcatgagccacatatacaaagtcattgccgaaaagatacaagagaaggcttattt

SEQ ID NO: 14200 - DNA, 2547 bp, Zea Mays
acataaaaccctcgttgctgcctgtacatcccgtactcccctagcctgcctcggtgcgccgccgccacacctccaccatggctgcgaccacgccggccaccgacccgccggatgccttgcttgcagtaacagctgatgctcccactcctgctcgtcccaccccggcggagctggtagcccgcgccgtcgcccccgtcaagcccgccttcctctgcccgcctcccgtccgtgaggcacccaaggaggagggtaaagccgccggcggcggggccgtcgtaaaggtggagaagaagtccaagcgccagctcaagcgcgagcggcagcaggaacaaaaatctacttctcacctttgtatcgaagtagggaaaagtggaaatgtggactcatgcaaatatggtacttcttgtcatttcagccatgacataaatgcttatttgtctcagaaaccagctgaccttgaaggcacatgcccatttactgcactgggacatttgtgtccatatggactaacttgtcgattccttagtacacataaggataaccttgctcctcaaaatcatccagagggaaattgtgagagaaatcctttgagcaaagaaattcaaaagctcttatggaagagcaaatataaatttcccaaggccagtgcccagatcaaacttcttggtcttaaggatggaaacaagaataaagcagaagcagtaaatgatgataatccagatgaaacatgtaacctaaatggtgatgacaaaacacttctttctagcattcctgaaaatgttgaacctgatcccacgttgtgcaaagaaatagataattcagggggagaacctttagttgttgactcagttgaatctgtggagccaagggcatcaaagaaatcaaaggttgaagttgatgaaactcgggataatgaaatcaaaggtcctaccactggtattcatgacaatgaggctgaatctgaagttaattcaatcagtggagtaaaagtttcctcaaataaccaaagttcctgcaaagttgatctgatcacgatacctcatttacgtgaaaagaaaattatagattttcgagagaagctgtaccttgctcccttaaccactgttggtaatcttccttttcggaggctctgtaaaaccttgggagctgatgttacttgtggagaaatggctatgtgcacaaatcttttgcaggggcaagcttcagagtgggctttgctgcgacggcatccatcagaggatttgtttggggtgcaaatttgtggaccgtatccagatactgtagcacgaacagttgaacttgtggataacgaatgttcagttgatttcatagacataaatatgggctgcccaattgatatagttgtcaacaagggtgctggatcatcattgctcacaaagcctatgaggattaggagtattgttcaagcggcatcaactgttactgaaaaaccgttaactgttaaggtaaggacagctttctttgagggcaggaatcgtgctgattctttagtttcagatatctacaactggggtgcttcagctataacaatacatggtcgatcacggcaacaacgctacagcaaacttgctgattgggactatatctaccagtgtgcacagaaggctcctgactatttgcatgttattggaaatggcgatgtattctcctttactgactggaacaagcatgtttcagactgctccaaaatttccacttgcatgattgctagaggtgcacttatcaagccttggttatttactgagataaaagaacaaaggcactgggatatcacatctggcgagagattaaatattcttaaagattttgtgcgttttggtctggaacattggggctccgatttcaaaggagttgagacaacacgccatttcctcctagaatggcttagttacacctgccgctacattccggtgggtctgctggatgtgattccacaacgattgaactggaggcctccaagctactatgggcgtgatgacctcgaaaccctgatggtctcagattcagcagctgactgggatctcagagatgttgcttggcaaagttccagaagggtttaccttcgcaccgaagcacaagtccaatgcctatgaccgagcagaaaacggttaaacctttgttccgttgttcgtcagggcaggaactcagcaacaccagtggtgggttctcttgaggatcagagacaactactgaggtccatgctgcttgaacccatcatgttgtgtaacatgattttatatttagccaaatggtgattgtaccaatagtttaagtatagactatagagcacctgataattgaattgctcaattctcctctattcatgctagctctagcatcttacttatccatatacctatatttaaacttactctatgaacaatgcagtttacagtgcaaaacattggtttgagtggctatatgggtgaactattggatacggtctccgaaacaatatctaatgtatgaacgtacgttttctcagctttcccaatggtttaatgctgggcagagggctcaaatctg

SEQ ID NO: 14201 - DNA, 2540 bp, Zea Mays
acataaaaccctcgttgctgcctgtacatcccgtactcccctagcctgcctcggtgcgccgccgccacacctccaccatggctgcgaccacgccggccaccgacccgccggatgccttgcttgcagtaacagctgatgctcccactcctgctcgtcccaccccggcggagctggtagcccgcgccgtcgcccccgtcaagcccgccttcctctgcccgcctcccgtccgtgaggcacccaaggaggagggtaaagccgccggcggcggggccgtcgtaaaggtggagaagaagtccaagcgccagctcaagcgcgagcggcagcaggaacaaaaatctacttctcacctttgtatcgaagtagggaaaagtggaaatgtggactcatgcaaatatggtacttcttgtcatttcagccatgacataaatgcttatttgtctcagaaaccagctgaccttgaaggcacatgcccatttactgcactgggacatttgtgtccatatggactaacttgtcgattccttagtacacataaggataaccttgctcctcaaaatcatccagagggaaattgtgagagaaatcctttgagcaaagaaattcaaaagctcttatggaagagcaaatataaatttcccaaggccagtgcccagatcaaacttcttggtcttaaggatggaaacaagaataaagcagaagcagtaaatgatgataatccagatgaaacatgtaacctaaatggtgatgacaaaacacttctttctagcattcctgaaaatgttgaacctgatcccacgttgtgcaaagaaatagataattcagggggagaacctttagttgttgactcagttgaatctgtggagccaagggcatcaaagaaatcaaaggttgaagttgatgaaactcgggataatgaaatcaaaggtattcatgacaatgaggctgaatctgaagttaattcaatcagtggagtaaaagtttcctcaaataaccaaagttcctgcaaagttgatctgatcacgatacctcatttacgtgaaaagaaaattatagattttcgagagaagctgtaccttgctcccttaaccactgttggtaatcttccttttcggaggctctgtaaaaccttgggagctgatgttacttgtggagaaatggctatgtgcacaaatcttttgcaggggcaagcttcagagtgggctttgctgcgacggcatccatcagaggatttgtttggggtgcaaatttgtggaccgtatccagatactgtagcacgaacagttgaacttgtggataacgaatgttcagttgatttcatagacataaatatgggctgcccaattgatatagttgtcaacaagggtgctggatcatcattgctcacaaagcctatgaggattaggagtattgttcaagcggcatcaactgttactgaaaaaccgttaactgttaaggtaaggacagctttctttgagggcaggaatcgtgctgattctttagtttcagatatctacaactggggtgcttcagctataacaatacatggtcgatcacggcaacaacgctacagcaaacttgctgattgggactatatctaccagtgtgcacagaaggctcctgactatttgcatgttattggaaatggcgatgtattctcctttactgactggaacaagcatgtttcagactgctccaaaatttccacttgcatgattgctagaggtgcacttatcaagccttggttatttactgagataaaagaacaaaggcactgggatatcacatctggcgagagattaaatattcttaaagattttgtgcgttttggtctggaacattggggctccgatttcaaaggagttgagacaacacgccatttcctcctagaatggcttagttacacctgccgctacattccggtgggtctgctggatgtgattccacaacgattgaactggaggcctccaagctactatgggcgtgatgacctcgaaaccctgatggtctcagattcagcagctgactggataaggatctcagagatgttgcttggcaaagttccagaagggtttaccttcgcaccgaagcacaagtccaatgcctatgaccgagcagaaaacggttaaacctttgttccgttgttcgtcagggcaggaactcagcaacaccagtggtgggttctcttgaggatcagagacaactactgaggtccatgctgcttgaacccatcatgttgtgtaacatgattttatatttagccaaatggtgattgtaccaatagtttaagtatagactatagagcacctgataattgaattgctcaattctcctctattcatgctagctctagcatcttacttatccatatacctatatttaaacttactctatgaacaatgcagtttacagtgcaaaacattggtttgagtggctatatgggtgaactattggatacggtctccgaaacaatatctaatgtatgaacgtacgttttctcagctttcccaatggtttaatgctgggcagagggctcaaatctg

SEQ ID NO: 14202 - DNA, 782 bp, Zea Mays
  misc_feature (782)..(782): n is a, c, g, or t
gcagcttactcgtaacggtaaagccaccgacccaactggtctcgtagccgaactgcaagagggaagagaagcatcgcatctctgagtctgaaaccctagccgcctgtctccctgtccggtctccactcgtccgggcgacgagacgacgacggaggctttgcttttgtctactttgaggatgaacgtgatggcagtgatgccatacgtgctcttgatggttatccatttggccctggcagacgcaggctttcagtagagtggtcacggggtgatcgagctgctagacgtgatggcaacaaaccagaagtaaatactaagccaactaaaacattgtttgtcattaactttgatccaatggacacaagagtcagtgatatcgaaagacactttgcaccatttgggaacatatcaagtgttaggataaggaagaactttgcttttgtccggtttgaaacactagaagaagcccgtaaggctcttgaagctactcatgctaccatgcttttggatagggtgatttctgttgagtatgcctttagggatgatgatgaacggagtgataggtacgacagcccaagaagaggtggtggatatggtaggcggggggatagcccagcgtacagatcacgtcctagtccagactatggtcgcccagcaagtcctgtatatggttcgtatggcaggagcagaagtcctgttcgtgaccgctatcggaggtaatgccctaggattattttcattggtttgcatgttgtcttgttgtccatgtcatatgatcatan

SEQ ID NO: 14203 - DNA, 1179 bp, Zea Mays
  misc_feature (1179)..(1179): n is a, c, g, or t
gcagcttactcgtaacggtaaagccaccgacccaactggtctcgtagccgaactgcaagagggaagagaagcatcgcatctctgagtctgaaaccctagccgcctgtctccctgtccggtctccactcgtccgggcgacgagacgacgacggaggaactaccagggcaaaacatagctccccagggctcctcaactcctgaaatttcttccattcactgacctggccacctttttttcatttgaaaccatctgttcatgtgccctgatgcccactgttatgtctgctcgagcatgtttagcgggattgtgattcatgctatgtcatcagcaccatcatgccttaccatgtcacgatagaagtatcaccaacatgacaacatgctatgttactacattgataagcaagagagttctatttatggtgaagcatgttcaatgtctccggtcataatttcttactttggatataagttgttgaacaccattcttagccctcatcatgaatggagtctaccacactagtgctcttcatgccatcagaattatgcaggctttgcttttgtctactttgaggatgaacgtgatggcagtgatgccatacgtgctcttgatggttatccatttggccctggcagacgcaggctttcagtagagtggtcacggggtgatcgagctgctagacgtgatggcaacaaaccagaagtaaatactaagccaactaaaacattgtttgtcattaactttgatccaatggacacaagagtcagtgatatcgaaagacactttgcaccatttgggaacatatcaagtgttaggataaggaagaactttgcttttgtccggtttgaaacactagaagaagcccgtaaggctcttgaagctactcatgctaccatgcttttggatagggtgatttctgttgagtatgcctttagggatgatgatgaacggagtgataggtacgacagcccaagaagaggtggtggatatggtaggcggggggatagcccagcgtacagatcacgtcctagtccagactatggtcgcccagcaagtcctgtatatggttcgtatggcaggagcagaagtcctgttcgtgaccgctatcggaggtaatgccctaggattattttcattggtttgcatgttgtcttgttgtccatgtcatatgatcatan

SEQ ID NO: 14204 - DNA, 1876 bp, Zea Mays
  misc_feature (1876)..(1876): n is a, c, g, or t
gcagcttactcgtaacggtaaagccaccgacccaactggtctcgtagccgaactgcaagagggaagagaagcatcgcatctctgagtctgaaaccctagccgcctgtctccctgtccggtctccactcgtccgggcgacgagacgacgacggagggtttctgcgggggatttgtttgtcgctgactcgccggcgaccaagatgaggccggttttcgtggggaacctagactatgatacccgccactcggagctcgaccacctcttctaccgctatggcagggtcgagcgcatcgacatgaagtcaggttgcccgcccttgcttttgcccacccctcgttttgtcgtcgtgttcggtcgatttaggttcgatctgatcttattgtgtacctagtcagctgttatatcttgatgtttgaatttcattgaattgaaggaaaaaaagtgagggaattcccccattctgtataaaaaaataaaaaatgagggaatgagcacgtttgtacagtaattgttttgataagattcatcatccaatagtgctgtattagttgttccagttattcttggttgattagctaatgatattgttgaaatgattcgtcatctaagttttgaacacgttataccactaggaaatcttttgccgtacagaacttggatagatgtgtttttaaactgggattgaagttgaaatgagtaagatactctgatactttgcagctgtgctgtactcgtgttacatctacttcataaagagcacagacttgcatgtgtgtgctgctccatgctaactggagttgcagtttgtgtaatagtaggcacagaagttttaatttttactctggcgcaggaactaccagggcaaaacatagctccccagggctcctcaactcctgaaatttcttccattcactgacctggccacctttttttcatttgaaaccatctgttcatgtgccctgatgcccactgttatgtctgctcgagcatgtttagcgggattgtgattcatgctatgtcatcagcaccatcatgccttaccatgtcacgatagaagtatcaccaacatgacaacatgctatgttactacattgataagcaagagagttctatttatggtgaagcatgttcaatgtctccggtcataatttcttactttggatataagttgttgaacaccattcttagccctcatcatgaatggagtctaccacactagtgctcttcatgccatcagaattatgcaggctttgcttttgtctactttgaggatgaacgtgatggcagtgatgccatacgtgctcttgatggttatccatttggccctggcagacgcaggctttcagtagagtggtcacggggtgatcgagctgctagacgtgatggcaacaaaccagaagtaaatactaagccaactaaaacattgtttgtcattaactttgatccaatggacacaagagtcagtgatatcgaaagacactttgcaccatttgggaacatatcaagtgttaggataaggaagaactttgcttttgtccggtttgaaacactagaagaagcccgtaaggctcttgaagctactcatgctaccatgcttttggatagggtgatttctgttgagtatgcctttagggatgatgatgaacggagtgataggtacgacagcccaagaagaggtggtggatatggtaggcggggggatagcccagcgtacagatcacgtcctagtccagactatggtcgcccagcaagtcctgtatatggttcgtatggcaggagcagaagtcctgttcgtgaccgctatcggaggtaatgccctaggattattttcattggtttgcatgttgtcttgttgtccatgtcatatgatcatan

SEQ ID NO: 14205 - DNA, 1863 bp, Zea Mays
gacctccctgatccccacagcctgctcctgctcgcaaacggctcgtgaaaacccaaacaccaccgctgcttgcctgagtcagaggccgcggttcaattttgctgtcaaggatttccctgaagttccattcctcaacagcaagatcccggtgctcgatgttttaagcactgtcatggacttctgtgactacccactggcatgtggcgattacggtgtttgcagtgacggacagtgttcttgccccagttccagctatttcaggctccgaagcgaacgacatccagacgctggttgcgtgcccttggcaagcagcgcctcctgcgaccacaggctgataccgctcgacaacgtttcttacttcagttacaccacgttccagtcatcagccaccccgggcatctcccaggctctctgcctgcgttcttgcctactggactgctcctgcagagtcgttctttttcagaggagcctgagcttcggcgaagatggaatgagcttcggtggagacgctggtaactgcttgcttctatcagagcagaagctgatcatgtttgcagaaggctcggcaaacaatgtttcggcgctgttcagcatacaagacggacactcggcggaaaggaggaacattgttattattacttcaacagttgcaggtatttcagttgcatcagttttgggtttcgctgtcttatggaagaagtggagggaagaggaggagccgctgtttgacggcataccggggacaccgagccgtttcaccttccacgagctgaaggctgccacgggcaacttctccaccaagcttggagcgggcggcttcgggtcggtcttcagaggcaccataggcaagcaaaccgtcgctgtgaagcgcctagagggcgtcaatcagggaatggaggagttcttggcagaggtgaagacgatcggcaggatccatcagctgaacctggtcaggctggtaggattctgcgccgagaaatcgcacaggctcctcgtctacgagtacctgtccaacggctcgctggacacatggatcttcggcgcgagtttagtcttcagcctctcctggaaaaccaggcgcggtatcatgctggccattgccaggggcctgtcgtacctccacgaggaatgcgaggagaagatcgctcatctggacatcaagccgcagaacattctcctggacagcaagttcaacgcgaagctctcggacttcgggctctccaagatgatcgacagggaccagagcaaagtcgtgacgcgcatgcgagggacgcgcgggtacctagcgcccgagtggctggggtcgaccatcaccgagaaggcggacgtctacagcttcgggatcgtgatggtggagatgatctgcggccggcggaacctggacgagtccctgccagagcagagcatccacctggtcagcctgctccaggaacgggccaagtctgggcagctgcttgatctggtggacagcggcagcgacgacatgaagtccaacaacgtcgaggaggtcatgcggacgatgaagcttgcgatgtggtgcttgcaggtggatagcagcagcaggccctcgatgtcgacggtcgccaaggtgctggaaggagcggtggccatggaggccacgcctggctgcatcttcgtccccagttttgcgtcaggtgatgatgctgctgctgctgtggcagggtccaattccaattcctcctatgtgccatctgagtcgcacttatctgggcctaggtgatgaagcaactgttttgccatttgcgtcggttaggtgtatatttagtacaagtatttgacatatattctgatcatgggcggcattgtacttgagttgcgaaccgagtgaattaagcattgcat

SEQ ID NO: 14206 - DNA, 2008 bp, Zea Mays
atccccacagcctgctcctgctcgcaaacggctcgtgaaaacccaaacaccaccgctgcttgcctgagtcagaggccgcggttcaattttgctgtcaagctgtttacatgatagatagaggttctgccaaattgtggcctgtgacactccaaacaattcatgcaaacaaaagcagggatttgccggtctaccattacatcctgaaaccatcaagctgtgacatccagctgcaggcggttttcttgaaaccataggatttccctgaagttccattcctcaacagcaagatcccggtgctcgatgttttaagcactgtcatggacttctgtgactacccactggcatgtggcgattacggtgtttgcagtgacggacagtgttcttgccccagttccagctatttcaggctccgaagcgaacgacatccagacgctggttgcgtgcccttggcaagcagcgcctcctgcgaccacaggctgataccgctcgacaacgtttcttacttcagttacaccacgttccagtcatcagccaccccgggcatctcccaggctctctgcctgcgttcttgcctactggactgctcctgcagagtcgttctttttcagaggagcctgagcttcggcgaagatggaatgagcttcggtggagacgctggtaactgcttgcttctatcagagcagaagctgatcatgtttgcagaaggctcggcaaacaatgtttcggcgctgttcagcatacaagacggacactcggcggaaaggaggaacattgttattattacttcaacagttgcaggtatttcagttgcatcagttttgggtttcgctgtcttatggaagaagtggagggaagaggaggagccgctgtttgacggcataccggggacaccgagccgtttcaccttccacgagctgaaggctgccacgggcaacttctccaccaagcttggagcgggcggcttcgggtcggtcttcagaggcaccataggcaagcaaaccgtcgctgtgaagcgcctagagggcgtcaatcagggaatggaggagttcttggcagaggtgaagacgatcggcaggatccatcagctgaacctggtcaggctggtaggattctgcgccgagaaatcgcacaggctcctcgtctacgagtacctgtccaacggctcgctggacacatggatcttcggcgcgagtttagtcttcagcctctcctggaaaaccaggcgcggtatcatgctggccattgccaggggcctgtcgtacctccacgaggaatgcgaggagaagatcgctcatctggacatcaagccgcagaacattctcctggacagcaagttcaacgcgaagctctcggacttcgggctctccaagatgatcgacagggaccagagcaaagtcgtgacgcgcatgcgagggacgcgcgggtacctagcgcccgagtggctggggtcgaccatcaccgagaaggcggacgtctacagcttcgggatcgtgatggtggagatgatctgcggccggcggaacctggacgagtccctgccagagcagagcatccacctggtcagcctgctccaggaacgggccaagtctgggcagctgcttgatctggtggacagcggcagcgacgacatgaagtccaacaacgtcgaggaggtcatgcggacgatgaagcttgcgatgtggtgcttgcaggtggatagcagcagcaggccctcgatgtcgacggtcgccaaggtgctggaaggagcggtggccatggaggccacgcctggctgcatcttcgtccccagttttgcgtcaggtgatgatgctgctgctgctgtggcagggtccaattccaattcctcctatgtgccatctgagtcgcacttatctgggcctaggtgatgaagcaactgttttgccatttgcgtcggttaggtgtatatttagtacaagtatttgacatatattctgatcatgggcggcattgtacttgagttgcgaaccgagtgaattaagcattgcat

SEQ ID NO: 14207 - DNA, 1187 bp, Zea Mays
caaacggctcgtgaaaacccaaacaccaccgctgcttgcctgagtcagaggccgcggttcaattttgctgtcaagctgtttacatgatagatagaggttctgccaaattgtggcctgtgacactccaaacaattcatgcaaacaaaagcagggatttgccggtctaccattacatcctgaaaccatcaagctgtgacatccagctgcaggcggttttcttgaaaccataggtatgaaatgaaaccatgggcatgcaatacttcaaacatgtgggtggccttccttctagtgattggcttcccttttctcctcactactgtcgtcggccagctctccactacagctcccccgaactcgtgggaacttaccaatctagaagccatacctatggacggagcggtcgctagcatgcgacctgtccttgaaaacagcgcaaacctgtacaggaccttgttcggcttctacaccacggatgggcattcgtttgttctctctgtggtgtttctgggacccaaggctccagtcatctggtctgccaaccccgacagtcctgtgagcagcagcgccgtcctgaatttcaccagagaaggagacctgctcctgcatgaagctggtggcggcacagtaatctggagcacaggtaccagcggcatgtcagttgcagttgcaggcatgaagctggatgacctaggaaaccttgtgctcttcgaccggaagaactcgtctgcgtggcagtcctttgacaacccaaccgacactttggtcctggggcagtcgctctgcagggggaacagcagcctcagcgcgaagccctcgatcacgaaatggcctggcgcaagggtttatctgtctgcagagcttgatgggctgcagtactctttcaagcccgcagcctacacgcagctgttcaaagctactgcagcatcaaccaatgcaacgccaaactgctatgcgttcgtcaacggcagcttcgggttcccggacaaggtcttctcgctgccgctggcaggatcaatgcagctgatgaggttggagtcggatgggcatctgaggctttacgagatggggatacctcagctggaactgcgcatggtgctcgatgttttttttgaaggatcaggaggggggaaacccctactgcgcattttattagaaatcgaaaagtaaaggataggccctggttcttt

SEQ ID NO: 14208 - DNA, 110 bp, Zea Mays
taacaatggccgatttcccaacgtttgggatcccgaccaggagggcagttcccgtgcaattgctgtcgccatgcttgatctccctcattcttgcttgcacgactttcagc

SEQ ID NO: 14209 - DNA, 2746 bp, Zea Mays
cccagcgccgcccctgtcttccctcttccctcattcatccctaccgattgagagagatccctggtaggatcaggaaccctaccagaggtattgccatatctaaaatattttttttgcttaagcctggtttacttgcatgaagtagcaggccagtattgctaatagattgagaagcattagagttaacttgttaagctagtagcaatgttcagccagagatcatggaaatcatttttctaagggcagccaaacattttattcgtgtgctggtgttagttatgtatacctcagtcagtgtttgaaaaagcgtgattaagtgctcgattaggcgctaagcgtggggtttggccgtcgcttaggccctaatcattgaattaagtgcccagacctcttaatcgagcgcgtaatcgtgctcaaacgcataagtgcgcgcttcagtgtcccgctgctgcgccgctgaaatcgtgcgggtcacgcggaaaagaatggcatgcgggactgcgggaggcaagcatgcacgggaaggaaagaggcgcgcaggagcaaagtaaaggaggcgccgcacacgggaaggataactgagtcctcttctggcacgccgcgcctgcaagctccacccaggtggccaggcctgacatcaggaaagaagggaatcaggatcgcactgggcctcttctcaagagaaaatcaaatgattttggatgggagtgggggaaggctatgtgatccaaatgacaagactaaagtcaagtgccttatttgtggccatgagagctcaggaggcattcatcaattcaagcaacaccttgcacacaaagtgactggtgtgaagtattgtgcaaaggtatcgccatatgttaaagagaagtgcaaagaagatcttgagggaacttaaaaaagaaaagggacaagctgattgaaaagggaacactaaaatagaaaatgaacattaacaaagagaagaggacaaaaggcaaggaattgttgctgtaagacccctttaaaacccatcttttagctatataattgaatttttacgatatttgcagttgcaagaactcttaattgcgcttaagctttttcacccatcaagcgctcgcttagcgcttagggcttttttgaaccttgtcctcagttaacaagaagtgaaactggcaaatgaaaattgtatgactaagaaagtaaacacacgacaattactataactatatgacattagagtcttgatcaacttcaatgaaatcaaggcattcagcattttcacctcacaatcaatgaatttagaattattagccgagcttagcctccttagaactggaacttaaagttctcccatttagctctttatctatatactataggtcacttttagaaagattgaagagatatagtaaccaagagaaaattaataattgtgcatgggtatagttttttttgttctaacatgttatttagcacctctagcatatcttcattgtctacctaaaaagcaatgactaaaatcgcattggcatagcatcaaaatttgcatgatcattatagtaacaaactgaaaattaatctgtaaacctttttgttgcctttaagtatacaataagaattgcacaaagtatggctaaggatgtaacatgtggcgtaagagccaaacgaaacttcttgacagtgactccatactagtgatgttatcgcaacttcatcaggaataacgctacatgagtttttcatcaataatactcatgcatgatggaccaatgtaatggtaaagaggttgaattgattcatgtctcccaatgatgccttaaaacatgagacaagaaagagctaaagtctgtaaataaggagtataagtgaaacgagtgctgctgtcatactaactaataacggcagacccaataagggagaccgagtgccggtggctcccatatggtggttcccatatgagcgggttctgggcaagggataaaccgaggcaagccttcccctgcaaatacggagaggccgcttcaaacttgcaacatggttactcagcgagacaaccctcaccactgcaccagacaactccaatacaagttaataaacctgaatgaattgatttcaaagtggagtccaattcgataataattagcaaaaaatgaattaacttttttagaagtcaaaaacaatggatggtggccttagtttgatgcactaaataatgtgcatacaacttatattctgcttggcagtggcaatggcagtaaccatccaatttgaatgcaaattttcttattagtacaatgctaccatgtttttccttggtctgaccacttggatgcatttgagacattgccttcattcttatagagaacaagcaaaagaaagagtagggaaacagctatttcttccatagggcctctttgaaatgaaggaatttcacaggatttgtataggattttcacaagaatcagttcattttcacaagacaaacacatgaagcatgaaaacctcctatgttccaaaggggaagtaagtcatgtcaccataagttagtggatgtggatctaaatcattgtctcagatagcagatctccattttagatttactatttttaataaattaactaacagttaagtacatttgcaaaattctaagcagagtagccgacaagacatttgcaaaattcttattactcatgtagttacatgaggtggatcattcttttctttgcaggaagacgcactgaatgaatataatagtcacacagat

SEQ ID NO: 14210 - DNA, 3001 bp, Zea Mays
cccagcgccgcccctgtcttccctcttccctcattcatccctaccgattgagagagatccctggtaggatcaggaaccctaccagaggtattgccatatctaaaatattttttttgcttaagcctggtttacttgcatgaagtagcaggccagtattgctaatagattgagaagcattagagttaacttgttaagctagtagcaatgttcagccagagatcatggaaatcatttttctaagggcagccaaacattttattcgtgtgctggtgttagttatgtatacctcagtcagtgtttgaaaaagcgtgattaagtgctcgattaggcgctaagcgtggggtttggccgtcgcttaggccctaatcattgaattaagtgcccagacctcttaatcgagcgcgtaatcgtgctcaaacgcataagtgcgcgcttcagtgtcccgctgctgcgccgctgaaatcgtgcgggtcacgcggaaaagaatggcatgcgggactgcgggaggcaagcatgcacgggaaggaaagaggcgcgcaggagcaaagtaaaggaggcgccgcacacgggaaggataactgagtcctcttctggcacgccgcgcctgcaagctccacccaggtggccaggcctgacatcaggaaaggtatcctactatccttcaatcgcctctagtctgctattacagttatccggttgctctgcctgatactgctactacttgtgatagtctgctacaggctacagctatgctaagcctacaagtcatgtgcatttgtgctgtgctactgtctactctcatgtgttgtgctctctgctctttaagctaatagctatgtgcaattctgctagtgctagtctgctgctgtgttgagaacttgaaaatgaatattgggtttatgcaattgtgttgcttaactgtctattgggatggtctaaatgtctaatactccagtcttctctgctcttgtgcaattgcgttgctttactgtcctgtccatgagtccatcttctactcaacctcattgctctctctgcatgtattcctaggatggcagagtcagaggccctgcctgctgttgttccctctggggtggtggctgcagaagggaatcaggatcgcactgggcctcttctcaagagaaaatcaaatgattttggatgggagtgggggaaggctatgtgatccaaatgacaagactaaagtcaagtgccttatttgtggccatgagagctcaggaggcattcatcaattcaagcaacaccttgcacacaaagtgactggtgtgaagtattgtgcaaagttgcaagaactcttaattgcgcttaagctttttcacccatcaagcgctcgcttagcgcttagggcttttttgaaccttgtcctcagttaacaagaagtgaaactggcaaatgaaaattgtatgactaagaaagtaaacacacgacaattactataactatatgacattagagtcttgatcaacttcaatgaaatcaaggcattcagcattttcacctcacaatcaatgaatttagaattattagccgagcttagcctccttagaactggaacttaaagttctcccatttagctctttatctatatactataggtcacttttagaaagattgaagagatatagtaaccaagagaaaattaataattgtgcatgggtatagttttttttgttctaacatgttatttagcacctctagcatatcttcattgtctacctaaaaagcaatgactaaaatcgcattggcatagcatcaaaatttgcatgatcattatagtaacaaactgaaaattaatctgtaaacctttttgttgcctttaagtatacaataagaattgcacaaagtatggctaaggatgtaacatgtggcgtaagagccaaacgaaacttcttgacagtgactccatactagtgatgttatcgcaacttcatcaggaataacgctacatgagtttttcatcaataatactcatgcatgatggaccaatgtaatggtaaagaggttgaattgattcatgtctcccaatgatgccttaaaacatgagacaagaaagagctaaagtctgtaaataaggagtataagtgaaacgagtgctgctgtcatactaactaataacggcagacccaataagggagaccgagtgccggtggctcccatatggtggttcccatatgagcgggttctgggcaagggataaaccgaggcaagccttcccctgcaaatacggagaggccgcttcaaacttgcaacatggttactcagcgagacaaccctcaccactgcaccagacaactccaatacaagttaataaacctgaatgaattgatttcaaagtggagtccaattcgataataattagcaaaaaatgaattaacttttttagaagtcaaaaacaatggatggtggccttagtttgatgcactaaataatgtgcatacaacttatattctgcttggcagtggcaatggcagtaaccatccaatttgaatgcaaattttcttattagtacaatgctaccatgtttttccttggtctgaccacttggatgcatttgagacattgccttcattcttatagagaacaagcaaaagaaagagtagggaaacagctatttcttccatagggcctctttgaaatgaaggaatttcacaggatttgtataggattttcacaagaatcagttcattttcacaagacaaacacatgaagcatgaaaacctcctatgttccaaaggggaagtaagtcatgtcaccataagttagtggatgtggatctaaatcattgtctcagatagcagatctccattttagatttactatttttaataaattaactaacagttaagtacatttgcaaaattctaagcagagtagccgacaagacatttgcaaaattcttattactcatgtagttacatgaggtggatcattcttttctttgcaggaagacgcactgaatgaatataatagtcacacagat

SEQ ID NO: 14211 - DNA, 4951 bp, Zea Mays
gtaaagatgggtgcgtttcatatgtgcgccaaagaagaacaacacatataatgaccaagtgtatagagataaatgtcacaaatattattacatcgcggaagtgtcttataaaaataaatgataacaataaagcgaactaaataattattccctggcgccatcaagttgactgggagacgccaccaagattagctcatactcctcgttgtaggcctcctcctggaccacctgttcttctcctgtggcggggaggtttatatatcgcaagggtgatctcatgaaagatcatagctcaacaagttgtggggaataatgtgcatgaactcatcaaaggtgggagctcatgtgaagtgtaaggttgatcagcaaataatggttaaaactgagcattgcttttaataagttggtcaaattttattagaaatatataccaaaccagagtaataatggatcaaaattaataataaaccacaatgcgatgcaaatgaccagttaaagtgaattccataagttactcgtgtgagggtccgagccgctcatgaccgtgagcacgactaatatactagttttacactctacagaggttgcacatctttacccacaagtcatgttacccatctgccaaggggtcatgaatctcatacacctctaccaaggaagcgaggcagggtaacactacgaggcctttacaaagttctactagcttcagaaaacctgctacagttctagggagcgcatcataggaatccctcgtatgaaaagccatcgcagcaaaatcaacccgagaacctccctataccgaccactcctctacttctcttgcctcgggtaaggtagtcctccactagctttcctaattagttagccaagggcatcccataccacccttgtggtagcactgtttttccgggtggtcgctccatgttctaattaacataataatcttgtcatgaacagtaaataacaaattgataataaaagcatgatcatgaataatgtgtatcttagcacccaaaaccacataaagcaatagcatgtactacccaaaagttcagtggtaaacgaggtataaagattgccaaactggggtgaactattaggacccatcaaaattaacctatgtagatcataatgattaacaggaacattattgggtaaatagaactgatcaagggcacaacttgccttcaacgagctcctgctcagtattttccacctgcaatgtaaggatgtttaagaggtaaaaaatgggcatatttgtctgtctaccactactaatataaatagaacatagagcccttccgatttagtctggccctcaatccatagatatatatttccaagctccatcaggtctatttgtgccggtgccgagctgccatctcatctatgatgaagaatctcttgtcataccaactcgtttactccaaccacggctggcactcaaagaaatgcaattacaaaagaaatggtgattggtgcgttgcttagggggctttctgctttcgatggtacaacccaagtcgactacttaccataataactagtgctaggctctctcacgataacaacccacttcgttgcgccttttttcttgatgggtatgggtgatctttggggcgggttagggttccagatcaggcaaaagtaagaactaaaaacggatacttttgattgattgggttgctttgattgaatcgattgattcacccttggccagagaagaagataggaattccatagagtcttgagagtagaaagcagctaaactggaattcctagatggagaatctgcctcaatacaacgtgagctactatgcccaatggggacttcccctactctatcaaagaggttttccactagcacacgaccaacttttcagactgtatcaccgtttatcttcctccggccatgaaagggatttttgcttttggtaaaaagagtattccttggaagcagtattgtaactgctctattgcgatgacaaagaagagaggtattttggtgtcccgctctacttgactttggataaatatagaagggagaaggttgtgaaggtggccttgttattgacacatctggtcggtggaccgacctggcgagcgtaggcgggtcctggagtgcccgttaagggcgctagcgcataccccggggtgatcatcaccacctgcacctcacatctcggcacagtggaacgtgtaacccgcctgtacgtagactttgcctatttgctcaataaatccttgtgtagtaggagataggaggtcatatcttagctgcttagctcgatatataatattgtcatacatgaatttattaattataaatatggggtgtcccaatcgagtcattgctttcctatataggcttgggaatgttgcgccatacaatggtgttgtgactctaccaggattaccgcctgaacgagaggttgatttatgcatcaaaaccaaacaagcaacagatggagcaactagcgcgaaagccgttgcacattttggtttgctttatacgccatgccattgccactgccatagtagaaagaataagctgcttcttgtttaggacgggctatcttgactcttgagcttgagagggaaaggcttcccgcgtgggcggattagcaatccctagtcttccataacgcgtattggacttatgtttcctcctcctcgaacagaatgtcaaagccagtagtttgaactgccagtggagtgtcgtcgttttgaagttgttgactattgtccacctatcaaattagtgtagacagaagcattgtttgagccttgtcgagaatccgttttggcacttattgtctatagcaaagtgaaggaatagaatgatcatcctgctcctatttaaatagtatagaattccatgaaaagtgtagcaagccgattcaattgactaggtccatagtgaggaaatggtattccaaagagcaaaacaaagccagttggttatcggcagacagaaagcatttatatgtctctttgtaggctcaagcatctgatttcggtgattcgcaaatagcttgtcatagctagttcttacctgaatcgcagtaggttatttgctgctgacaaaggccgctaaggttccactcgagaggatttctattcccctcaccgctgcgcgccttgaagatcatataagtgagtgctcaattgttatactgcgatgggaagaagcggaagatgattcggaacagcaggaagccgctacctagaacggcgcatactcttgaccgctaaccctcagtcaaacgttgatagttgttctttccctactctacttttggatacataacctaatcaatcccttccttttggtttccctggactattgatctagagacgacacctttagaccaatccaatatgcgagtaagaacatgtgcggggataggcatatgtttgaggatatggaggaaatagaacgatttcactaattgtttcgtctgggtcgtctttgatttttttacttatttctttctcactcactatttttttctattttattttgtctatcgaaacagcctaggatttgacctagccagcttatgcttcatttccttcgatttcttctttcgatatgagcgagcttacccaaaacctatactttaatgatctagtagccctattcacatatgcctatttctctaaacctagtcctggctagaagcttcgagagaaagtaaaagagatgatgtggttgaaaaggtggtaactgtggatagcgccaagtaagctaatcctaaatgtccagccacgccaaaccgaactcgagcacctgggtcctcagttgcttgctcgtctactcgcaacaatacaaacaaacatggcatagggaaattaacattgcaccaaacatgagaacatactgcataataatattctacgcattgtaacgagatcgtgagtttgagaatcactaaatttggagttacggttaaagagttatgattttccgaagttattaagtgtttgatacagaataaactaggtgagtaactttaatctatgtttcatgataaaacaaacttacctgacaatgaacaatattaatacaaaattaatgcaactggaatggatcaaaaagaagttaaaattgatttattataatttaaacaagtttctggaattattttaatactaaaaatcattttctatcttttttattccatttactagctctctgcactgcgcgcataattaccaggaagcccgggggtgaaatcataaatattaggactcaaatctaattattttctacctggcgtggatggcgggttgttttataacaagtacagggactctttagcaagtttccagggccgaaggggtacgtggggattccactcgtccgatcaaaatcgaacaacctagattaaatatgatctcctcgaatcggtacacgatgatctcccctggattgaggatctacagtcaggattatatcgatgagtgttctaattccagccacacgataccgatcagatggttccgatcacacgcgagagacatctatctcgggtcgtatccaactgttcccatgcggatccacgaccatcgttggatggagcgaggggttatgcccagaattaatcccgaccgttcatacactaatcgacgatgccccccatcttcttccttggcgccgcaacacagtggtgcgcgcgcgcctcacggcaaccagctcaccgtgagttcgtccattccttgccaccaagctctaaatcttgcatgaccccacgtaatagagggaatagaacatgacggactagataggggtatctcaccagcgaatggcgatgggaaaaaggtcggtccaatgcggtgcagatccttggccgattccggatttcggcgaggaattgcggcgacgacgagtcaccacaaagttgagcgatgccgcggccagcctccacttgcacaggttatgctctac

SEQ ID NO: 14212 - DNA, 515 bp, Zea Mays
agtagactagctactagtagtgctgcgcatatgcacacaaagggcaggaccgcaggagcacacacctcagtgcgccagcgttctgcacctcgctagctcgtcgtcttgcctgcgctgtcgtcgctgatccttgagatctgcagactccatggaggctgcagcagcgacgacggcggcggcgcttcttcctcccgctcggaaggtgttcatcctgcccctgcttctcctcctggctgcatcgtcgctggttccacgagcttcgtctgatggagcgcaatatgattatagagcttacactgagtgcaaacctcaccctgagccagctctgtacaacggtggcgtcctgcgctgggcgagcaaaataacggacttcagaacggaggacgaaggcaactactccccggcatttgtgctctacaacatgtcggcggcgactgcgtacagcttctcttaacttgcccataatgacgggtatcaccatcggggctaacaacatacggatgacgtagttgtcg

SEQ ID NO: 14213 - DNA, 2117 bp, Zea Mays
gcgcatatgcacacaaagggcaggaccgcaggagcacacacctcagtgcgccagcgttctgcacctcgctagctcgtcgtcttgcctgcgctgtcgtcgctgatccttgagatctgcagactccatggaggctgcagcagcgacgacggcggcggcgcttcttcctcccgctcggaaggtgttcatcctgcccctgcttctcctcctggctgcatcgtcgctggttccacgagcttcgtctgatggagcgcaatatgattatagagcttacactgagtgcaaacctcaccctgagccagctctgtacaacggtggcgtcctgcgctgggcgagcaaaataacggacttcagaacggaggacgaaggcaactactccccggcatttgtgctctacaacatgtcggcggcgactgcgtacagcttctcttgctgggtgaaaatcgacgggccagaaagcgcacacgtgaaggcgaagatactgaccgtggagaacgcagcgtcgcagtgcgtcggcaccgctatcgcgcgcaacgactgctggtcttttctcaagggtggctttactctcaactccacgtctcaaacctcggtgctctatttgcagccattctcacccgatcagtggaatcagcacagggaggagcgtatccaacagattcggaagcgtttcgtgaacctgcatgtctccgacggcaacggcagccgcgtggtcggggcggacgtggccgtgcaccagatcaccagagacttccccttcggctccgccatcagcaagagcatcctcgggaacgggccgtaccaggactggttcaacgcgcggttcaacgcggcggtgttcgagaacgagctcaagtggtacgcgacggagccgtcgccggggaaggaggagtacggggcggcggaccagctgctgcggttcgtgcagtccaacgacgtgacggcgcgcgggcacaacatcttctgggaggaccccaggtacacgccggcgtgggtgaagaacctgacgggcccggagctgcgcgccgcggtggcaggccgcgtccagagcctgctgtcgcggtacaagggcgacttcgtgcactgggacgtgagcaacgagatgctgcacttcgacttctacgaggaccggctgggcggcaacgccacggccgacttcttcagcacggccaggcgcgccgacccgctggccacgctcttcctcaacgacttcaacgtggtggaggcgtgcgacgacctcagctccagcgccgactcctacgtgtccaggctgcgccagctcgccgacgacgccggggtcaccttcgagggcatcgggctggagggccacttcgccaagcccaacgtcccctacgtgcgcgccgtgctcgacaagctgggcacgctccgcctgcccgtctggctcaccgaggtcgacgtcagcgccgccttcgaccacgccacgcaggccgcgtacctagaggacgtcctccgcgaaggcttcgcgcacccggccgtcgacggcatcgtgctgtggacggccatgggcgccaacgccacctgctaccagatgtgcctcacggacgccgacttcaccaacctcccggccggagacgtcgtcgacaggctgctgggggagtggcagaccaaggaggtgctgggcgccaccgatgaccgcggctccttcaacttcagcgccttctacggcgagtacagactctccgtcacctatctcaaccgcactgccgacgccaccttctcgctgcctcgcagcgacgacactaagcacatcaacatccgcctaccgcctggacctgcagcctgatctcatgcatgggatcggtccgtcgagtagaaatgtactactagaatttaagaactaaatatattgtggtgcctcagctgtgttaattggtacgtgtcactaaaaaataagtccgtggactgatacaactactactatacgcgcgcaactatctcctgcttgacctcttatgatgaaactagtgcaatgagtgtgttgtgatggtacacaaattattcgtgttagtgcacctagcgcgtagtatctttaaaaactctgttgtagtcaaccatgcttgtatatgaaagaacgcaagaaacgaaggatgatgtttaag

SEQ ID NO: 14214 - DNA, 449 bp, Zea Mays
cgcatatgcacacaaagggcaggaccgcaggagcacacacctcagtgcgccagcgttctgcacctcgctagctcgtcgtcttgcctgcgctgtcgtcgctgatccttgagatctgcagactccatggaggctgcagcagcgacgacggcggcggcgcttcttcctcccgctcggaaggtgttcatcctgcccctgcttctcctcctggctgcatcgtcgctggttccacgagcttcgtctgatggagcgcaatatgattatagagcttacactgagtgcaaacctcaccctgagccagctctgtacaacggtggcgtcctgcgctgggcgagcaaaataacggacttcagaacggaggacgaaggcaactactccccggcatttgtgctctacaacatgtcggcggcgactgcgtacagcttctcttcttcgttgcttcactgtttaca

SEQ ID NO: 14215 - DNA, 2153 bp, Zea Mays
cgcatatgcacacaaagggcaggaccgcaggagcacacacctcagtgcgccagcgttctgcacctcgctagctcgtcgtcttgcctgcgctgtcgtcgctgatccttgagatctgcagactccatggaggctgcagcagcgacgacggcggcggcgcttcttcctcccgctcggaaggtgttcatcctgcccctgcttctcctcctggctgcatcgtcgctggttccacgagcttcgtctgatggagcgcaatatgattatagagcttacactgagtgcaaacctcaccctgagccagctctgtacaacggtggcgtcctgcgctgggcgagcaaaataacggacttcagaacggaggacgaaggcaactactccccggcatttgtgctctacaacatgtcggcggcgactgcgctgggtgaaaatcgacgggccagaaagcgcacacgtgaaggcgaagatactgaccgtggagaacgcagcgtcgcagtgcgtcggcaccgctatcgcgcgcaacgactgctggtcttttctcaagggtggctttactctcaactccacgtctcaaacctcggtgctctatttgcagactgcgagcccaaatgcttctacgatctcaatcagaagcccctccttgcagccattctcacccgatcagtggaatcagcacagggaggagcgtatccaacagattcggaagcgtttcgtgaacctgcatgtctccgacggcaacggcagccgcgtggtcggggcggacgtggccgtgcaccagatcaccagagacttccccttcggctccgccatcagcaagagcatcctcgggaacgggccgtaccaggactggttcaacgcgcggttcaacgcggcggtgttcgagaacgagctcaagtggtacgcgacggagccgtcgccggggaaggaggagtacggggcggcggaccagctgctgcggttcgtgcagtccaacgacgtgacggcgcgcgggcacaacatcttctgggaggaccccaggtacacgccggcgtgggtgaagaacctgacgggcccggagctgcgcgccgcggtggcaggccgcgtccagagcctgctgtcgcggtacaagggcgacttcgtgcactgggacgtgagcaacgagatgctgcacttcgacttctacgaggaccggctgggcggcaacgccacggccgacttcttcagcacggccaggcgcgccgacccgctggccacgctcttcctcaacgacttcaacgtggtggaggcgtgcgacgacctcagctccagcgccgactcctacgtgtccaggctgcgccagctcgccgacgacgccggggtcaccttcgagggcatcgggctggagggccacttcgccaagcccaacgtcccctacgtgcgcgccgtgctcgacaagctgggcacgctccgcctgcccgtctggctcaccgaggtcgacgtcagcgccgccttcgaccacgccacgcaggccgcgtacctagaggacgtcctccgcgaaggcttcgcgcacccggccgtcgacggcatcgtgctgtggacggccatgggcgccaacgccacctgctaccagatgtgcctcacggacgccgacttcaccaacctcccggccggagacgtcgtcgacaggctgctgggggagtggcagaccaaggaggtgctgggcgccaccgatgaccgcggctccttcaacttcagcgccttctacggcgagtacagactctccgtcacctatctcaaccgcactgccgacgccaccttctcgctgcctcgcagcgacgacactaagcacatcaacatccgcctaccgcctggacctgcagcctgatctcatgcatgggatcggtccgtcgagtagaaatgtactactagaatttaagaactaaatatattgtggtgcctcagctgtgttaattggtacgtgtcactaaaaaataagtccgtggactgatacaactactactatacgcgcgcaactatctcctgcttgacctcttatgatgaaactagtgcaatgagtgtgttgtgatggtacacaaattattcgtgttagtgcacctagcgcgtagtatctttaaaaactctgttgtagtcaaccatgcttgtatatgaaagaacgcaagaaacgaaggatgatgtttaag

SEQ ID NO: 14216 - DNA, 1959 bp, Zea Mays
gtcacgggtaagaggaggtacagtagcaagcagcagccagccaagcggtggaaacaaacgcacgcaccacgccgcggtgaccgccaggaatcaaggcggcaggagagctggatccgccggcgcatgttccgtcggcccagcccagtggtgccgactttccggagggtaggaggggggcgtccgggccaccgggattcgcacgcggacatgggcgaaacggctgggtgaaaatcgacgggccagaaagcgcacacgtgaaggcgaagatactgaccgtggagaacgcagcgtcgcagtgcgtcggcaccgctatcgcgcgcaacgactgctggtcttttctcaagggtggctttactctcaactccacgtctcaaacctcggtgctctatttgcagactgcgagcccaaatgcttctacgatctcaatcagaagcccctccttgcagccattctcacccgatcagtggaatcagcacagggaggagcgtatccaacagattcggaagcgtttcgtgaacctgcatgtctccgacggcaacggcagccgcgtggtcggggcggacgtggccgtgcaccagatcaccagagacttccccttcggctccgccatcagcaagagcatcctcgggaacgggccgtaccaggactggttcaacgcgcggttcaacgcggcggtgttcgagaacgagctcaagtggtacgcgacggagccgtcgccggggaaggaggagtacggggcggcggaccagctgctgcggttcgtgcagtccaacgacgtgacggcgcgcgggcacaacatcttctgggaggaccccaggtacacgccggcgtgggtgaagaacctgacgggcccggagctgcgcgccgcggtggcaggccgcgtccagagcctgctgtcgcggtacaagggcgacttcgtgcactgggacgtgagcaacgagatgctgcacttcgacttctacgaggaccggctgggcggcaacgccacggccgacttcttcagcacggccaggcgcgccgacccgctggccacgctcttcctcaacgacttcaacgtggtggaggcgtgcgacgacctcagctccagcgccgactcctacgtgtccaggctgcgccagctcgccgacgacgccggggtcaccttcgagggcatcgggctggagggccacttcgccaagcccaacgtcccctacgtgcgcgccgtgctcgacaagctgggcacgctccgcctgcccgtctggctcaccgaggtcgacgtcagcgccgccttcgaccacgccacgcaggccgcgtacctagaggacgtcctccgcgaaggcttcgcgcacccggccgtcgacggcatcgtgctgtggacggccatgggcgccaacgccacctgctaccagatgtgcctcacggacgccgacttcaccaacctcccggccggagacgtcgtcgacaggctgctgggggagtggcagaccaaggaggtgctgggcgccaccgatgaccgcggctccttcaacttcagcgccttctacggcgagtacagactctccgtcacctatctcaaccgcactgccgacgccaccttctcgctgcctcgcagcgacgacactaagcacatcaacatccgcctaccgcctggacctgcagcctgatctcatgcatgggatcggtccgtcgagtagaaatgtactactagaatttaagaactaaatatattgtggtgcctcagctgtgttaattggtacgtgtcactaaaaaataagtccgtggactgatacaactactactatacgcgcgcaactatctcctgcttgacctcttatgatgaaactagtgcaatgagtgtgttgtgatggtacacaaattattcgtgttagtgcacctagcgcgtagtatctttaaaaactctgttgtagtcaaccatgcttgtatatgaaagaacgcaagaaacgaaggatgatgtttaag

SEQ ID NO: 14217 - DNA, 1776 bp, Zea Mays
gcgagagaccatctcgatcgatcccttccgtgttccgctgggtgaaaatcgacgggccagaaagcgcacacgtgaaggcgaagatactgaccgtggagaacgcagcgtcgcagtgcgtcggcaccgctatcgcgcgcaacgactgctggtcttttctcaagggtggctttactctcaactccacgtctcaaacctcggtgctctatttgcagactgcgagcccaaatgcttctacgatctcaatcagaagcccctccttgcagccattctcacccgatcagtggaatcagcacagggaggagcgtatccaacagattcggaagcgtttcgtgaacctgcatgtctccgacggcaacggcagccgcgtggtcggggcggacgtggccgtgcaccagatcaccagagacttccccttcggctccgccatcagcaagagcatcctcgggaacgggccgtaccaggactggttcaacgcgcggttcaacgcggcggtgttcgagaacgagctcaagtggtacgcgacggagccgtcgccggggaaggaggagtacggggcggcggaccagctgctgcggttcgtgcagtccaacgacgtgacggcgcgcgggcacaacatcttctgggaggaccccaggtacacgccggcgtgggtgaagaacctgacgggcccggagctgcgcgccgcggtggcaggccgcgtccagagcctgctgtcgcggtacaagggcgacttcgtgcactgggacgtgagcaacgagatgctgcacttcgacttctacgaggaccggctgggcggcaacgccacggccgacttcttcagcacggccaggcgcgccgacccgctggccacgctcttcctcaacgacttcaacgtggtggaggcgtgcgacgacctcagctccagcgccgactcctacgtgtccaggctgcgccagctcgccgacgacgccggggtcaccttcgagggcatcgggctggagggccacttcgccaagcccaacgtcccctacgtgcgcgccgtgctcgacaagctgggcacgctccgcctgcccgtctggctcaccgaggtcgacgtcagcgccgccttcgaccacgccacgcaggccgcgtacctagaggacgtcctccgcgaaggcttcgcgcacccggccgtcgacggcatcgtgctgtggacggccatgggcgccaacgccacctgctaccagatgtgcctcacggacgccgacttcaccaacctcccggccggagacgtcgtcgacaggctgctgggggagtggcagaccaaggaggtgctgggcgccaccgatgaccgcggctccttcaacttcagcgccttctacggcgagtacagactctccgtcacctatctcaaccgcactgccgacgccaccttctcgctgcctcgcagcgacgacactaagcacatcaacatccgcctaccgcctggacctgcagcctgatctcatgcatgggatcggtccgtcgagtagaaatgtactactagaatttaagaactaaatatattgtggtgcctcagctgtgttaattggtacgtgtcactaaaaaataagtccgtggactgatacaactactactatacgcgcgcaactatctcctgcttgacctcttatgatgaaactagtgcaatgagtgtgttgtgatggtacacaaattattcgtgttagtgcacctagcgcgtagtatctttaaaaactctgttgtagtcaaccatgcttgtatatgaaagaacgcaagaaacgaaggatgatgtttaag

SEQ ID NO: 14218 - DNA, 2548 bp, Zea Mays
aaacactatttaaataattttatgtttaaaaaataaactctaaatgacattttgtctataagctaacatttgggaatgatgtattagcgaagtacattcattcacatgatgacatttaggcgaaagccggtttccataatggcataaatccaaatttctcgtgaatatctcagcgccgagctcgagcccgcagtctgccatcccctttcggtggcaaccaaatccggcttgcctgcagcggatctccatctggtcggagtggatcgggtctccggtggtgtttctcgcctccgtggcggttagtggcgccggacggaccacgtccccgcagcagcggtcagcggcggctggcctagctgcggtggcttgaggcggctctcggacgggtgcctcgagctggcaccagcgggtgggtgccgcaactctcaccgctagctggtgtagaggcggcgagtcccggcgccatggagggtaggccgcaagtgtccgcttagagaggggtcaacaaagggacttgtcaagctacgacactgcggtcttcggttgccctgctcagcttgttgttgccgtacatgatccttcatgatttagctcaggaaaagcggtgggactgagggagaaaagaggagatgactagcctgtcgatcacagtgatgacgctgaacttgcatgaaggcgagcagccgagcgagagtcccaacagctgggagaagcgccgggacatctgcgtcagcgtcatcaccagctactctcctaccatcctttgcacccaacaaggcttaagatggcaactggactacctacaacagtgcttgccaggttatgaacagtttggaatctcaagaaaaggctcacaggacaacactgatgaatactgcacaatattctatgaaaaggaaaaggtggagcttactgaaggtggcactttttggttgtcggaatcaccatctgttccaggaagcatttcatggggagcaaatgcaccctgcattgcaacatgggcaacgtttcaactcaaaagattagaaccacctggattcagttttcagatcgtaaatacaaatcttgatgaagttagccctcgtgctcgacgaagaagtgctttgcttacatggcaacatatagcatcgctggcccccaatttgcctgttatctattgtggaggcttcaatacacagaaggaatctatgactgggcggtttttgcttggcagatccagagaacatggtgttgttggtgatatgagagatgcttggccaaatgctcgagtgcgaaaaaatgtgtcaataatacacacatatcatggatttaaaggggagaaaaaaggtgccctagaatttcttaaattaatatttagagctctttgcctctgctgggatcgacagacacaggacttgcatgttgactggatcctatttagaggacgcccactggttcctgcactttgtgaggtcataaatgacaatatagatggcgtttatccgtcgtcgcacttccctatctttgctgagtttttgcttccacgctcagttcgcctagccgagacaccttcatagccatcgtgtcattttttttatattttttcccaatctcattctgattacggctgattgttcctttcgacgacttcaccatgaaattggggtaccacccttcaccacaattgctggtcacttcattccgcaaaacaagacaatatacacgtgcatcctttttatatatgtttccagtcagtagtcactattatgtgttgcctcagccttgctatctttttaaagttcaccttttccatatggcgttgattttcatgtatatatactgtacctttacatgctatttatcacaactgtgagagttcaagtaaatctgatgtaatgaaatttccaagctgctcttttttcacattcttatatatttgtggtcctcaggtgtcaccaaatttttcctttttttgttggctcatatttagaaacagagtagacagttcagggaataaatcactgtaagcaactccccatcacacatgaagtggtcacacggaggactctttcgtggagtggagaagctctgtagtggacgtttggtgaagaagctctgtaatgggcacatcgtcagataacatgaagtatagagaatcctgcctgtttaagttgacacatcgtcactgacaataagggaagcaggtgaaactttcctagtaggtgctttggtggcgtgtctaagaccaactgggaggaggaaaagacttgactgttggtgaacatcttcacttagggcaccaactgggaggaggaaaggacttgactgttggtgaatatcttcacttagggcgtgtttgtttggttgaggagtggaggaaaataaagcgacttcattactattttttagatgtttggttttcaataaaagatgagtggagcggctcctagagtcatgagaatatatcataaatagctaggatgtttttgttccatgaaaacggctagacgtgagcgctttcttatctctccttctctttacactcatatggtttttcaaccaaataaag

SEQ ID NO: 14219 - DNA, 2481 bp, Zea Mays
cgaaagccggtttccataatggcataaatccaaatttctcgtgaatatctcagcgccgagctcgagcccgcagtctgccatcccctttcggtggcaaccaaatccggcttgcctgcagcggatctccatctggtcggagtggatcgggtctccggtggtgtttctcgcctccgtggcggttagtggcgccggacggaccacgtccccgcagcagcggtcagcggcggctggcctagctgcggtggcttgaggcggctctcggacgggtgcctcgagctggcaccagcgggtgggtgccgcaactctcaccgctagctggtgtagaggcggcgagtcccggcgccatggagggtaggccgcaagtgtccgcttagagaggggtcaacaaagggacttgtcaagctacgacactgcggtcttcggttgccctgctcagcttgttgttgccgtacatgatccttcatgatttgtgagagatctatattccccgaatcttcaccggctctgccagatcactggcgatcttcttgccagccgcctccgctaacctgcgcggcacagtagagctcaggaaaagcggtgggactgagggagaaaagaggagatgactagcctgtcgatcacagtgatgacgctgaacttgcatgaaggcgagcagccgagcgagagtcccaacagctgggagaagcgccgggacatctgcgtcagcgtcatcaccagctactctcctaccatcctttgcacccaacaaggttatgaacagtttggaatctcaagaaaaggctcacaggacaacactgatgaatactgcacaatattctatgaaaaggaaaaggtggagcttactgaaggtggcactttttggttgtcggaatcaccatctgttccaggaagcatttcatggggagcaaatgcaccctgcattgcaacatgggcaacgtttcaactcaaaagattagaaccacctggattcagttttcagatcgtaaatacaaatcttgatgaagttagccctcgtgctcgacgaagaagtgctttgcttacatggcaacatatagcatcgctggcccccaatttgcctgttatctattgtggaggcttcaatacacagaaggaatctatgactgggcggtttttgcttggcagatccagagaacatggtgttgttggtgatatgagagatgcttggccaaatgctcgagtgcgaaaaaatgtgtcaataatacacacatatcatggatttaaaggggagaaaaaaggtgccctagaatttcttaaattaatatttagagctctttgcctctgctgggatcgacagacacaggacttgcatgttgactggatcctatttagaggacgcccactggttcctgcactttgtgaggtcataaatgacaatatagatggcgtttatccgtcgtcgcacttccctatctttgctgagtttttgcttccacgctcagttcgcctagccgagacaccttcatagccatcgtgtcattttttttatattttttcccaatctcattctgattacggctgattgttcctttcgacgacttcaccatgaaattggggtaccacccttcaccacaattgctggtcacttcattccgcaaaacaagacaatatacacgtgcatcctttttatatatgtttccagtcagtagtcactattatgtgttgcctcagccttgctatctttttaaagttcaccttttccatatggcgttgattttcatgtatatatactgtacctttacatgctatttatcacaactgtgagagttcaagtaaatctgatgtaatgaaatttccaagctgctcttttttcacattcttatatatttgtggtcctcaggtgtcaccaaatttttcctttttttgttggctcatatttagaaacagagtagacagttcagggaataaatcactgtaagcaactccccatcacacatgaagtggtcacacggaggactctttcgtggagtggagaagctctgtagtggacgtttggtgaagaagctctgtaatgggcacatcgtcagataacatgaagtatagagaatcctgcctgtttaagttgacacatcgtcactgacaataagggaagcaggtgaaactttcctagtaggtgctttggtggcgtgtctaagaccaactgggaggaggaaaagacttgactgttggtgaacatcttcacttagggcaccaactgggaggaggaaaggacttgactgttggtgaatatcttcacttagggcgtgtttgtttggttgaggagtggaggaaaataaagcgacttcattactattttttagatgtttggttttcaataaaagatgagtggagcggctcctagagtcatgagaatatatcataaatagctaggatgtttttgttccatgaaaacggctagacgtgagcgctttcttatctctccttctctttacactcatatggtttttcaaccaaataaag

SEQ ID NO: 14220 - DNA, 2871 bp, Zea Mays
gtttccataatggcataaatccaaatttctcgtgaatatctcagcgccgagctcgagcccgcagtctgccatcccctttcggtggcaaccaaatccggcttgcctgcagcggatctccatctggtcggagtggatcgggtctccggtggtgtttctcgcctccgtggcggttagtggcgccggacggaccacgtccccgcagcagcggtcagcggcggctggcctagctgcggtggcttgaggcggctctcggacgggtgcctcgagctggcaccagcgggtgggtgccgcaactctcaccgctagctggtgtagaggcggcgagtcccggcgccatggagggtaggccgcaagtgtccgcttagagaggggtcaacaaagggacttgtcaagctacgacactgcggtcttcggttgccctgctcagcttgttgttgccgtacatgatccttcatgatttgtgagagatctatattccccgaatcttcaccggctctgccagatcactggcgatcttcttgccagccgcctccgctaacctgcgcggcacagtagagctcaggaaaagcggtgggactgagggagaaaagaggagatgactagcctgtcgatcacagtgatgacgctgaacttgcatgaaggcgagcagccgagcgagagtcccaacagctgggagaagcgccgggacatctgcgtcagcgtcatcaccagctactctcctaccatcctttgcacccaacaaggcttaagatggcaactggactacctacaacagtgcttgccaggttatgaacagtttggaatctcaagaaaaggctcacaggacaacactgatgaatactgcacaatattctatgaaaaggaaaaggtggagcttactgaaggtggcactttttggttgtcggaatcaccatctgttccaggaagcatttcatggggagcaaatgcaccctgcattgcaacatgggcaacgtttcaactcaaaagattagaaccacctggattcagttttcagatcgtaaatacaaatcttgatgaagttagccctcgtgctcgacgaagaagtgctttgcttacatggcaacatatagcatcgctggcccccaatttgcctgttatctattgtggaggcttcaatacacagaaggaatctatgactgggcggtttttgcttggcagatccagagaacatggtgttgttggtgatatgagagatgcttggccaaatgctcgagtgcgaaaaaatgtgtcaataatacacacatatcatggatttaaaggtgcccctgacacttcatttaggtcttattttccagtttccgttgtaaaaactgctagggaatttttgcgtttattatgccaaagtaaaacttggaattgaggaactgacaatgttatttgatcctttattcaattcatgtcgggataaatcaattttttagtcttttggcttttacttgaaaaaaagtgccataggtcacagttttgcattatttattttatgttccttgatgacttgtactaatatgctccctgggcgaatattgagatccatccactataactagctgtcttttttttagctataactagtctttattttagcaatcttataccaaataaatattctgttgcaggggagaaaaaaggtgccctagaatttcttaaattaatatttagagctctttgcctctgctgggatcgacagacacaggacttgcatgttgactggatcctatttagaggacgcccactggttcctgcactttgtgaggtcataaatgacaatatagatggcgtttatccgtcgtcgcacttccctatctttgctgagtttttgcttccacgctcagttcgcctagccgagacaccttcatagccatcgtgtcattttttttatattttttcccaatctcattctgattacggctgattgttcctttcgacgacttcaccatgaaattggggtaccacccttcaccacaattgctggtcacttcattccgcaaaacaagacaatatacacgtgcatcctttttatatatgtttccagtcagtagtcactattatgtgttgcctcagccttgctatctttttaaagttcaccttttccatatggcgttgattttcatgtatatatactgtacctttacatgctatttatcacaactgtgagagttcaagtaaatctgatgtaatgaaatttccaagctgctcttttttcacattcttatatatttgtggtcctcaggtgtcaccaaatttttcctttttttgttggctcatatttagaaacagagtagacagttcagggaataaatcactgtaagcaactccccatcacacatgaagtggtcacacggaggactctttcgtggagtggagaagctctgtagtggacgtttggtgaagaagctctgtaatgggcacatcgtcagataacatgaagtatagagaatcctgcctgtttaagttgacacatcgtcactgacaataagggaagcaggtgaaactttcctagtaggtgctttggtggcgtgtctaagaccaactgggaggaggaaaagacttgactgttggtgaacatcttcacttagggcaccaactgggaggaggaaaggacttgactgttggtgaatatcttcacttagggcgtgtttgtttggttgaggagtggaggaaaataaagcgacttcattactattttttagatgtttggttttcaataaaagatgagtggagcggctcctagagtcatgagaatatatcataaatagctaggatgtttttgttccatgaaaacggctagacgtgagcgctttcttatctctccttctctttacactcatatggtttttcaaccaaataaag

SEQ ID NO: 14221 - DNA, 2494 bp, Zea Mays
atccaaatttctcgtgaatatctcagcgccgagctcgagcccgcagtctgccatcccctttcggtggcaaccaaatccggcttgcctgcagcggatctccatctggtcggagtggatcgggtctccggtggtgtttctcgcctccgtggcggttagtggcgccggacggaccacgtccccgcagcagcggtcagcggcggctggcctagctgcggtggcttgaggcggctctcggacgggtgcctcgagctggcaccagcgggtgggtgccgcaactctcaccgctagctggtgtagaggcggcgagtcccggcgccatggagggtaggccgcaagtgtccgcttagagaggggtcaacaaagggacttgtcaagctacgacactgcggtcttcggttgccctgctcagcttgttgttgccgtacatgatccttcatgatttgtgagagatctatattccccgaatcttcaccggctctgccagatcactggcgatcttcttgccagccgcctccgctaacctgcgcggcacagtagagctcaggaaaagcggtgggactgagggagaaaagaggagatgactagcctgtcgatcacagtgatgacgctgaacttgcatgaaggcgagcagccgagcgagagtcccaacagctgggagaagcgccgggacatctgcgtcagcgtcatcaccagctactctcctaccatcctttgcacccaacaaggcttaagatggcaactggactacctacaacagtgcttgccaggttatgaacagtttggaatctcaagaaaaggctcacaggacaacactgatgaatactgcacaatattctatgaaaaggaaaaggtggagcttactgaaggtggcactttttggttgtcggaatcaccatctgttccaggaagcatttcatggggagcaaatgcaccctgcattgcaacatgggcagtttcaactcaaaagattagaaccacctggattcagttttcagatcgtaaatacaaatcttgatgaagttagccctcgtgctcgacgaagaagtgctttgcttacatggcaacatatagcatcgctggcccccaatttgcctgttatctattgtggaggcttcaatacacagaaggaatctatgactgggcggtttttgcttggcagatccagagaacatggtgttgttggtgatatgagagatgcttggccaaatgctcgagtgcgaaaaaatgtgtcaataatacacacatatcatggatttaaaggggagaaaaaaggtgccctagaatttcttaaattaatatttagagctctttgcctctgctgggatcgacagacacaggacttgcatgttgactggatcctatttagaggacgcccactggttcctgcactttgtgaggtcataaatgacaatatagatggcgtttatccgtcgtcgcacttccctatctttgctgagtttttgcttccacgctcagttcgcctagccgagacaccttcatagccatcgtgtcattttttttatattttttcccaatctcattctgattacggctgattgttcctttcgacgacttcaccatgaaattggggtaccacccttcaccacaattgctggtcacttcattccgcaaaacaagacaatatacacgtgcatcctttttatatatgtttccagtcagtagtcactattatgtgttgcctcagccttgctatctttttaaagttcaccttttccatatggcgttgattttcatgtatatatactgtacctttacatgctatttatcacaactgtgagagttcaagtaaatctgatgtaatgaaatttccaagctgctcttttttcacattcttatatatttgtggtcctcaggtgtcaccaaatttttcctttttttgttggctcatatttagaaacagagtagacagttcagggaataaatcactgtaagcaactccccatcacacatgaagtggtcacacggaggactctttcgtggagtggagaagctctgtagtggacgtttggtgaagaagctctgtaatgggcacatcgtcagataacatgaagtatagagaatcctgcctgtttaagttgacacatcgtcactgacaataagggaagcaggtgaaactttcctagtaggtgctttggtggcgtgtctaagaccaactgggaggaggaaaagacttgactgttggtgaacatcttcacttagggcaccaactgggaggaggaaaggacttgactgttggtgaatatcttcacttagggcgtgtttgtttggttgaggagtggaggaaaataaagcgacttcattactattttttagatgtttggttttcaataaaagatgagtggagcggctcctagagtcatgagaatatatcataaatagctaggatgtttttgttccatgaaaacggctagacgtgagcgctttcttatctctccttctctttacactcatatggtttttcaaccaaataaag

SEQ ID NO: 14222 - DNA, 1565 bp, Zea Mays
acgtctagtaaatctgaagcaaagaacaagcggcgaggtgcaccgtgcacctccagctctgacctgctcggtcgcccgtgtcttcgtcttccttaatctcgaattccgaatcctcctccaacacctcgttttcctggattatccagcgagggacgccggtttgttgctcgtcctcctccctggttgcccgaggcggcggtggcggggcgaccatgtacagatcggcgggggtcgcgatggcgtggaacgtgttccggttctgcacggctctgcgtgggctaggttccatcatgatcctgctcgtcctcgcgatcgtcggcgtcacctactacgctgtcgtcctctgcaactacggcccccgccctgttcacccggcggcggcaccactctcgccgcgctcgccgtcctgctctccttccacttcctgcttgctatgcttttatggagttatttttctgtcgtgttcacggaccctggttctgttccaccaaattggaatcttgattttgatgtggagatgggagaaactgctcctcttgctagctcagagctctgtagccagatgaactcacagcaatctgtggctcttggcaatatgacaaatccaagggttaggtactgtaggaagtgcaaccagttgaagccacctcggtgccaccattgctctgtttgtggaagatgtgttcttaagatggatcatcattgtgtgtgggttgttaattgtgttggggcgctgaactacaaatactttcttctcttcctgttttacaccttcctcgagacaactcttgtcactctctctctattgcctcacttcattgccttcttcagtgatgccgagatcccaggaagtcctgcagcacttgcaaccacatttctcacctttgtgttgaatctggccttttctttgagcgttcttggttttatgattatgcatatttcacttgtttctgctaatacaacaacaattgaggcatatgagaagaagacaactccacattggatatatgatcttggccggaagaggaattttgctcagaagaggatttgagaagaactccagctctacagggtctggattatcctgtgagaccagattttgatggtcaggaactgtaacacagcaatttttgccagtgtcctcgtcagatacctcagtgttggacatctactgatacaactgacagcattgctgattgcgctatgcaaggcatcaaatgaaatgttcacaagattttagtaaccatgagtaattcatctgttgcacgtcatgtatgtgacgaagtgaaatttctcctagctgggccagaggaagtttgttgggatgtaaattagttttatcgacaacgtggattggtttcattccatccaaactggtagtgtgcttcaaatagtgctgtactttagtttagttattattatgtgatataaatatcatttctgataattgtgcctctgttatacactatcaatagtaaatggataagcgctgtgtaattctttcgaaattgtacaatgtgttctttccattgccctataaaagtattgaagtactagtttgcaat

SEQ ID NO: 14223 - DNA, 2333 bp, Zea Mays
  misc_feature (2332)..(2333): n is a, c, g, or t
agttagttagaagttgaaataagctgaacatggccataatcagccaccgactgtccgaccgcccacacggccacacgccacacccctggctgaaacacaatccaaatacgccgaacacgcaaaaaccctagacatccggcgcccaagctcagcagtgtctctccaccgccgccgccacctcgtgctccccttgccctcgcatcgcgggatggagcacgacgcgcacgccgaggcgtcgtcgcacgcagtcccgccaccggaggacgccaccgtcgatgattgggctcgcgacgacgcggagcccatgtccgtcgaatcaagcgccacccccccggaggtagctgcagtggattccggcgctgataccccgcccgcgccctcggcctcggccgcggttgcgggagaaggtgcccttctcggccctacctacctatgtttcgctcgtgctgttatacggcttatttgcttagatctaagcctcttaggcgccgatctgtagtgctatggccctcgattatgcgtagatttgggtttatgagggtcagggtctcgtttataggggttgctggcttgctgccgcggaaaacaaattaggacgatggagattatgttgtggcagggatatgtcttcaaagcgaaattcaactactagatttacccggtccacgcaagctactgtagctagacccgagccaggattcttgggtgtatgttgttttggcatgatatgcttgtagttctgtgttcctctatgagtaagttgacgatcatccataggtggtttgtacattagcagtttgtgcttctatttttttgtctgtttgtaattgtgattctatagactgtccttgaaaaggttttctttggctcatcttttgttgttgctgtttgcttgaccacacaacaatcaatccatgcatttgcaatttccaaataagtgtgcttgatcagacacatttatagcgatgcatgtgcaatttttaaaaaaagtctgatgaagtgcggtgttacttaggaaggctatgtagcaattaagcgtttaggagaagggtgttgcctagctcctaagcacgctaggtgaccaacttttaggacactggccattttcatgaatggaaaatcccttgagtgagatttttcattagagcaagtaagggaacttctgacaaccatggttcaaaattcttatgtctgatgaaatagatgctcctttacccatttgtgtgcaccttgtggttcatgtagactgccacacactcctccaagacacttctacctctcttcctcgtgcatcacacctagaacccagcaaatgaaaccgcagctccacagatatgcttcatgtctgaatgctcatgtgctaatcctcttatgcaacatgcctgccataggcaaacatgtaaaaaccattcctcctagtccaactcgatcttagataagaccaagtcaccaaaagccaccaggccacttcctagcacctagatggactaaacatagattaaacatattaggggctgtttggaaggaaagtattttaaaaccatggtttttgaatactatagttttgaaatgccattggcataaccatagtattttttacatcactcggagacaaagttattggaaaccctaaccctaacaggggaaaagaaaaaaaactggctctataccatattggaaaccctaaccctaacaggggttgggtaatctattaatagactggagtaactgggccaggcccattacagagggggagacagtaattacacggggaaaaccccaaaccctaatcgggtattctaacaaaaatatctcaaaccatgttatttattatacatgtgcaagaagctagtcatagacaaaaatttgggattggagtttcaaacactccaaaaataccatggtaactgccaagctatggtatccaaaacatattttttttacaaggtagtcaaacacctcttggcaaaaaataccatggtattctccaataccatggttttatctcaaaactccaaaaatactttgcttccaaacacccccttaagcgtttgtgcttttttattagttattattttctggaaacacatatggcttagattaaatgctcaacttcaatctcagaagaaattgtaacacattcagacaattgtgattccaattcttgctaacttgcaaagaagcatcaagggacttgcaattttgatcctcaaatgtcctgtctcccttttcactggctcttctgcatacctttttcatgccagccggcgcggtcacacatagccaccaaaccagccaggccatcacttttttgtgtttatgtgctgtttann

SEQ ID NO: 14224 - DNA, 1442 bp, Zea Mays
agaaaatgttcactccccttcctcggcattggcgtcacattcgcagccgtctcactcctctcgcacagcatccgcttctcctgccaaaccctagcacctccgtcctccgaccccctcagctccggcgatggcctccaccccgcaccctccgccgctcatcggcaagtcgggaaacctcacggtgttcttcacgccatcggcggagcacgagagcccggggtccgagttctctacgcccccgacgagccctcgcgccgaggactcccctgaatcaccaccggcgcagacagcccctccgcccgcgcctgtttactcagtatccacgccgcagcttgtcaagatggtctccccgccgcttcccgccgagaagctctcccgaccctcgctggtccaggtgccgccattgcagttcgggaaggcttcggcaggatcagatggatcgctgcttgcgttcttctgggacgcggttgcacgcatgcaagaagcacacgcgagcttggacgagcacatctcgagatggttcgggctggaccagtccaagtaccagtgggcgctcaacgactattatgagaggaccgggcaggttggagatctgatctaatgaacagggctgggacctgggaggttggtaatggttcaatttgtgatgacatctatggcgatttatctggctattgcctcagacctccccccttgggctctcaaggaattttacaagacatgatctaaaatcccttggctgttttttgagaatgattttggcgattttcacagaagcggactgagaagaagcgtttggcacccagaagttgatctaacggcaagagtctagccacaagccgaaacaaacaggcctattgatgtctaggatcttgtttcgagtgtgcagttgcaacctgacttagcactgcctctgaatagtactaatccaagtctgcctatagttctttggctcagtgcaatttgaaccttggaaactcatttggaatacttggacgccgaagaagtgtcaatttttcctctggcttgcttttccataatagatgctggttccttgtcttccgtcgctatgggctaccggagttttgggtgtgttgtactcttctgagttcttaagaccgtgttcagcagaacactgttttacactgtagactatactgttcgcagagtggagtttgaaataggagataggatgggagatagaatggttaagctgctggagatagtctaatgcaatgatacacagctgttctacatattcaagaaaaaactagtaaatggactcatgatacctcagtattcactcccttgattcgccaaaccaaacattccattagagttgcagttgatgccattgttgttgtacaaggattcggcaatgctaaaatgattcaaatttgttttttgtgtgtggcattgtcaattcctgggctgaagtggag

SEQ ID NO: 14225 - DNA, 949 bp, Zea Mays
agaaaatgttcactccccttcctcggcattggcgtcacattcgcagccgtctcactcctctcgcacagcatccgcttctcctgccaaaccctagcacctccgtcctccgaccccctcagctccggcgatggcctccaccccgcaccctccgccgctcatcggcaagtcgggaaacctcacggtgttcttcacgccatcggcggagcacgagagcccggggtccgagttctctacgcccccgacgagccctcgcgccgaggactcccctgaatcaccaccggcgcagacagcccctccgcccgcgcctgtttactcagtatccacgccgcagcttgtcaagatggtctccccgccgcttcccgccgagaagctctcccgaccctcgctggtccaggtgccgccattgcagttcgggaaggcttcggcaggatcagatggatcgctgcttgcgttcttctgggacgcggttgcacgcatgcaagaagcacacgcgagcttggacgagcacatctcgagatggttcgggctggaccagtccaagtaccagtgggcgctcaacgactattatgagaggaccgggcagatttgagcaacgttggcactcgttagcagcacagttgtaaaaattcagaaagcttgaaaaaggtatgctctcgtattcgagcagacagacaccttcacttgccagtttctctgatgttattttttattttgaatgattttacttgcagtggattatttctagtttttatgtgtgtaactaagctggtgccgtgtcaagctgcatatagaatccttttggttgcgtgaagactgagttctctttttctgcacccggaagctcttggttgtaacaaatccatatttagcacctttattgtagcttcgttgtggataaagaaaaaccttgctgaccttttttttattgtaccttcattttcattttcgc

SEQ ID NO: 14226 - DNA, 870 bp, Zea Mays
agaaaatgttcactccccttcctcggcattggcgtcacattcgcagccgtctcactcctctcgcacagcatccgcttctcctgccaaaccctagcacctccgtcctccgaccccctcagctccggcgatggcctccaccccgcaccctccgccgctcatcggcaagtcgggaaacctcacggtgttcttcacgccatcggcggagcacgagagcccggggtccgagttctctacgcccccgacgagccctcgcgccgaggactcccctgaatcaccaccggcgcagacagcccctccgcccgcgcctgtttactcagtatccacgccgcagcttgtcaagatggtctccccgccgcttcccgccgagaagctctcccgaccctcgctggtccaggtgccgccattgcagttcgggaaggcttcggcaggatcagatggatcgctgcttgcgttcttctgggacgcggttgcacgcatgcaagaagcacacgcgagcttggacgagcacatctcgagatggttcgggctggaccagtccaagtaccagtgggcgctcaacgactattatgagaggaccgggcaggagatagatttgagcaacgttggcactcgttagcagcacagttgtaaaaattcagaaagcttgaaaaagtggattatttctagtttttatgtgtgtaactaagctggtgccgtgtcaagctgcatatagaatccttttggttgcgtgaagactgagttctctttttctgcacccggaagctcttggttgtaacaaatccatatttagcacctttattgtagcttcgttgtggataaagaaaaaccttgctgaccttttttttattgtaccttcattttcattttcgc

SEQ ID NO: 14227 - DNA, 1256 bp, Zea Mays
tgcggctcctgtgcctggcgcgctctctagctcccatgacactgtcgcccttcatcaacgtgcccagggctgatcagtgatgatctcatgtagctgctccgtccaagccgccaatttccctcgacggttttgtcatgtccagacgtcgctgcttcctctcggtctgccatggatgcctctctgtcgctgtttgcctctgcaccgctgtagcaagttgcacagtcgttcgcctccttgtgtccctcaccgtcgacacttccatgtctccaacctcatgcgctcacttcatcgacgtcgtgcactgctactctgcgccaccgttcgagatcatgtcgcgcccagtggctcgtcgttgatcagttcgcctgaacgcatcctcctgttagcaacctagttgggagagtagacttggggaagaagaagaggagagttcgtagatgagttagtgcaattttgcttacaagctaactgcctctcaactctctccagactccttacttattacaagcctttggactgactcatgtgtaccactctgggccggcgtaacgtttgttgggcctcctgttgcgacggcccgtttccccagtgcgcactcctgctgcctctggtgtactggtgctgacaatccctccccttgagaggccgcttgcccccaagcggtcgcagcagggaacttggccttgagcgcctcatcttcccaggtggctaggacgtcctccagtccagaccagcgcaccagaatttggtcgatggatgaacctccacgcgacaccgtgcggcggtctaacacctgttcaggaaactgaagttgcaaagtggtagaaggaagtgtggcgctcactggcagagtggacttcaccgattgtttcagttgcgaaacatggaacacgggatggatagatgatgattctggaagattgagcttgtatgcaactgtaccaatgcgctgggtaatctcaaaaggcccgaagtacttgaaactgagcttgtgattggcacgggtagcaaccgatgtttgaacatagggttgaagctttacatacactgagtccccaactgcaaattaccgctcactgcgacctttgtcagcttgatgcttcatgcgttgtttggcgcgaagaaggtgctgctttatggatttaagcatcagctccctattttccaaccaggtggccaaatctaggtgtgaaactgcatcagacggagttagaccaaagtgacgcggtgggcgaccatacaaggcttcgaatggg

SEQ ID NO: 14228 - DNA, 1836 bp, Zea Mays
ccagtcccgccccgacagatcgtgttcgtcctctagatcgctgagacgagtagacgaccgtcgtctcctccccgccccgctcgcgcaaagcccgagccctcccacccgatatcgcaacagaggtccgccccgcccctctgtttaatcccgcgtgacatgcatcagatgcagatgcaacaccgccacgacgtcgaacggcgatagtgagatgtcccacgccacctcctcctctgcgctccccgttccccaggtcgcgcgcacctgctcccgcaccggagaacccaccgcacgttggcctcgtcccgagatgtcggcgacgctgtgcttcatgggggttgcgagggagtctctgtctctggacgcgcccgtcgccgcccccaagctcgggagggagcggcgctcggccctcgcgagcgcgaactcggggccacaatgctggaggtggaggaggggcctggcgatgcgctgccagacggggtccaccgcagcgcccttcctcaggacggaggaggcccccgcggccgcgtcgggggcaaggaatgcccaggcggggttcaccatcgtcatgaagttcgatggctcgtcgctcgcttcagtcgagcggatgcgggaggtggccggcctcatccttagtgcaggggaaaggacacgccttcctctcgaccgcacggaagggaagattcataccacagccgacagagtcaggcgcaagatggctatcacagaaccgatatagagattgatgtgtttgccgtgcgctccggcagcagcgattccgacaggccccacggcggtcgcaacccagccagcggcgagaaccctgggacaaggacaattactagcgtcggcgctacagcaagcggatcaggccaagaggacctgcttgtggccaccaatattacagaggcgtgtaagagtgaatccagtctcgctgctccgccatcgaagccgtctgtatctttttgttttgttttggtcggagtttatttgctctagagagaccagtcacctggtatggaacatctactaatttcagagaattttgcatgttcgtctcggtgtgtcgttacacaatttgcggatgttgcaacgacactgaatcctgcgtagaggtgacgggcggcgaagaagctagccaagctgtgaaaacggacacggacatatggggtttgtgctagaggatgctaaaggtctatcacttaatggggacctcaatgtgcatccagtgattgcaaggtcttttcccctacacacccaatctttttgtttatgaactatactcatcaagtcttggtggtgctcctaatgcaaatggggattcaatgacaacacgagtagctgttgatcaccatatgcatcaagattttcaaccaacaagtaaaagttcagacatgtctttcagtcacattattgctctggatgtcaaggagcaccctgtcgtcatctatatgaagggttatcctgatgctcctaggtgtgggttcattgcattaggagtgaaggtcgtccatcaatatggtaatttgtctataagtgcggcttatttcaaatgcaagttacggtggtatcgtcttcaagcacacctcttcaagcagcagttgccgatgttcaaaaggtatcgtagtttaacacacaagttactgtggtttgtcaaaaaaaagaacaatagcacatcttgctgttatcataccactttaatttgttgaaaggaaaaggttccaaatagaaggcgaatgttgagttgtaactcatttgtattttttcggtgcttggtggggaagtaaaatactctgtaaggaaaatggaccccgggccttttggttaattgagttttgg

SEQ ID NO: 14229 - DNA, 4452 bp, Zea Mays
aaacactccacgattttctagacacgatccaacaaaaaaaacccaaaacttacaagcaacaaacacttcattataaaaaaaaaaacaacaaacacttctcgggttcctttcttcgtgcgcactccactttcgccggcgtcgccatggacgccaacgtcgtgcagcgctgcctcgaggccggcggccgcgacttcctcttccaccatacctcttcccctccctctccgacctccgcctctgccgctgcatcctcctccatcctccaatctctccccctccacgtgtccttcgaccgcgggtattacctcctcgtcaaggcgatccaggagctgcgtgcgcgcaaggacggccacgtcgttaccgtcggcatcggcggacccactggctcgggcaagaccagcttggctgagaaggtggcgtcggtgctagggtgcgtcgtgatcgtctccatggaggactaccgcacggcacctggtgtcgacgacggcatcagcgacgtcaatgccgtcgatttcgacgcacttgctcgcaacctccaggatcttgtgaagggtaaagatacaatggtgccactagttgattttcaagagaagaaacgcaccggatggagggaactgagaatttcttcatctggagtggtgattgtcgatggtgcgtatgctctgcattcaacactacgatcattgcttgatatccgagttgctgtggttggcggcgttcattttagcctgctttctaaagttcagcatgatattggagattcttgctcattggactatctaatcgacagtatatttccattgtttagaaagcatattgagccagacctgcatcatgcccaaattaggattgataacagctttgtctgctcatttcgagaaccgtactacaagctgaagtgcaaaaatgagtcatcagatggcaagaagttatattcttttgaacaaaataaagtggaaactgagaactttattgagatgtaccttaggccgccttttgcttctgaagaaatgaagattgatgattggattaaggttaggcaatgtggaataagatactatctatctctcggagaccaaaggattgttgacaagtacttcataatccgtccaaaagctgagtttgaggttggacgaacaactcttggaggattgttggccttggggtacaatgttgttgttagctttaagcgtacatgcacatctgtcaatatagatcaattactgatagctgcagagaccattgacactctaaatgagacctttttggtattaaaaggtccaagcagaaagattgttgcagcagaggcttcaaagcttggtataaagggaccatggatcacaaaatcatacttagaaatgatcttggagagcaaaggggttccacgacttaatacaccaccaccggtatcaagcaaactgctaactgaaagtcaagaaaagaaaattgctgcacctaaacctattcgtgtttctgctgaaaacattacaaatcttgatgacttgatgcaaccgtggacgagatccccgcccaagaagttggaacaagaacacgtattggcaaaatggcagtttatctcagattcttcttcaagaagtaacatccagctggctcctctgccagattcttatgacctggataggggccttctcctatcagttcaagcaattcaggcattgttggagaacagaggataccctatcattgttgggattggtggtcctagtggatcgggaaagacaagtttagctcagaagatggcaaatataattggctgtgaagttgtaagcttggaaagttattacaagcctgaacaagtgagagattataagtatgatgattatagctcattggatattgctttgctcactgagaacattatggacataaaaaagaggcataaagcggaagttccttgcttcgactttgaaaattttagccgaaaggggttcaaggagcttcaagtatccgaggaaagtggagtggtcatctttgaaggtgtgtacactttacatcctgctataaggaaatttctggatttgtggattgcagttgttggtggagttcattcacaccttattgcaagaatacagagagacaagaatcgtgctggcttttctatttctcagactgaaatcatgaccactgtgtttccactgtttcagcaatacattgaaccacatcttgtccatgctcatcttaagattcaaaacgattttgatcctgtgctctctcctgaaagctcactttttgtgttaaaaagtaaaaaacaggtatcctgccaagatatactgaaggtactagatgctagtaaagtctgcagttctgtccagaactttactgatgtgtacttacggcttcctggcataccatcaaatgcccagctgaccgaaggtgagtgtatccgggtcagaatttgtgaaggaagatttgcattgttgatacgagagcctataagggaaggaaattttattatccagccaaaggttgattttgatattagtgccagtactgttgcagggcttcttaagcttggttaccaagctgttgcatatattgaagcttctgcggtgatttaccaagatggaaaggttattatgttccttaaccagtgtagctcttttttttatttagagaaaaggatgcatacttgcctaccactaaatggacaaagtcttttttatttttgtaaaagtctccctactcctgtgctattatgccattattgcttgcttgtacaaagatttatcctttagtattattgctgagtatgcatgattaaggcttaaataacttaggaattgtgaattttgctggcacatttccaggtttggtttattatttgaatgcctttaatcctttattaagaggaaggttttaatgttttatcaaagcatcattacgtttttatcctgtagatttagaaattttaagttctggagacattgattattttgaaaatgaaaactacaatctcttgccaggcataaaaattggttgttagtaattttattagtggtttttggatggacgtgtaatatttatctagctgtacagaataaatactatagtgatgaaaatgaactgaatgcatgcatactgatgaacaatcttgtaacggggcacagtcctactgcctattactcactatcagtatggctgtacatacgaatttaacacatttgtctctcattttgtggtcgaaaactgctccattagtaactttgcatacctaaagcaagatgttctcatctgttattttatatagcattattttgtaatgttatgatggaatcagtagtgtagctgttaattacaagtatgttctgatgccttttgaaatccattgaagattttaatagaagttgaccatctacaaggagtgtcgactccatatcttcaaattaaagggacaaataaagaaattgttacctctgctggttctgcactctgcttggatggttcatacacaacaaagagttatcttcaaattattttggagagcttaccagctgatggtaatgtatctattggtattcacaatcaacaagctgcaaggctgcaggaactggttgagttcatccagtcacagggagggagctttaattcagatttatcgtcaccaatacgagaaacttcctctacagatagtgtgattgatgatatgcagtccaggataaggaagcttgagagatggaatacgataaacatggttttgtggactatattattgtctgctcttgttggatattccctataccagaaaaaacgtcactagttttactgatagggtaggacgcatacctcattcatggcgtctgcagaactgacttgcacgcttcaggcacaaagttgtaagtgctagagaaaatgaaaagcagcatgtagatacaagatctaagacgtgagagatggcctgcgctcatgccatccctgatggcagtcttatttgtttgatcactcaatgtctgtaataatcttctcgtatgagatccatcaaaaaaatttgtgcagttaatgtgtatgaagcactaacgttgataatcttctcatatggtccatgggcgtttatgtattgtcatcaccacttaagtattctcatctccattaggccttgttagacactcgtatttgtctcgatccatgtgtattgaggtggattggaatgtaacttaaattaaattacatctcaatccatgacaatacacgtggattgaggtgtccaagtattcttcacgtggattgtttaatttatactctaattcactttagccacgtggattgagatgaatactaagtatccaaacaaagcactaaatatccaaacaaagccttaatagagtgataatcttctcgtctttataaggtcaagagataatcatgatccataagaacattaataggcatttagggttaaaggctattcgagagtttatacatatgagggggttg

SEQ ID NO: 14230 - DNA, 3598 bp, Zea Mays
ctcgggttcctttcttcgtgcgcactccactttcgccggcgtcgccatggacgccaacgtcgtgcagcgctgcctcgaggccggcggccgcgacttcctcttccaccatacctcttcccctccctctccgacctccgcctctgccgctgcatcctcctccatcctccaatctctccccctccacgtgtccttcgaccgcgggtattacctcctcgtcaaggcgatccaggagctgcgtgcgcgcaaggacggccacgtcgttaccgtcggcatcggcggacccactggctcgggcaagaccagcttggctgagaaggtggcgtcggtgctagggtgcgtcgtgatcgtctccatggaggactaccgcacggcacctggtgtcgacgacggcatcagcgacgtcaatgccgtcgatttcgacgcacttgctcgcaacctccaggatcttgtgaagggtaaagatacaatggtgccactagttgattttcaagagaagaaacgcaccggatggagggaactgagaatttcttcatctggagtggtgattgtcgatggtgcgtatgctctgcattcaacactacgatcattgcttgatatccgagttgctgtggttggcggcgttcattttagcctgctttctaaagttcagcatgatattggagattcttgctcattggactatctaatcgacagtatatttccattgtttagaaagcatattgagccagacctgcatcatgcccaaattaggattgataacagctttgtctgctcatttcgagaaccgtactacaagctgaagtgcaaaaatgagtcatcagatggcaagaagttatattcttttgaacaaaataaagtggaaactgagaactttattgagatgtaccttaggccgccttttgcttctgaagaaatgaagattgatgattggattaaggttaggcaatgtggaataagatactatctatctctcggagaccaaaggattgttgacaagtacttcataatccgtccaaaagctgagtttgaggttggacgaacaactcttggaggattgttggccttggggtacaatgttgttgttagctttaagcgtacatgcacatctgtcaatatagatcaattactgatagctgcagagaccattgacactctaaatgagacctttttggtattaaaaggtccaagcagaaagattgttgcagcagaggcttcaaagcttggtataaagggaccatggatcacaaaatcatacttagaaatgatcttggagagcaaaggggttccacgacttaatacaccaccaccggtatcaagcaaactgctaactgaaagtcaagaaaagaaaattgctgcacctaaacctattcgtgtttctgctgaaaacattacaaatcttgatgacttgatgcaaccgtggacgagatccccgcccaagaagttggaacaagaacacgtattggcaaaatggcagtttatctcagattcttcttcaagaagtaacatccagctggctcctctgccagattcttatgacctggataggggccttctcctatcagttcaagcaattcaggcattgttggagaacagaggataccctatcattgttgggattggtggtcctagtggatcgggaaagacaagtttagctcagaagatggcaaatataattggctgtgaagttgtaagcttggaaagttattacaagcctgaacaagtgagagattataagtatgatgattatagctcattggatattgctttgctcactgagaacattatggacataaaaaagaggcataaagcggaagttccttgcttcgactttgaaaattttagccgaaaggggttcaaggagcttcaagtatccgaggaaagtggagtggtcatctttgaaggtgtgtacactttacatcctgctataaggaaatttctggatttgtggattgcagttgttggtggagttcattcacaccttattgcaagaatacagagagacaagaatcgtgctggcttttctatttctcagactgaaatcatgaccactgtgtttccactgtttcagcaatacattgaaccacatcttgtccatgctcatgttgcttaagattcaaaacgattttgatcctgtgctctctcctgaaagctcactttttgtgttaaaaagtaaaaaacaggtatcctgccaagatatactgaaggtactagatgctagtaaagtctgcagttctgtccagaactttactgatgtgtacttacggcttcctggcataccatcaaatgcccagctgaccgaaggtgagtgtatccgggtcagaatttgtgaaggaagatttgcattgttgatacgagagcctataagggaaggaaattttattatccagccaaaggttgattttgatattagtgccagtactgttgcagggcttcttaagcttggttaccaagctgttgcatatattgaagcttctgcggtgatttaccaagatggaaagattttaatagaagttgaccatctacaaggagtgtcgactccatatcttcaaattaaagggacaaataaagaaattgttacctctgctggttctgcactctgcttggatggttcatacacaacaaagagttatcttcaaattattttggagagcttaccagctgatggtaatgtatctattggtattcacaatcaacaagctgcaaggctgcaggaactggttgagttcatccagtcacagggagggagctttaattcagatttatcgtcaccaatacgagaaacttcctctacagatagtgtgattgatgatatgcagtccaggataaggaagcttgagagatggaatacgataaacatggttttgtggactatattattgtctgctcttgttggatattccctataccagaaaaaacgtcactagttttactgatagggtaggacgcatacctcattcatggcgtctgcagaactgacttgcacgcttcaggcacaaagttgtaagtgctagagaaaatgaaaagcagcatgtagatacaagatctaagacgtgagagatggcctgcgctcatgccatccctgatggcagtcttatttgtttgatcactcaatgtctgtaataatcttctcgtatgagatccatcaaaaaaatttgtgcagttaatgtgtatgaagcactaacgttgataatcttctcatatggtccatgggcgtttatgtattgtcatcaccacttaagtattctcatctccattaggccttgttagacactcgtatttgtctcgatccatgtgtattgaggtggattggaatgtaacttaaattaaattacatctcaatccatgacaatacacgtggattgaggtgtccaagtattcttcacgtggattgtttaatttatactctaattcactttagccacgtggattgagatgaatactaagtatccaaacaaagcactaaatatccaaacaaagccttaatagagtgataatcttctcgtctttataaggtcaagagataatcatgatccataagaacattaataggcatttagggttaaaggctattcgagagtttatacatatgagggggttg

SEQ ID NO: 14231 - DNA, 4716 bp, Zea Mays
ctcgggttcctttcttcgtgcgcactccactttcgccggcgtcgccatggacgccaacgtcgtgcagcgctgcctcgaggccggcggccgcgacttcctcttccaccatacctcttcccctccctctccgacctccgcctctgccgctgcatcctcctccatcctccaatctctccccctccacgtgtccttcgaccgcgggtattacctcctcgtcaaggcgatccaggagctgcgtgcgcgcaaggacggccacgtcgttaccgtcggcatcggcggacccactggctcgggcaagaccagcttggctgagaaggtggcgtcggtgctagggtgcgtcgtgatcgtctccatggaggactaccgcacggcacctggtgtcgacgacggcatcagcgacgtcaatgccgtcgatttcgacgcacttgctcgcaacctccaggatcttgtgaagggtaaagatacaatggtgccactagttgattttcaagagaagaaacgcaccggatggagggaactgagaatttcttcatctggagtggtgattgtcgatggtgcgtatgctctgcattcaacactacgatcattgcttgatatccgagttgctgtggttggcggcgttcattttagcctgctttctaaagttcagcatgatattggagattcttgctcattggactatctaatcgacagtatatttccattgtttagaaagcatattgagccagacctgcatcatgcccaaattaggattgataacagctttgtctgctcatttcgagaaccgtactacaagctgaagtgcaaaaatgagtcatcagatggcaagaagttatattcttttgaacaaaataaagtggaaactgagaactttattgagatgtaccttaggccgccttttgcttctgaagaaatgaagattgatgattggattaaggttaggcaatgtggaataagatactatctatctctcggagaccaaaggattgttgacaagtacttcataatccgtccaaaagctgagtttgaggttggacgaacaactcttggaggattgttggccttggggtacaatgttgttgttagctttaagcgtacatgcacatctgtcaatatagatcaattactgatagctgcagagaccattgacactctaaatgagacctttttggtattaaaaggtccaagcagaaagattgttgcagcagaggcttcaaagcttggtataaagggaccatggatcacaaaatcatacttagaaatgatcttggagagcaaaggggttccacgacttaatacaccaccaccggtatcaagcaaactgctaactgaaagtcaagaaaagaaaattgctgcacctaaacctattcgtgtttctgctgaaaacattacaaatcttgatgacttgatgcaaccgtggacgagatccccgcccaagaagttggaacaagaacacgtattggcaaaatggcagtttatctcagattcttcttcaagaagtaacatccagctggctcctctgccagattcttatgacctggataggggccttctcctatcagttcaagcaattcaggcattgttggagaacagaggataccctatcattgttgggattggtggtcctagtggatcgggaaagacaagtttagctcagaagatggcaaatataattggctgtgaagttgtaagcttggaaagttattacaagcctgaacaagtgagagattataagtatgatgattatagctcattggatattgctttgctcactgagaacattatggacataaaaaagaggcataaagcggaagttccttgcttcgactttgaaaattttagccgaaaggggttcaaggagcttcaagtatccgaggaaagtggagtggtcatctttgaaggtgtgtacactttacatcctgctataaggaaatttctggatttgtggattgcagttgttggtggagttcattcacaccttattgcaagaatacagagagacaagaatcgtgctggcttttctatttctcagactgaaatcatgaccactgtgtttccactgtttcagcaatacattgaaccacatcttgtccatgctcatgttgcttaagattcaaaacgattttgatcctgtgctctctcctgaaagctcactttttgtgttaaaaagtaaaaaacaggtatcctgccaagatatactgaaggtactagatgctagtaaagtctgcagttctgtccagaactttactgatgtgtacttacggcttcctggcataccatcaaatgcccagctgaccgaaggtgagtgtatccgggtcagaatttgtgaaggaagatttgcattgttgatacgagaggtatgcacgcttattttgttttcattatgcttctttcattctttgacatgaatctataacacattgccctttctcttcccttcaatattttgctagcctataagggaaggaaattttattatccagccaaaggttgattttgatattagtgccagtactgttgcagggcttcttaagcttggttaccaagctgttgcatatattgaagcttctgcggtgatttaccaagatggaaagattttaatagaagttgaccatctacaaggagtgtcgactccatatcttcaaattaaagggacaaataaagaaattgttacctctgctggttctgcactctgcttggatggttcatacacaacaaagagttatcttcaaattattttggagagcttaccagctgatggtaatgtatctattggtattcacaatcaacaagctgcaaggctgcaggaactggttgagttcatccagtcacaggtatattgctgtagattcgtatgtaaaatatttgtacaccatactaggaagctgccttgataagctatttgtgagggaagtatcaatgcaacgtttactacaacttagaatgcttgtctgaattcaggtaccatattgttaaccattgtttcaattaacatgttcgactatgtaattaggatgatcaggcttgccatatgtgttgatcagccctgcccgcatatgtgccttggtgtttatggtagttgatcagaggctaggcaaggatctccactgattgagtgctttctatcaaccttagacgatccttgtctatatattgtacaccccttctacctctataatcaacctactattggcggcatatactttcctacatggtatcacgagattatctcacttccgctctctagggctagtcgccgcctttcctgctgccttcctctctttcgcccccccccccccccccctcggcctcaccccgccgctcgtcctccatagcggctccaccttcaccgtgaccctaaaccctgagttagggtttcccacagtctacaccgacattgactcggctagctgccccgacacgctccagtttacatccagctatgccgtgttccaggacgccaacctcgtctcctgggactcgaagcggcaacccgttgtctcccactccggtgctgaggcgtcgagtgtattcactgagttccgatccagtctcaacatctgtacaggatagagttgatactgcgaggggtgtttgactcctgtttagggttagattagagtttttctgtatttacctaattagccctgttgtaatgggcttggcccacttaactcctctatataatatattcccaactctggattagcgttagggtttcagtctatccaacagctaggcttctaaaatgtacaaggctacttagttcttcaacaactatctttctgctaatattttatggttactgttctttccaagttattctcatatactggaattgcagggagggagctttaattcagatttatcgtcaccaatacgagaaacttcctctacagatagtgtgattgatgatatgcagtccaggataaggaagcttgagagatggaatacgataaacatggttttgtggactatattattgtctgctcttgttggatattccctataccagaaaaaacgtcactaggttctctggcagttttactgatagggtaggacgcatacctcattcatggcgtctgcagaactgacttgcacgcttcaggcacaaagttgtaagtgctagagaaaatgaaaagcagcatgtagatacaagatctaagacgtgagagatggcctgcgctcatgccatccctgatggcagtcttatttgtttgatcactcaatgtctgtaataatcttctcgtatgagatccatcaaaaaaatttgtgcagttaatgtgtatgaagcactaacgttgataatcttctcatatggtccatgggcgtttatgtattgtcatcaccacttaagtattctcatctccattaggccttgttagacactcgtatttgtctcgatccatgtgtattgaggtggattggaatgtaacttaaattaaattacatctcaatccatgacaatacacgtggattgaggtgtccaagtattcttcacgtggattgtttaatttatactctaattcactttagccacgtggattgagatgaatactaagtatccaaacaaagcactaaatatccaaacaaagccttaatagagtgataatcttctcgtctttataaggtcaagagataatcatgatccataagaacattaataggcatttagggttaaaggctattcgagagtttatacatatgagggggttg

SEQ ID NO: 14232 - DNA, 1807 bp, Zea Mays
gttcctttcttcgtgcgcactccactttcgccggcgtcgccatggacgccaacgtcgtgcagcgctgcctcgaggccggcggccgcgacttcctcttccaccatacctcttcccctccctctccgacctccgcctctgccgctgcatcctcctccatcctccaatctctccccctccacgtgtccttcgaccgcgggtattacctcctcgtcaaggcgatccaggagctgcgtgcgcgcaaggacggccacgtcgttaccgtcggcatcggcggacccactggctcgggcaagaccagcttggctgagaaggtggcgtcggtgctagggtgcgtcgtgatcgtctccatggaggactaccgcacggcacctggtgtcgacgacggcatcagcgacgtcaatgccgtcgatttcgacgcacttgctcgcaacctccaggatcttgtgaagggtaaagatacaatggtgccactagttgattttcaagagaagaaacgcaccggatggagggaactgagaatttcttcatctggagtggtgattgtcgatggtgcgtatgctctgcattcaacactacgatcattgcttgatatccgagttgctgtggttggcggcgttcattttagcctgctttctaaagttcagcatgatattggagattcttgctcattggactatctaatcgacagtatatttccattgtttagaaagcatattgagccagacctgcatcatgcccaaattaggattgataacagctttgtctgctcatttcgagaaccgtactacaagctgaagtgcaaaaatgagtcatcagatggcaagaagttatattcttttgaacaaaataaagtggaaactgagaactttattgagatgtaccttaggccgccttttgcttctgaagaaatgaagattgatgattggattaaggttaggcaatgtggaataagatactatctatctctcggagaccaaaggattgttgacaagtacttcataatccgtccaaaagctgagtttgaggttggacgaacaactcttggaggattgttggccttggggtacaatgttgttgttagctttaagcgtacatgcacatctgtcaatatagatcaattactgatagctgcagagaccattgacactctaaatgagacctttttggtattaaaaggtccaagcagaaagattgttgcagcagaggcttcaaagcttggtataaagggaccatggatcacaaaatcatacttagaaatgatcttggagagcaaaggggttccacgacttaatacaccaccaccggtatcaagcaaactgctaactgaaagtcaagaaaagaaaattgctgcacctaaacctattcgtgtttctgctgaaaacattacaaatcttgatgacttgatgcaaccgtggacgagatccccgcccaagaagttggaacaagaacacgtattggcaaaatggcagtttatctcagattcttcttcaagaagtaacatccagctggctcctctgccagattcttatgacctggataggggccttctcctatcagttcaagcaattcaggcattgttggagaacagaggataccctatcattgttgggattggtggtcctagtggatcgggaaagacaagtttagctcagaagatggcaaatataattggctgtgaagttgtaagcttggaaagttattacaagcctgaacaagtgagagattataagtatgatgattatagctcattggatattgctttgctcactgaggagaatagaattggtggtaatagaatggatcatcc

SEQ ID NO: 14233 - DNA, 819 bp, Zea Mays
tcctttcttcgtgcgcactccactttcgccggcgtcgccatggacgccaacgtcgtgcagcgctgcctcgaggccggcggccgcgacttcctcttccaccatacctcttcccctccctctccgacctccgcctctgccgctgcatcctcctccatcctccaatctctccccctccacgtgtccttcgaccgcgggtattacctcctcgtcaaggcgatccaggagctgcgtgcgcgcaaggacggccacgtcgttaccgtcggcatcggcggacccactggctcgggcaagaccagcttggctgagaaggtggcgtcggtgctagggtgcgtcgtgatcgtctccatggaggactaccgcacggcacctggtgtcgacgacggcatcagcgacgtcaatgccgtcgatttcgacgcacttgctcgcaacctccaggatcttgtgaagggtaaagatacaatggtgccactagttgattttcaagagaagaaacgcaccggatggagggaactgagaatttcttcatctggagtggtgattgtcgatggtgcgtatgctctgcattcaacactacgatcattgcttgatatccgagttgctgtggttggcggcgttcattttagcctgctttctaaagttcagcatgatattggagattcttgctcattggactatctaatcgacagtatatttccattgtttagaaagcatattgagccagacctgcatcatgcccaaattaggattgataacagctttgtctgctcatttcgagaaccgtactacaagctgaagtgcaaaaatgagtattgagcttgt

SEQ ID NO: 14234 - DNA, 1714 bp, Zea Mays
tcctttcttcgtgcgcactccactttcgccggcgtcgccatggacgccaacgtcgtgcagcgctgcctcgaggccggcggccgcgacttcctcttccaccatacctcttcccctccctctccgacctccgcctctgccgctgcatcctcctccatcctccaatctctccccctccacgtgtccttcgaccgcgggtattacctcctcgtcaaggcgatccaggagctgcgtgcgcgcaaggacggccacgtcgttaccgtcggcatcggcggacccactggctcgggcaagaccagcttggctgagaaggtggcgtcggtgctagggtgcgtcgtgatcgtctccatggaggactaccgcacggcacctggtgtcgacgacggcatcagcgacgtcaatgccgtcgatttcgacgcacttgctcgcaacctccaggatcttgtgaagggtaaagatacaatggtgccactagttgattttcaagagaagaaacgcaccggatggagggaactgagaatttcttcatctggagtggtgattgtcgatggtgcgtatgctctgcattcaacactacgatcattgcttgatatccgagttgctgtggttggcggcgttcattttagcctgctttctaaagttcagcatgatattggagattcttgctcattggactatctaatcgacagtatatttccattgtttagaaagcatattgagccagacctgcatcatgcccaaattaggattgataacagctttgtctgctcatttcgagaaccgtactacaagctgaagtgcaaaaatgagctttattgagatgtaccttaggccgccttttgcttctgaagaaatgaagattgatgattggattaaggttaggcaatgtggaataagatactatctatctctcggagaccaaaggattgttgacaagtacttcataatccgtccaaaagctgagtttgaggttggacgaacaactcttggaggattgttggccttggggtacaatgttgttgttagctttaagcgtacatgcacatctgtcaatatagatcaattactgatagctgcagagaccattgacactctaaatgagacctttttggtattaaaaggtccaagcagaaagattgttgcagcagaggcttcaaagcttggtataaagggaccatggatcacaaaatcatacttagaaatgatcttggagagcaaaggggttccacgacttaatacaccaccaccggtatcaagcaaactgctaactgaaagtcaagaaaagaaaattgctgcacctaaacctattcgtgtttctgctgaaaacattacaaatcttgatgacttgatgcaaccgtggacgagatccccgcccaagaagttggaacaagaacacgtattggcaaaatggcagtttatctcagattcttcttcaagaagtaacatccagctggctcctctgccagattcttatgacctggataggggccttctcctatcagttcaagcaattcaggcattgttggagaacagaggataccctatcattgttgggattggtggtcctagtggatcgggaaagacaagtttagctcagaagatggcaaatataattggctgtgaagttgtaagcttggaaagttattacaagcctgaacaagtgagagattataagtatgatgattatagctcattggatattgctttgctcactgag

SEQ ID NO: 14235 - DNA, 2895 bp, Zea Mays
tcctttcttcgtgcgcactccactttcgccggcgtcgccatggacgccaacgtcgtgcagcgctgcctcgaggccggcggccgcgacttcctcttccaccatacctcttcccctccctctccgacctccgcctctgccgctgcatcctcctccatcctccaatctctccccctccacgtgtccttcgaccgcgggtattacctcctcgtcaaggcgatccaggagctgcgtgcgcgcaaggacggccacgtcgttaccgtcggcatcggcggacccactggctcgggcaagaccagcttggctgagaaggtggcgtcggtgctagggtgcgtcgtgatcgtctccatggaggactaccgcacggcacctggtgtcgacgacggcatcagcgacgtcaatgccgtcgatttcgacgcacttgctcgcaacctccaggatcttgtgaagggtaaagatacaatggtgccactagttgattttcaagagaagaaacgcaccggatggagggaactgagaatttcttcatctggagtggtgattgtcgatggtgcgtatgctctgcattcaacactacgatcattgcttgatatccgagttgctgtggttggcggcgttcattttagcctgctttctaaagttcagcatgatattggagattcttgctcattggactatctaatcgacagtatatttccattgtttagaaagcatattgagccagacctgcatcatgcccaaattaggattgataacagctttgtctgctcatttcgagaaccgtactacaagctgaagtgcaaaaatgagtcatcagatggcaagaagttatattcttttgaacaaaataaagtggaaactgagaactttattgagatgtaccttaggccgccttttgcttctgaagaaatgaagattgatgattggattaaggttaggcaatgtggaataagatactatctatctctcggagaccaaaggattgttgacaagtacttcataatccgtccaaaagctgagtttgaggttggacgaacaactcttggaggattgttggccttggggtacaatgttgttgttagctttaagcgtacatgcacatctgtcaatatagatcaattactgatagctgcagagaccattgacactctaaatgagacctttttggtattaaaaggtccaagcagaaagaggcttcaaagcttggtataaagggaccatggatcacaaaatcatacttagaaatgatcttggagagcaaaggggttccacgacttaatacaccaccaccggtatcaagcaaactgctaactgaaagtcaagaaaagaaaattgctgcacctaaacctattcgtgtttctgctgaaaacattacaaatcttgatgacttgatgcaaccgtggacgagatccccgcccaagaagttggaacaagaacacgtattggcaaaatggcagtttatctcagattcttcttcaagaagtaacatccagctggctcctctgccagattcttatgacctggataggggccttctcctatcagttcaagcaattcaggcattgttggagaacagaggataccctatcattgttgggattggtggtcctagtggatcgggaaagacaagtttagctcagaagatggcaaatataattggctgtgaagttgtaagcttggaaagttattacaagcctgaacaagtgagagattataagtatgatgattatagctcattggatattgctttgctcactgagaacattatggacataaaaaagaggcataaagcggaagttccttgcttcgactttgaaaattttagccgaaaggggttcaaggagcttcaagtatccgaggaaagtggagtggtcatctttgaaggtgtgtacactttacatcctgctataaggaaatttctggatttgtggattgcagttgttggtggagttcattcacaccttattgcaagaatacagagagacaagaatcgtgctggcttttctatttctcagactgaaatcatgaccactgtgtttccactgtttcagcaatacattgaaccacatcttgtccatgctcatcttaagattcaaaacgattttgatcctgtgctctctcctgaaagctcactttttgtgttaaaaagtaaaaaacaggtatcctgccaagatatactgaaggtactagatgctagtaaagtctgcagttctgtccagaactttactgatgtgtacttacggcttcctggcataccatcaaatgcccagctgaccgaaggtgagtgtatccgggtcagaatttgtgaaggaagatttgcattgttgatacgagaggtatgcacgcttattttgttttcattatgcttctttcattctttgacatgaatctataacacattgccctttctcttcccttcaatattttgctagcctataagggaaggaaattttattatccagccaaaggttgattttgatattagtgccagtactgttgcagggcttcttaagcttggttaccaagctgttgcatatattgaagcttctgcggtgatttaccaagatggaaaggttattatgttccttaaccagtgtagctcttttttttatttagagaaaaggatgcatacttgcctaccactaaatggacaaagtcttttttatttttgtaaaagtctccctactcctgtgctattatgccattattgcttgcttgtacaaagatttatcctttagtattattgctgagtatgcatgattaaggcttaaataacttaggaattgtgaattttgctggcacatttccaggtttggtttattatttgaatgcctttaatcctttattaagaggaaggttttaatgttttatcaaagcatcattacgtttttatcctgt

SEQ ID NO: 14236 - DNA, 3479 bp, Zea Mays
tcctttcttcgtgcgcactccactttcgccggcgtcgccatggacgccaacgtcgtgcagcgctgcctcgaggccggcggccgcgacttcctcttccaccatacctcttcccctccctctccgacctccgcctctgccgctgcatcctcctccatcctccaatctctccccctccacgtgtccttcgaccgcgggtattacctcctcgtcaaggcgatccaggagctgcgtgcgcgcaaggacggccacgtcgttaccgtcggcatcggcggacccactggctcgggcaagaccagcttggctgagaaggtggcgtcggtgctagggtgcgtcgtgatcgtctccatggaggactaccgcacggcacctggtgtcgacgacggcatcagcgacgtcaatgccgtcgatttcgacgcacttgctcgcaacctccaggatcttgtgaagggtaaagatacaatggtgccactagttgattttcaagagaagaaacgcaccggatggagggaactgagaatttcttcatctggagtggtgattgtcgatggtgcgtatgctctgcattcaacactacgatcattgcttgatatccgagttgctgtggttggcggcgttcattttagcctgctttctaaagttcagcatgatattggagattcttgctcattggactatctaatcgacagtatatttccattgtttagaaagcatattgagccagacctgcatcatgcccaaattaggattgataacagctttgtctgctcatttcgagaaccgtactacaagctgaagtgcaaaaatgagtcatcagatggcaagaagttatattcttttgaacaaaataaagtggaaactgagaactttattgagatgtaccttaggccgccttttgcttctgaagaaatgaagattgatgattggattaaggttaggcaatgtggaataagatactatctatctctcggagaccaaaggattgttgacaagtacttcataatccgtccaaaagctgagtttgaggttggacgaacaactcttggaggattgttggccttggggtacaatgttgttgttagctttaagcgtacatgcacatctgtcaatatagatcaattactgatagctgcagagaccattgacactctaaatgagacctttttggtattaaaaggtccaagcagaaagattgttgcagcagaggcttcaaagcttggtataaagggaccatggatcacaaaatcatacttagaaatgatcttggagagcaaaggggttccacgacttaatacaccaccaccggtatcaagcaaactgctaactgaaagtcaagaaaagaaaattgctgcacctaaacctattcgtgtttctgctgaaaacattacaaatcttgatgacttgatgcaaccgtggacgagatccccgcccaagaagttggaacaagaacacgtattggcaaaatggcagtttatctcagattcttcttcaagaagtaacatccagctggctcctctgccagattcttatgacctggataggggccttctcctatcagttcaagcaattcaggcattgttggagaacagaggataccctatcattgttgggattggtggtcctagtggatcgggaaagacaagtttagctcagaagatggcaaatataattggctgtgaagttgtaagcttggaaagttattacaagcctgaacaagtgagagattataagtatgatgattatagctcattggatattgctttgctcactgagaacattatggacataaaaaagaggcataaagcggaagttccttgcttcgactttgaaaattttagccgaaaggggttcaaggagcttcaagtatccgaggaaagtggagtggtcatctttgaaggtgtgtacactttacatcctgctataaggaaatttctggatttgtggattgcagttgttggtggagttcattcacaccttattgcaagaatacagagagacaagaatcgtgctggcttttctatttctcagactgaaatcatgaccactgtgtttccactgtttcagcaatacattgaaccacatcttgtccatgctcatcttaagattcaaaacgattttgatcctgtgctctctcctgaaagctcactttttgtgttaaaaagtaaaaaacaggtatcctgccaagatatactgaaggtactagatgctagtaaagtctgcagttctgtccagaactttactgatgtgtacttacggcttcctggcataccatcaaatgcccagctgaccgaaggtgagtgtatccgggtcagaatttgtgaaggaagatttgcattgttgatacgagagcctataagggaaggaaattttattatccagccaaaggttgattttgatattagtgccagtactgttgcagggcttcttaagcttggttaccaagctgttgcatatattgaagcttctgcggtgatttaccaagatggaaagattttaatagaagttgaccatctacaaggagtgtcgactccatatcttcaaattaaagggacaaataaagaaattgttacctctgctggttctgcactctgcttggatggttcatacacaacaaagagttatcttcaaattattttggagagcttaccagctgatggtaatgtatctattggtattcacaatcaacaagctgcaaggctgcaggaactggttgagttcatccagtcacaggttttgtggactatattattgtctgctcttgttggatattccctataccagaaaaaacgtcactaggttctctggcagttttactgatagggtaggacgcatacctcattcatggcgtctgcagaactgacttgcacgcttcaggcacaaagttgtaagtgctagagaaaatgaaaagcagcatgtagatacaagatctaagacgtgagagatggcctgcgctcatgccatccctgatggcagtcttatttgtttgatcactcaatgtctgtaataatcttctcgtatgagatccatcaaaaaaatttgtgcagttaatgtgtatgaagcactaacgttgataatcttctcatatggtccatgggcgtttatgtattgtcatcaccacttaagtattctcatctccattaggccttgttagacactcgtatttgtctcgatccatgtgtattgaggtggattggaatgtaacttaaattaaattacatctcaatccatgacaatacacgtggattgaggtgtccaagtattcttcacgtggattgtttaatttatactctaattcactttagccacgtggattgagatgaatactaagtatccaaacaaagcactaaatatccaaacaaagccttaatagagtgataatcttctcgtctttataaggtcaagagataatcatgatccataagaacattaataggcatttagggttaaaggctattcgagagtttatacatatgagggggttg

SEQ ID NO: 14237 - DNA, 4609 bp, Zea Mays
tcctttcttcgtgcgcactccactttcgccggcgtcgccatggacgccaacgtcgtgcagcgctgcctcgaggccggcggccgcgacttcctcttccaccatacctcttcccctccctctccgacctccgcctctgccgctgcatcctcctccatcctccaatctctccccctccacgtgtccttcgaccgcgggtattacctcctcgtcaaggcgatccaggagctgcgtgcgcgcaaggacggccacgtcgttaccgtcggcatcggcggacccactggctcgggcaagaccagcttggctgagaaggtggcgtcggtgctagggtgcgtcgtgatcgtctccatggaggactaccgcacggcacctggtgtcgacgacggcatcagcgacgtcaatgccgtcgatttcgacgcacttgctcgcaacctccaggatcttgtgaagggtaaagatacaatggtgccactagttgattttcaagagaagaaacgcaccggatggagggaactgagaatttcttcatctggagtggtgattgtcgatggtgcgtatgctctgcattcaacactacgatcattgcttgatatccgagttgctgtggttggcggcgttcattttagcctgctttctaaagttcagcatgatattggagattcttgctcattggactatctaatcgacagtatatttccattgtttagaaagcatattgagccagacctgcatcatgcccaaattaggattgataacagctttgtctgctcatttcgagaaccgtactacaagctgaagtgcaaaaatgagtcatcagatggcaagaagttatattcttttgaacaaaataaagtggaaactgagaactttattgagatgtaccttaggccgccttttgcttctgaagaaatgaagattgatgattggattaaggttaggcaatgtggaataagatactatctatctctcggagaccaaaggattgttgacaagtacttcataatccgtccaaaagctgagtttgaggttggacgaacaactcttggaggattgttggccttggggtacaatgttgttgttagctttaagcgtacatgcacatctgtcaatatagatcaattactgatagctgcagagaccattgacactctaaatgagacctttttggtattaaaaggtccaagcagaaagattgttgcagcagaggcttcaaagcttggtataaagggaccatggatcacaaaatcatacttagaaatgatcttggagagcaaaggggttccacgacttaatacaccaccaccggtatcaagcaaactgctaactgaaagtcaagaaaagaaaattgctgcacctaaacctattcgtgtttctgctgaaaacattacaaatcttgatgacttgatgcaaccgtggacgagatccccgcccaagaagttggaacaagaacacgtattggcaaaatggcagtttatctcagattcttcttcaagaagtaacatccagctggctcctctgccagattcttatgacctggataggggccttctcctatcagttcaagcaattcaggcattgttggagaacagaggataccctatcattgttgggattggtggtcctagtggatcgggaaagacaagtttagctcagaagatggcaaatataattggctgtgaagttgtaagcttggaaagttattacaagcctgaacaagtgagagattataagtatgatgattatagctcattggatattgctttgctcactgagaacattatggacataaaaaagaggcataaagcggaagttccttgcttcgactttgaaaattttagccgaaaggggttcaaggagcttcaagtatccgaggaaagtggagtggtcatctttgaaggtgtgtacactttacatcctgctataaggaaatttctggatttgtggattgcagttgttggtggagttcattcacaccttattgcaagaatacagagagacaagaatcgtgctggcttttctatttctcagactgaaatcatgaccactgtgtttccactgtttcagcaatacattgaaccacatcttgtccatgctcatcttaagattcaaaacgattttgatcctgtgctctctcctgaaagctcactttttgtgttaaaaagtaaaaaacaggtatcctgccaagatatactgaaggtactagatgctagtaaagtctgcagttctgtccagaactttactgatgtgtacttacggcttcctggcataccatcaaatgcccagctgaccgaaggtgagtgtatccgggtcagaatttgtgaaggaagatttgcattgttgatacgagagcctataagggaaggaaattttattatccagccaaaggttgattttgatattagtgccagtactgttgcagggcttcttaagcttggttaccaagctgttgcatatattgaagcttctgcggtgatttaccaagatggaaagattttaatagaagttgaccatctacaaggagtgtcgactccatatcttcaaattaaagggacaaataaagaaattgttacctctgctggttctgcactctgcttggatggttcatacacaacaaagagttatcttcaaattattttggagagcttaccagctgatggtaatgtatctattggtattcacaatcaacaagctgcaaggctgcaggaactggttgagttcatccagtcacaggtatattgctgtagattcgtatgtaaaatatttgtacaccatactaggaagctgccttgataagctatttgtgagggaagtatcaatgcaacgtttactacaacttagaatgcttgtctgaattcaggtaccatattgttaaccattgtttcaattaacatgttcgactatgtaattaggatgatcaggcttgccatatgtgttgatcagccctgcccgcatatgtgccttggtgtttatggtagttgatcagaggctaggcaaggatctccactgattgagtgctttctatcaaccttagacgatccttgtctatatattgtacaccccttctacctctataatcaacctactattggcggcatatactttcctacatggtatcacgagattatctcacttccgctctctagggctagtcgccgcctttcctgctgccttcctctctttcgcccccccccccccccccctcggcctcaccccgccgctcgtcctccatagcggctccaccttcaccgtgaccctaaaccctgagttagggtttcccacagtctacaccgacattgactcggctagctgccccgacacgctccagtttacatccagctatgccgtgttccaggacgccaacctcgtctcctgggactcgaagcggcaacccgttgtctcccactccggtgctgaggcgtcgagtgtattcactgagttccgatccagtctcaacatctgtacaggatagagttgatactgcgaggggtgtttgactcctgtttagggttagattagagtttttctgtatttacctaattagccctgttgtaatgggcttggcccacttaactcctctatataatatattcccaactctggattagcgttagggtttcagtctatccaacagctaggcttctaaaatgtacaaggctacttagttcttcaacaactatctttctgctaatattttatggttactgttctttccaagttattctcatatactggaattgcagggagggagctttaattcagatttatcgtcaccaatacgagaaacttcctctacagatagtgtgattgatgatatgcagtccaggataaggaagcttgagagatggaatacgataaacatggttttgtggactatattattgtctgctcttgttggatattccctataccagaaaaaacgtcactaggttctctggcagttttactgatagggtaggacgcatacctcattcatggcgtctgcagaactgacttgcacgcttcaggcacaaagttgtaagtgctagagaaaatgaaaagcagcatgtagatacaagatctaagacgtgagagatggcctgcgctcatgccatccctgatggcagtcttatttgtttgatcactcaatgtctgtaataatcttctcgtatgagatccatcaaaaaaatttgtgcagttaatgtgtatgaagcactaacgttgataatcttctcatatggtccatgggcgtttatgtattgtcatcaccacttaagtattctcatctccattaggccttgttagacactcgtatttgtctcgatccatgtgtattgaggtggattggaatgtaacttaaattaaattacatctcaatccatgacaatacacgtggattgaggtgtccaagtattcttcacgtggattgtttaatttatactctaattcactttagccacgtggattgagatgaatactaagtatccaaacaaagcactaaatatccaaacaaagccttaatagagtgataatcttctcgtctttataaggtcaagagataatcatgatccataagaacattaataggcatttagggttaaaggctattcgagagtttatacatatgagggggttg

SEQ ID NO: 14238 - DNA, 4596 bp, Zea Mays
tcctttcttcgtgcgcactccactttcgccggcgtcgccatggacgccaacgtcgtgcagcgctgcctcgaggccggcggccgcgacttcctcttccaccatacctcttcccctccctctccgacctccgcctctgccgctgcatcctcctccatcctccaatctctccccctccacgtgtccttcgaccgcgggtattacctcctcgtcaaggcgatccaggagctgcgtgcgcgcaaggacggccacgtcgttaccgtcggcatcggcggacccactggctcgggcaagaccagcttggctgagaaggtggcgtcggtgctagggtgcgtcgtgatcgtctccatggaggactaccgcacggcacctggtgtcgacgacggcatcagcgacgtcaatgccgtcgatttcgacgcacttgctcgcaacctccaggatcttgtgaagggtaaagatacaatggtgccactagttgattttcaagagaagaaacgcaccggatggagggaactgagaatttcttcatctggagtggtgattgtcgatggtgcgtatgctctgcattcaacactacgatcattgcttgatatccgagttgctgtggttggcggcgttcattttagcctgctttctaaagttcagcatgatattggagattcttgctcattggactatctaatcgacagtatatttccattgtttagaaagcatattgagccagacctgcatcatgcccaaattaggattgataacagctttgtctgctcatttcgagaaccgtactacaagctgaagtgcaaaaatgagtcatcagatggcaagaagttatattcttttgaacaaaataaagtggaaactgagaactttattgagatgtaccttaggccgccttttgcttctgaagaaatgaagattgatgattggattaaggttaggcaatgtggaataagatactatctatctctcggagaccaaaggattgttgacaagtacttcataatccgtccaaaagctgagtttgaggttggacgaacaactcttggaggattgttggccttggggtacaatgttgttgttagctttaagcgtacatgcacatctgtcaatatagatcaattactgatagctgcagagaccattgacactctaaatgagacctttttggtattaaaaggtccaagcagaaagaggcttcaaagcttggtataaagggaccatggatcacaaaatcatacttagaaatgatcttggagagcaaaggggttccacgacttaatacaccaccaccggtatcaagcaaactgctaactgaaagtcaagaaaagaaaattgctgcacctaaacctattcgtgtttctgctgaaaacattacaaatcttgatgacttgatgcaaccgtggacgagatccccgcccaagaagttggaacaagaacacgtattggcaaaatggcagtttatctcagattcttcttcaagaagtaacatccagctggctcctctgccagattcttatgacctggataggggccttctcctatcagttcaagcaattcaggcattgttggagaacagaggataccctatcattgttgggattggtggtcctagtggatcgggaaagacaagtttagctcagaagatggcaaatataattggctgtgaagttgtaagcttggaaagttattacaagcctgaacaagtgagagattataagtatgatgattatagctcattggatattgctttgctcactgagaacattatggacataaaaaagaggcataaagcggaagttccttgcttcgactttgaaaattttagccgaaaggggttcaaggagcttcaagtatccgaggaaagtggagtggtcatctttgaaggtgtgtacactttacatcctgctataaggaaatttctggatttgtggattgcagttgttggtggagttcattcacaccttattgcaagaatacagagagacaagaatcgtgctggcttttctatttctcagactgaaatcatgaccactgtgtttccactgtttcagcaatacattgaaccacatcttgtccatgctcatcttaagattcaaaacgattttgatcctgtgctctctcctgaaagctcactttttgtgttaaaaagtaaaaaacaggtatcctgccaagatatactgaaggtactagatgctagtaaagtctgcagttctgtccagaactttactgatgtgtacttacggcttcctggcataccatcaaatgcccagctgaccgaaggtgagtgtatccgggtcagaatttgtgaaggaagatttgcattgttgatacgagagcctataagggaaggaaattttattatccagccaaaggttgattttgatattagtgccagtactgttgcagggcttcttaagcttggttaccaagctgttgcatatattgaagcttctgcggtgatttaccaagatggaaagattttaatagaagttgaccatctacaaggagtgtcgactccatatcttcaaattaaagggacaaataaagaaattgttacctctgctggttctgcactctgcttggatggttcatacacaacaaagagttatcttcaaattattttggagagcttaccagctgatggtaatgtatctattggtattcacaatcaacaagctgcaaggctgcaggaactggttgagttcatccagtcacaggtatattgctgtagattcgtatgtaaaatatttgtacaccatactaggaagctgccttgataagctatttgtgagggaagtatcaatgcaacgtttactacaacttagaatgcttgtctgaattcaggtaccatattgttaaccattgtttcaattaacatgttcgactatgtaattaggatgatcaggcttgccatatgtgttgatcagccctgcccgcatatgtgccttggtgtttatggtagttgatcagaggctaggcaaggatctccactgattgagtgctttctatcaaccttagacgatccttgtctatatattgtacaccccttctacctctataatcaacctactattggcggcatatactttcctacatggtatcacgagattatctcacttccgctctctagggctagtcgccgcctttcctgctgccttcctctctttcgcccccccccccccccccctcggcctcaccccgccgctcgtcctccatagcggctccaccttcaccgtgaccctaaaccctgagttagggtttcccacagtctacaccgacattgactcggctagctgccccgacacgctccagtttacatccagctatgccgtgttccaggacgccaacctcgtctcctgggactcgaagcggcaacccgttgtctcccactccggtgctgaggcgtcgagtgtattcactgagttccgatccagtctcaacatctgtacaggatagagttgatactgcgaggggtgtttgactcctgtttagggttagattagagtttttctgtatttacctaattagccctgttgtaatgggcttggcccacttaactcctctatataatatattcccaactctggattagcgttagggtttcagtctatccaacagctaggcttctaaaatgtacaaggctacttagttcttcaacaactatctttctgctaatattttatggttactgttctttccaagttattctcatatactggaattgcagggagggagctttaattcagatttatcgtcaccaatacgagaaacttcctctacagatagtgtgattgatgatatgcagtccaggataaggaagcttgagagatggaatacgataaacatggttttgtggactatattattgtctgctcttgttggatattccctataccagaaaaaacgtcactaggttctctggcagttttactgatagggtaggacgcatacctcattcatggcgtctgcagaactgacttgcacgcttcaggcacaaagttgtaagtgctagagaaaatgaaaagcagcatgtagatacaagatctaagacgtgagagatggcctgcgctcatgccatccctgatggcagtcttatttgtttgatcactcaatgtctgtaataatcttctcgtatgagatccatcaaaaaaatttgtgcagttaatgtgtatgaagcactaacgttgataatcttctcatatggtccatgggcgtttatgtattgtcatcaccacttaagtattctcatctccattaggccttgttagacactcgtatttgtctcgatccatgtgtattgaggtggattggaatgtaacttaaattaaattacatctcaatccatgacaatacacgtggattgaggtgtccaagtattcttcacgtggattgtttaatttatactctaattcactttagccacgtggattgagatgaatactaagtatccaaacaaagcactaaatatccaaacaaagccttaatagagtgataatcttctcgtctttataaggtcaagagataatcatgatccataagaacattaataggcatttagggttaaaggctattcgagagtttatacatatgagggggttg

SEQ ID NO: 14239 - DNA, 3599 bp, Zea Mays
tcctttcttcgtgcgcactccactttcgccggcgtcgccatggacgccaacgtcgtgcagcgctgcctcgaggccggcggccgcgacttcctcttccaccatacctcttcccctccctctccgacctccgcctctgccgctgcatcctcctccatcctccaatctctccccctccacgtgtccttcgaccgcgggtattacctcctcgtcaaggcgatccaggagctgcgtgcgcgcaaggacggccacgtcgttaccgtcggcatcggcggacccactggctcgggcaagaccagcttggctgagaaggtggcgtcggtgctagggtgcgtcgtgatcgtctccatggaggactaccgcacggcacctggtgtcgacgacggcatcagcgacgtcaatgccgtcgatttcgacgcacttgctcgcaacctccaggatcttgtgaagggtaaagatacaatggtgccactagttgattttcaagagaagaaacgcaccggatggagggaactgagaatttcttcatctggagtggtgattgtcgatggtgcgtatgctctgcattcaacactacgatcattgcttgatatccgagttgctgtggttggcggcgttcattttagcctgctttctaaagttcagcatgatattggagattcttgctcattggactatctaatcgacagtatatttccattgtttagaaagcatattgagccagacctgcatcatgcccaaattaggattgataacagctttgtctgctcatttcgagaaccgtactacaagctgaagtgcaaaaatgagtcatcagatggcaagaagttatattcttttgaacaaaataaagtggaaactgagaactttattgagatgtaccttaggccgccttttgcttctgaagaaatgaagattgatgattggattaaggttaggcaatgtggaataagatactatctatctctcggagaccaaaggattgttgacaagtacttcataatccgtccaaaagctgagtttgaggttggacgaacaactcttggaggattgttggccttggggtacaatgttgttgttagctttaagcgtacatgcacatctgtcaatatagatcaattactgatagctgcagagaccattgacactctaaatgagacctttttggtattaaaaggtccaagcagaaagattgttgcagcagaggcttcaaagcttggtataaagggaccatggatcacaaaatcatacttagaaatgatcttggagagcaaaggggttccacgacttaatacaccaccaccggtatcaagcaaactgctaactgaaagtcaagaaaagaaaattgctgcacctaaacctattcgtgtttctgctgaaaacattacaaatcttgatgacttgatgcaaccgtggacgagatccccgcccaagaagttggaacaagaacacgtattggcaaaatggcagtttatctcagattcttcttcaagaagtaacatccagctggctcctctgccagattcttatgacctggataggggccttctcctatcagttcaagcaattcaggcattgttggagaacagaggataccctatcattgttgggattggtggtcctagtggatcgggaaagacaagtttagctcagaagatggcaaatataattggctgtgaagttgtaagcttggaaagttattacaagcctgaacaagtgagagattataagtatgatgattatagctcattggatattgctttgctcactgagaacattatggacataaaaaagaggcataaagcggaagttccttgcttcgactttgaaaattttagccgaaaggggttcaaggagcttcaagtatccgaggaaagtggagtggtcatctttgaaggtgtgtacactttacatcctgctataaggaaatttctggatttgtggattgcagttgttggtggagttcattcacaccttattgcaagaatacagagagacaagaatcgtgctggcttttctatttctcagactgaaatcatgaccactgtgtttccactgtttcagcaatacattgaaccacatcttgtccatgctcatcttaagattcaaaacgattttgatcctgtgctctctcctgaaagctcactttttgtgttaaaaagtaaaaaacaggtatcctgccaagatatactgaaggtactagatgctagtaaagtctgcagttctgtccagaactttactgatgtgtacttacggcttcctggcataccatcaaatgcccagctgaccgaaggtgagtgtatccgggtcagaatttgtgaaggaagatttgcattgttgatacgagagcctataagggaaggaaattttattatccagccaaaggttgattttgatattagtgccagtactgttgcagggcttcttaagcttggttaccaagctgttgcatatattgaagcttctgcggtgatttaccaagatggaaagattttaatagaagttgaccatctacaaggagtgtcgactccatatcttcaaattaaagggacaaataaagaaattgttacctctgctggttctgcactctgcttggatggttcatacacaacaaagagttatcttcaaattattttggagagcttaccagctgatggtaatgtatctattggtattcacaatcaacaagctgcaaggctgcaggaactggttgagttcatccagtcacagggagggagctttaattcagatttatcgtcaccaatacgagaaacttcctctacagatagtgtgattgatgatatgcagtccaggataaggaagcttgagagatggaatacgataaacatggttttgtggactatattattgtctgctcttgttggatattccctataccagaaaaaacgtcactaggttctctggcagttttactgatagggtaggacgcatacctcattcatggcgtctgcagaactgacttgcacgcttcaggcacaaagttgtaagtgctagagaaaatgaaaagcagcatgtagatacaagatctaagacgtgagagatggcctgcgctcatgccatccctgatggcagtcttatttgtttgatcactcaatgtctgtaataatcttctcgtatgagatccatcaaaaaaatttgtgcagttaatgtgtatgaagcactaacgttgataatcttctcatatggtccatgggcgtttatgtattgtcatcaccacttaagtattctcatctccattaggccttgttagacactcgtatttgtctcgatccatgtgtattgaggtggattggaatgtaacttaaattaaattacatctcaatccatgacaatacacgtggattgaggtgtccaagtattcttcacgtggattgtttaatttatactctaattcactttagccacgtggattgagatgaatactaagtatccaaacaaagcactaaatatccaaacaaagccttaatagagtgataatcttctcgtctttataaggtcaagagataatcatgatccataagaacattaataggcatttagggttaaaggctattcgagagtttatacatatgagggggttg

SEQ ID NO: 14240 - DNA, 3586 bp, Zea Mays
tcctttcttcgtgcgcactccactttcgccggcgtcgccatggacgccaacgtcgtgcagcgctgcctcgaggccggcggccgcgacttcctcttccaccatacctcttcccctccctctccgacctccgcctctgccgctgcatcctcctccatcctccaatctctccccctccacgtgtccttcgaccgcgggtattacctcctcgtcaaggcgatccaggagctgcgtgcgcgcaaggacggccacgtcgttaccgtcggcatcggcggacccactggctcgggcaagaccagcttggctgagaaggtggcgtcggtgctagggtgcgtcgtgatcgtctccatggaggactaccgcacggcacctggtgtcgacgacggcatcagcgacgtcaatgccgtcgatttcgacgcacttgctcgcaacctccaggatcttgtgaagggtaaagatacaatggtgccactagttgattttcaagagaagaaacgcaccggatggagggaactgagaatttcttcatctggagtggtgattgtcgatggtgcgtatgctctgcattcaacactacgatcattgcttgatatccgagttgctgtggttggcggcgttcattttagcctgctttctaaagttcagcatgatattggagattcttgctcattggactatctaatcgacagtatatttccattgtttagaaagcatattgagccagacctgcatcatgcccaaattaggattgataacagctttgtctgctcatttcgagaaccgtactacaagctgaagtgcaaaaatgagtcatcagatggcaagaagttatattcttttgaacaaaataaagtggaaactgagaactttattgagatgtaccttaggccgccttttgcttctgaagaaatgaagattgatgattggattaaggttaggcaatgtggaataagatactatctatctctcggagaccaaaggattgttgacaagtacttcataatccgtccaaaagctgagtttgaggttggacgaacaactcttggaggattgttggccttggggtacaatgttgttgttagctttaagcgtacatgcacatctgtcaatatagatcaattactgatagctgcagagaccattgacactctaaatgagacctttttggtattaaaaggtccaagcagaaagaggcttcaaagcttggtataaagggaccatggatcacaaaatcatacttagaaatgatcttggagagcaaaggggttccacgacttaatacaccaccaccggtatcaagcaaactgctaactgaaagtcaagaaaagaaaattgctgcacctaaacctattcgtgtttctgctgaaaacattacaaatcttgatgacttgatgcaaccgtggacgagatccccgcccaagaagttggaacaagaacacgtattggcaaaatggcagtttatctcagattcttcttcaagaagtaacatccagctggctcctctgccagattcttatgacctggataggggccttctcctatcagttcaagcaattcaggcattgttggagaacagaggataccctatcattgttgggattggtggtcctagtggatcgggaaagacaagtttagctcagaagatggcaaatataattggctgtgaagttgtaagcttggaaagttattacaagcctgaacaagtgagagattataagtatgatgattatagctcattggatattgctttgctcactgagaacattatggacataaaaaagaggcataaagcggaagttccttgcttcgactttgaaaattttagccgaaaggggttcaaggagcttcaagtatccgaggaaagtggagtggtcatctttgaaggtgtgtacactttacatcctgctataaggaaatttctggatttgtggattgcagttgttggtggagttcattcacaccttattgcaagaatacagagagacaagaatcgtgctggcttttctatttctcagactgaaatcatgaccactgtgtttccactgtttcagcaatacattgaaccacatcttgtccatgctcatcttaagattcaaaacgattttgatcctgtgctctctcctgaaagctcactttttgtgttaaaaagtaaaaaacaggtatcctgccaagatatactgaaggtactagatgctagtaaagtctgcagttctgtccagaactttactgatgtgtacttacggcttcctggcataccatcaaatgcccagctgaccgaaggtgagtgtatccgggtcagaatttgtgaaggaagatttgcattgttgatacgagagcctataagggaaggaaattttattatccagccaaaggttgattttgatattagtgccagtactgttgcagggcttcttaagcttggttaccaagctgttgcatatattgaagcttctgcggtgatttaccaagatggaaagattttaatagaagttgaccatctacaaggagtgtcgactccatatcttcaaattaaagggacaaataaagaaattgttacctctgctggttctgcactctgcttggatggttcatacacaacaaagagttatcttcaaattattttggagagcttaccagctgatggtaatgtatctattggtattcacaatcaacaagctgcaaggctgcaggaactggttgagttcatccagtcacagggagggagctttaattcagatttatcgtcaccaatacgagaaacttcctctacagatagtgtgattgatgatatgcagtccaggataaggaagcttgagagatggaatacgataaacatggttttgtggactatattattgtctgctcttgttggatattccctataccagaaaaaacgtcactaggttctctggcagttttactgatagggtaggacgcatacctcattcatggcgtctgcagaactgacttgcacgcttcaggcacaaagttgtaagtgctagagaaaatgaaaagcagcatgtagatacaagatctaagacgtgagagatggcctgcgctcatgccatccctgatggcagtcttatttgtttgatcactcaatgtctgtaataatcttctcgtatgagatccatcaaaaaaatttgtgcagttaatgtgtatgaagcactaacgttgataatcttctcatatggtccatgggcgtttatgtattgtcatcaccacttaagtattctcatctccattaggccttgttagacactcgtatttgtctcgatccatgtgtattgaggtggattggaatgtaacttaaattaaattacatctcaatccatgacaatacacgtggattgaggtgtccaagtattcttcacgtggattgtttaatttatactctaattcactttagccacgtggattgagatgaatactaagtatccaaacaaagcactaaatatccaaacaaagccttaatagagtgataatcttctcgtctttataaggtcaagagataatcatgatccataagaacattaataggcatttagggttaaaggctattcgagagtttatacatatgagggggttg

SEQ ID NO: 14241 - DNA, 2502 bp, Zea Mays
ttgattagtgcccttacagtcatgtctattgagcaggatcttgtgaagggtaaagatacaatggtgccactagttgattttcaagagaagaaacgcaccggatggagggaactgagaatttcttcatctggagtggtgattgtcgatggtgcgtatgctctgcattcaacactacgatcattgcttgatatccgagttgctgtggttggcggcgttcattttagcctgctttctaaagttcagcatgatattggagattcttgctcattggactatctaatcgacagtatatttccattgtttagaaagcatattgagccagacctgcatcatgcccaaattaggattgataacagctttgtctgctcatttcgagaaccgtactacaagctgaagtgcaaaaatgagatggcaagaagttatattcttttgaacaaaataaagtggaaactgagaactttattgagatgtaccttaggccgccttttgcttctgaagaaatgaagattgatgattggattaaggttaggcaatgtggaataagatactatctatctctcggagaccaaaggattgttgacaagtacttcataatccgtccaaaagctgagtttgaggttggacgaacaactcttggaggattgttggccttggggtacaatgttgttgttagctttaagcgtacatgcacatctgtcaatatagatcaattactgatagctgcagagaccattgacactctaaatgagacctttttggtattaaaaggtccaagcagaaagattgttgcagcagaggcttcaaagcttggtataaagggaccatggatcacaaaatcatacttagaaatgatcttggagagcaaaggggttccacgacttaatacaccaccaccggtatcaagcaaactgctaactgaaagtcaagaaaagaaaattgctgcacctaaacctattcgtgtttctgctgaaaacattacaaatcttgatgacttgatgcaaccgtggacgagatccccgcccaagaagttggaacaagaacacgtattggcaaaatggcagtttatctcagattcttcttcaagaagtaacatccagctggctcctctgccagattcttatgacctggataggggccttctcctatcagttcaagcaattcaggcattgttggagaacagaggataccctatcattgttgggattggtggtcctagtggatcgggaaagacaagtttagctcagaagatggcaaatataattggctgtgaagttgtaagcttggaaagttattacaagcctgaacaagtgagagattataagtatgatgattatagctcattggatattgctttgctcactgagaacattatggacataaaaaagaggcataaagcggaagttccttgcttcgactttgaaaattttagccgaaaggggttcaaggagcttcaagtatccgaggaaagtggagtggtcatctttgaaggtgtgtacactttacatcctgctataaggaaatttctggatttgtggattgcagttgttggtggagttcattcacaccttattgcaagaatacagagagacaagaatcgtgctggcttttctatttctcagactgaaatcatgaccactgtgtttccactgtttcagcaatacattgaaccacatcttgtccatgctcatcttaagattcaaaacgattttgatcctgtgctctctcctgaaagctcactttttgtgttaaaaagtaaaaaacaggtatcctgccaagatatactgaaggtactagatgctagtaaagtctgcagttctgtccagaactttactgatgtgtacttacggcttcctggcataccatcaaatgcccagctgaccgaaggtgagtgtatccgggtcagaatttgtgaaggaagatttgcattgttgatacgagaggtatgcacgcttattttgttttcattatgcttctttcattctttgacatgaatctataacacattgccctttctcttcccttcaatattttgctagcctataagggaaggaaattttattatccagccaaaggttgattttgatattagtgccagtactgttgcagggcttcttaagcttggttaccaagctgttgcatatattgaagcttctgcggtgatttaccaagatggaaaggttattatgttccttaaccagtgtagctcttttttttatttagagaaaaggatgcatacttgcctaccactaaatggacaaagtcttttttatttttgtaaaagtctccctactcctgtgctattatgccattattgcttgcttgtacaaagatttatcctttagtattattgctgagtatgcatgattaaggcttaaataacttaggaattgtgaattttgctggcacatttccaggtttggtttattatttgaatgcctttaatcctttattaagaggaaggttttaatgttttatcaaagcatcattacgtttttatcctgt

SEQ ID NO: 14242 - DNA, 3193 bp, Zea Mays
ttgattagtgcccttacagtcatgtctattgagcaggatcttgtgaagggtaaagatacaatggtgccactagttgattttcaagagaagaaacgcaccggatggagggaactgagaatttcttcatctggagtggtgattgtcgatggtgcgtatgctctgcattcaacactacgatcattgcttgatatccgagttgctgtggttggcggcgttcattttagcctgctttctaaagttcagcatgatattggagattcttgctcattggactatctaatcgacagtatatttccattgtttagaaagcatattgagccagacctgcatcatgcccaaattaggattgataacagctttgtctgctcatttcgagaaccgtactacaagctgaagtgcaaaaatgagatggcaagaagttatattcttttgaacaaaataaagtggaaactgagaactttattgagatgtaccttaggccgccttttgcttctgaagaaatgaagattgatgattggattaaggttaggcaatgtggaataagatactatctatctctcggagaccaaaggattgttgacaagtacttcataatccgtccaaaagctgagtttgaggttggacgaacaactcttggaggattgttggccttggggtacaatgttgttgttagctttaagcgtacatgcacatctgtcaatatagatcaattactgatagctgcagagaccattgacactctaaatgagacctttttggtattaaaaggtccaagcagaaagattgttgcagcagaggcttcaaagcttggtataaagggaccatggatcacaaaatcatacttagaaatgatcttggagagcaaaggggttccacgacttaatacaccaccaccggtatcaagcaaactgctaactgaaagtcaagaaaagaaaattgctgcacctaaacctattcgtgtttctgctgaaaacattacaaatcttgatgacttgatgcaaccgtggacgagatccccgcccaagaagttggaacaagaacacgtattggcaaaatggcagtttatctcagattcttcttcaagaagtaacatccagctggctcctctgccagattcttatgacctggataggggccttctcctatcagttcaagcaattcaggcattgttggagaacagaggataccctatcattgttgggattggtggtcctagtggatcgggaaagacaagtttagctcagaagatggcaaatataattggctgtgaagttgtaagcttggaaagttattacaagcctgaacaagtgagagattataagtatgatgattatagctcattggatattgctttgctcactgagaacattatggacataaaaaagaggcataaagcggaagttccttgcttcgactttgaaaattttagccgaaaggggttcaaggagcttcaagtatccgaggaaagtggagtggtcatctttgaaggtgtgtacactttacatcctgctataaggaaatttctggatttgtggattgcagttgttggtggagttcattcacaccttattgcaagaatacagagagacaagaatcgtgctggcttttctatttctcagactgaaatcatgaccactgtgtttccactgtttcagcaatacattgaaccacatcttgtccatgctcatcttaagattcaaaacgattttgatcctgtgctctctcctgaaagctcactttttgtgttaaaaagtaaaaaacaggtatcctgccaagatatactgaaggtactagatgctagtaaagtctgcagttctgtccagaactttactgatgtgtacttacggcttcctggcataccatcaaatgcccagctgaccgaaggtgagtgtatccgggtcagaatttgtgaaggaagatttgcattgttgatacgagagcctataagggaaggaaattttattatccagccaaaggttgattttgatattagtgccagtactgttgcagggcttcttaagcttggttaccaagctgttgcatatattgaagcttctgcggtgatttaccaagatggaaagattttaatagaagttgaccatctacaaggagtgtcgactccatatcttcaaattaaagggacaaataaagaaattgttacctctgctggttctgcactctgcttggatggttcatacacaacaaagagttatcttcaaattattttggagagcttaccagctgatggtaatgtatctattggtattcacaatcaacaagctgcaaggctgcaggaactggttgagttcatccagtcacagggagggagctttaattcagatttatcgtcaccaatacgagaaacttcctctacagatagtgtgattgatgatatgcagtccaggataaggaagcttgagagatggaatacgataaacatggttttgtggactatattattgtctgctcttgttggatattccctataccagaaaaaacgtcactaggttctctggcagttttactgatagggtaggacgcatacctcattcatggcgtctgcagaactgacttgcacgcttcaggcacaaagttgtaagtgctagagaaaatgaaaagcagcatgtagatacaagatctaagacgtgagagatggcctgcgctcatgccatccctgatggcagtcttatttgtttgatcactcaatgtctgtaataatcttctcgtatgagatccatcaaaaaaatttgtgcagttaatgtgtatgaagcactaacgttgataatcttctcatatggtccatgggcgtttatgtattgtcatcaccacttaagtattctcatctccattaggccttgttagacactcgtatttgtctcgatccatgtgtattgaggtggattggaatgtaacttaaattaaattacatctcaatccatgacaatacacgtggattgaggtgtccaagtattcttcacgtggattgtttaatttatactctaattcactttagccacgtggattgagatgaatactaagtatccaaacaaagcactaaatatccaaacaaagccttaatagagtgataatcttctcgtctttataaggtcaagagataatcatgatccataagaacattaataggcatttagggttaaaggctattcgagagtttatacatatgagggggttg

SEQ ID NO: 14243 - DNA, 3183 bp, Zea Mays
ttgattagtgcccttacagtcatgtctattgagcaggatcttgtgaagggtaaagatacaatggtgccactagttgattttcaagagaagaaacgcaccggatggagggaactgagaatttcttcatctggagtggtgattgtcgatggtgcgtatgctctgcattcaacactacgatcattgcttgatatccgagttgctgtggttggcggcgttcattttagcctgctttctaaagttcagcatgatattggagattcttgctcattggactatctaatcgacagtatatttccattgtttagaaagcatattgagccagacctgcatcatgcccaaattaggattgataacagctttgtctgctcatttcgagaaccgtactacaagctgaagtgcaaaaatgagatggcaagaagttatattcttttgaacaaaataaagtggaaactgagaactttattgagatgtaccttaggccgccttttgcttctgaagaaatgaagattgatgattggattaaggttaggcaatgtggaataagatactatctatctctcggagaccaaaggattgttgacaagtacttcataatccgtccaaaagctgagtttgaggttggacgaacaactcttggaggattgttggccttggggtacaatgttgttgttagctttaagcgtacatgcacatctgtcaatatagatcaattactgatagctgcagagaccattgacactctaaatgagacctttttggtattaaaaggtccaagcagaaagcagaggcttcaaagcttggtataaagggaccatggatcacaaaatcatacttagaaatgatcttggagagcaaaggggttccacgacttaatacaccaccaccggtatcaagcaaactgctaactgaaagtcaagaaaagaaaattgctgcacctaaacctattcgtgtttctgctgaaaacattacaaatcttgatgacttgatgcaaccgtggacgagatccccgcccaagaagttggaacaagaacacgtattggcaaaatggcagtttatctcagattcttcttcaagaagtaacatccagctggctcctctgccagattcttatgacctggataggggccttctcctatcagttcaagcaattcaggcattgttggagaacagaggataccctatcattgttgggattggtggtcctagtggatcgggaaagacaagtttagctcagaagatggcaaatataattggctgtgaagttgtaagcttggaaagttattacaagcctgaacaagtgagagattataagtatgatgattatagctcattggatattgctttgctcactgagaacattatggacataaaaaagaggcataaagcggaagttccttgcttcgactttgaaaattttagccgaaaggggttcaaggagcttcaagtatccgaggaaagtggagtggtcatctttgaaggtgtgtacactttacatcctgctataaggaaatttctggatttgtggattgcagttgttggtggagttcattcacaccttattgcaagaatacagagagacaagaatcgtgctggcttttctatttctcagactgaaatcatgaccactgtgtttccactgtttcagcaatacattgaaccacatcttgtccatgctcatcttaagattcaaaacgattttgatcctgtgctctctcctgaaagctcactttttgtgttaaaaagtaaaaaacaggtatcctgccaagatatactgaaggtactagatgctagtaaagtctgcagttctgtccagaactttactgatgtgtacttacggcttcctggcataccatcaaatgcccagctgaccgaaggtgagtgtatccgggtcagaatttgtgaaggaagatttgcattgttgatacgagagcctataagggaaggaaattttattatccagccaaaggttgattttgatattagtgccagtactgttgcagggcttcttaagcttggttaccaagctgttgcatatattgaagcttctgcggtgatttaccaagatggaaagattttaatagaagttgaccatctacaaggagtgtcgactccatatcttcaaattaaagggacaaataaagaaattgttacctctgctggttctgcactctgcttggatggttcatacacaacaaagagttatcttcaaattattttggagagcttaccagctgatggtaatgtatctattggtattcacaatcaacaagctgcaaggctgcaggaactggttgagttcatccagtcacagggagggagctttaattcagatttatcgtcaccaatacgagaaacttcctctacagatagtgtgattgatgatatgcagtccaggataaggaagcttgagagatggaatacgataaacatggttttgtggactatattattgtctgctcttgttggatattccctataccagaaaaaacgtcactaggttctctggcagttttactgatagggtaggacgcatacctcattcatggcgtctgcagaactgacttgcacgcttcaggcacaaagttgtaagtgctagagaaaatgaaaagcagcatgtagatacaagatctaagacgtgagagatggcctgcgctcatgccatccctgatggcagtcttatttgtttgatcactcaatgtctgtaataatcttctcgtatgagatccatcaaaaaaatttgtgcagttaatgtgtatgaagcactaacgttgataatcttctcatatggtccatgggcgtttatgtattgtcatcaccacttaagtattctcatctccattaggccttgttagacactcgtatttgtctcgatccatgtgtattgaggtggattggaatgtaacttaaattaaattacatctcaatccatgacaatacacgtggattgaggtgtccaagtattcttcacgtggattgtttaatttatactctaattcactttagccacgtggattgagatgaatactaagtatccaaacaaagcactaaatatccaaacaaagccttaatagagtgataatcttctcgtctttataaggtcaagagataatcatgatccataagaacattaataggcatttagggttaaaggctattcgagagtttatacatatgagggggttg

SEQ ID NO: 14244 - DNA, 1936 bp, Zea Mays
ctcagagagatcatgactgggaatatcaagagcatctaaatcaatgattctatctctgcccacatttgtaccaatcaggttgaagaagaaatgatccactgctgcagccttctcatcatgcctagttaaggtcatctttgaaggtgtgtacactttacatcctgctataaggaaatttctggatttgtggattgcagttgttggtggagttcattcacaccttattgcaagaatacagagagacaagaatcgtgctggcttttctatttctcagactgaaatcatgaccactgtgtttccactgtttcagcaatacattgaaccacatcttgtccatgctcatgttgcttaagattcaaaacgattttgatcctgtgctctctcctgaaagctcactttttgtgttaaaaagtaaaaaacaggtatcctgccaagatatactgaaggtactagatgctagtaaagtctgcagttctgtccagaactttactgatgtgtacttacggcttcctggcataccatcaaatgcccagctgaccgaaggtgagtgtatccgggtcagaatttgtgaaggaagatttgcattgttgatacgagaggtatgcacgcttattttgttttcattatgcttctttcattctttgacatgaatctataacacattgccctttctcttcccttcaatattttgctagcctataagggaaggaaattttattatccagccaaaggttgattttgatattagtgccagtactgttgcagggcttcttaagcttggttaccaagctgttgcatatattgaagcttctgcggtgatttaccaagatggaaagattttaatagaagttgaccatctacaaggagtgtcgactccatatcttcaaattaaagggacaaataaagaaattgttacctctgctggttctgcactctgcttggatggttcatacacaacaaagagttatcttcaaattattttggagagcttaccagctgatggtaatgtatctattggtattcacaatcaacaagctgcaaggctgcaggaactggttgagttcatccagtcacagggagggagctttaattcagatttatcgtcaccaatacgagaaacttcctctacagatagtgtgattgatgatatgcagtccaggataaggaagcttgagagatggaatacgataaacatggttttgtggactatattattgtctgctcttgttggatattccctataccagaaaaaacgtcactagttttactgatagggtaggacgcatacctcattcatggcgtctgcagaactgacttgcacgcttcaggcacaaagttgtaagtgctagagaaaatgaaaagcagcatgtagatacaagatctaagacgtgagagatggcctgcgctcatgccatccctgatggcagtcttatttgtttgatcactcaatgtctgtaataatcttctcgtatgagatccatcaaaaaaatttgtgcagttaatgtgtatgaagcactaacgttgataatcttctcatatggtccatgggcgtttatgtattgtcatcaccacttaagtattctcatctccattaggccttgttagacactcgtatttgtctcgatccatgtgtattgaggtggattggaatgtaacttaaattaaattacatctcaatccatgacaatacacgtggattgaggtgtccaagtattcttcacgtggattgtttaatttatactctaattcactttagccacgtggattgagatgaatactaagtatccaaacaaagcactaaatatccaaacaaagccttaatagagtgataatcttctcgtctttataaggtcaagagataatcatgatccataagaacattaataggcatttagggttaaaggctattcgagagtttatacatatgagggggttg

SEQ ID NO: 14245 - DNA, 1732 bp, Zea Mays
cagccttctcatcatgcctagttaaggtcatctttgaaggtgtgtacactttacatcctgctataaggaaatttctggatttgtggattgcagttgttggtggagttcattcacaccttattgcaagaatacagagagacaagaatcgtgctggcttttctatttctcagactgaaatcatgaccactgtgtttccactgtttcagcaatacattgaaccacatcttgtccatgctcatcttaagattcaaaacgattttgatcctgtgctctctcctgaaagctcactttttgtgttaaaaagtaaaaaacaggtatcctgccaagatatactgaaggtactagatgctagtaaagtctgcagttctgtccagaactttactgatgtgtacttacggcttcctggcataccatcaaatgcccagctgaccgaaggtgagtgtatccgggtcagaatttgtgaaggaagatttgcattgttgatacgagagcctataagggaaggaaattttattatccagccaaaggttgattttgatattagtgccagtactgttgcagggcttcttaagcttggttaccaagctgttgcatatattgaagcttctgcggtgatttaccaagatggaaagattttaatagaagttgaccatctacaaggagtgtcgactccatatcttcaaattaaagggacaaataaagaaattgttacctctgctggttctgcactctgcttggatggttcatacacaacaaagagttatcttcaaattattttggagagcttaccagctgatggtaatgtatctattggtattcacaatcaacaagctgcaaggctgcaggaactggttgagttcatccagtcacagggagggagctttaattcagatttatcgtcaccaatacgagaaacttcctctacagatagtgtgattgatgatatgcagtccaggataaggaagcttgagagatggaatacgataaacatggttttgtggactatattattgtctgctcttgttggatattccctataccagaaaaaacgtcactagttttactgatagggtaggacgcatacctcattcatggcgtctgcagaactgacttgcacgcttcaggcacaaagttgtaagtgctagagaaaatgaaaagcagcatgtagatacaagatctaagacgtgagagatggcctgcgctcatgccatccctgatggcagtcttatttgtttgatcactcaatgtctgtaataatcttctcgtatgagatccatcaaaaaaatttgtgcagttaatgtgtatgaagcactaacgttgataatcttctcatatggtccatgggcgtttatgtattgtcatcaccacttaagtattctcatctccattaggccttgttagacactcgtatttgtctcgatccatgtgtattgaggtggattggaatgtaacttaaattaaattacatctcaatccatgacaatacacgtggattgaggtgtccaagtattcttcacgtggattgtttaatttatactctaattcactttagccacgtggattgagatgaatactaagtatccaaacaaagcactaaatatccaaacaaagccttaatagagtgataatcttctcgtctttataaggtcaagagataatcatgatccataagaacattaataggcatttagggttaaaggctattcgagagtttatacatatgagggggttg

SEQ ID NO: 14246 - DNA, 1455 bp, Zea Mays
gcgccaaacaatcaaaccgggacttccttgtcacagtccatgtcgtagctattatgacatgggaatgggatggatgctgaaactttgctagctagctagctgaaaggctccggccgggcctggctggtacacacgcccagatccttgttgtgcacgtacgttccaaacttgctcatactactcagagcgcggcgacatgttcggctttctgaaacaacggaggcagaccccgtcagggttctcgtcgtcgtcagccgccgaggaggtcaccgccggcatcgatggctccggcctcgtcgcgatcgtcacgggcgcgtctagtgggatcggtgccgagacctgccgagttctggcgctgcggggcgttcgcgttgtgatgggcgtgaggacaccgtctgccggtgagcgcgtcaaggaagagatcgtgaagaacgtccccgctgccgattctccctacaaccagattctccccacagccagattctcagaaaagctggtcagaaaaaagctgaaccaaacagacacgttagcagcatgtcatccgtcaagagattcgctgacaacttcaacggactaaatctcccactcaacattctcatgccattttctactcactaatcttttacttgaaaagatgaaaatcacggccatggagagtggaatagaaggtagggttgtgattgttgcttctgacagctacaagcacacgtatcgagagggaattcgttttgataaactcaatgatgcatcaggctataaaggcatcctggcttatggccaatcgaagctggccaatatattgcgttccaatgaactttcttgccgcttgaaggaagaagatgcaaaagtagtagtcaactcactgcatccgggagttgttgccaccaacatcacgcgccatctgggtatcataaaagatattctttctccaattgctaaacttgtactaaggggtgttgaacaaggtgcagccaccgtttgttatctggcattgcatcctcaggttgctggagtcaccggcaaatactttgtggatttcaatgctgttgaactaaaaccgcctgcaactgacaaggagttgtccaaaaagctctgggattttagtgtcagcctactccagtgatataactgccgattagttctcctacgccagctggtaaataaaggtcgatctgaatgagagatcatgtttcagtaatagaacaaggtgatccagcagtgtaatatctactactacttattgtttgactagatatggatgccatatgtttgtaatttgaataaattgattggatacatttctgcacttgtttgaattgtggcaatgtcggacatgtctaaagatgtgatactattgagtgttgagatgcacatttttttttaaatcctttgtccataaaatttccgtttatgtgctgaaaacagttgtgtgttgtcttcttcatagttcataac

SEQ ID NO: 14247 - DNA, 1382 bp, Zea Mays
gcgccaaacaatcaaaccgggacttccttgtcacagtccatgtcgtagctattatgacatgggaatgggatggatgctgaaactttgctagctagctagctgaaaggctccggccgggcctggctggtacacacgcccagatccttgttgtgcacgtacgttccaaacttgctcatactactcagagcgcggcgacatgttcggctttctgaaacaacggaggcagaccccgtcagggttctcgtcgtcgtcagccgccgaggaggtcaccgccggcatcgatggctccggcctcgtcgcgatcgtcacgggcgcgtctagtgggatcggtgccgagacctgccgagttctggcgctgcggggcgttcgcgttgtgatgggcgtgaggacaccgtctgccggtgagcgcgtcaaggaagagatcgtgaagaacgtccccgctgccgtaataatgcaggaatcgcattttctcctttcaccctttcggatgatggaattgagttacaatttgcaacaaattaccttggccattttctactcactaatcttttacttgaaaagatgaaaatcacggccatggagagtggaatagaaggtagggttgtgattgttgcttctgacagctacaagcacacgtatcgagagggaattcgttttgataaactcaatgatgcatcaggctataaaggcatcctggcttatggccaatcgaagctggccaatatattgcgttccaatgaactttcttgccgcttgaaggaagaagatgcaaaagtagtagtcaactcactgcatccgggagttgttgccaccaacatcacgcgccatctgggtatcataaaagatattctttctccaattgctaaacttgtactaaggggtgttgaacaaggtgcagccaccgtttgttatctggcattgcatcctcaggttgctggagtcaccggcaaatactttgtggatttcaatgctgttgaactaaaaccgcctgcaactgacaaggagttgtccaaaaagctctgggattttagtgtcagcctactccagtgatataactgccgattagttctcctacgccagctggtaaataaaggtcgatctgaatgagagatcatgtttcagtaatagaacaaggtgatccagcagtgtaatatctactactacttattgtttgactagatatggatgccatatgtttgtaatttgaataaattgattggatacatttctgcacttgtttgaattgtggcaatgtcggacatgtctaaagatgtgatactattgagtgttgagatgcacatttttttttaaatcctttgtccataaaatttccgtttatgtgctgaaaacagttgtgtgttgtcttcttcatagttcataac

SEQ ID NO: 14248 - DNA, 1796 bp, Zea Mays
gcgccaaacaatcaaaccgggacttccttgtcacagtccatgtcgtagctattatgacatgggaatgggatggatgctgaaactttgctagctagctagctgaaaggctccggccgggcctggctggtacacacgcccagatccttgttgtgcacgtacgttccaaacttgctcatactactcagagcgcggcgacatgttcggctttctgaaacaacggaggcagaccccgtcagggttctcgtcgtcgtcagccgccgaggaggtcaccgccggcatcgatggctccggcctcgtcgcgatcgtcacgggcgcgtctagtgggatcggtgccgagacctgccgagttctggcgctgcggggcgttcgcgttgtgatgggcgtgaggacaccgtctgccggtgagcgcgtcaaggaagagatcgtgaagaacgtccccgctgccggtatcgacgtcctccaacttgatgttgggcctgtttgtttcggcttctggcagcttctggccaccaaaagctgatgcggactgccaaacgctcagcttttcagccagcttctataaaattcgttggggcaaaaaccatccaaaatcaacataaacacataatcggttgagtcgttgtaatagtagaaatccgtcactttctagatcctgagccctataaacaaatttatcttcctccacacgtaatcgtaatgatactcagattctccctacaaccagattctccccacagccagattctcagaaaagctggtcagaaaaaagctgaaccaaacagacacgttagcagcatgtcatccgtcaagagattcgctgacaacttcaacggactaaatctcccactcaacattctcattaataatgcaggaatcgcattttctcctttcaccctttcggatgatggaattgagttacaatttgcaacaaattaccttggccattttctactcactaatcttttacttgaaaagatgaaaatcacggccatggagagtggaatagaaggtagggttgtgattgttgcttctgacagctacaagcacacgtatcgagagggaattcgttttgataaactcaatgatgcatcaggctataaaggcatcctggcttatggccaatcgaagctggccaatatattgcgttccaatgaactttcttgccgcttgaaggaagaagatgcaaaagtagtagtcaactcactgcatccgggagttgttgccaccaacatcacgcgccatctgggtatcataaaagatattctttctccaattgctaaacttgtactaaggggtgttgaacaaggtgcagccaccgtttgttatctggcattgcatcctcaggttgctggagtcaccggcaaatactttgtggatttcaatgctgttgaactaaaaccgcctgcaactgacaaggagttgtccaaaaagctctgggattttagtgtcagcctactccagtgatataactgccgattagttctcctacgccagctggtaaataaaggtcgatctgaatgagagatcatgtttcagtaatagaacaaggtgatccagcagtgtaatatctactactacttattgtttgactagatatggatgccatatgtttgtaatttgaataaattgattggatacatttctgcacttgtttgaattgtggcaatgtcggacatgtctaaagatgtgatactattgagtgttgagatgcacatttttttttaaatcctttgtccataaaatttccgtttatgtgctgaaaacagttgtgtgttgtcttcttcatagttcataac

SEQ ID NO: 14249 - DNA, 1518 bp, Zea Mays
gcgccaaacaatcaaaccgggacttccttgtcacagtccatgtcgtagctattatgacatgggaatgggatggatgctgaaactttgctagctagctagctgaaaggctccggccgggcctggctggtacacacgcccagatccttgttgtgcacgtacgttccaaacttgctcatactactcagagcgcggcgacatgttcggctttctgaaacaacggaggcagaccccgtcagggttctcgtcgtcgtcagccgccgaggaggtcaccgccggcatcgatggctccggcctcgtcgcgatcgtcacgggcgcgtctagtgggatcggtgccgagacctgccgagttctggcgctgcggggcgttcgcgttgtgatgggcgtgaggacaccgtctgccggtgagcgcgtcaaggaagagatcgtgaagaacgtccccgctgccgattctccccacagccagattctcagaaaagctggtcagaaaaaagctgaaccaaacagacacgttagcagcatgtcatccgtcaagagattcgctgacaacttcaacggactaaatctcccactcaacattctcattaataatgcaggaatcgcattttctcctttcaccctttcggatgatggaattgagttacaatttgcaacaaattaccttggccattttctactcactaatcttttacttgaaaagatgaaaatcacggccatggagagtggaatagaaggtagggttgtgattgttgcttctgacagctacaagcacacgtatcgagagggaattcgttttgataaactcaatgatgcatcaggctataaaggcatcctggcttatggccaatcgaagctggccaatatattgcgttccaatgaactttcttgccgcttgaaggaagaagatgcaaaagtagtagtcaactcactgcatccgggagttgttgccaccaacatcacgcgccatctgggtatcataaaagatattctttctccaattgctaaacttgtactaaggggtgttgaacaaggtgcagccaccgtttgttatctggcattgcatcctcaggttgctggagtcaccggcaaatactttgtggatttcaatgctgttgaactaaaaccgcctgcaactgacaaggagttgtccaaaaagctctgggattttagtgtcagcctactccagtgatataactgccgattagttctcctacgccagctggtaaataaaggtcgatctgaatgagagatcatgtttcagtaatagaacaaggtgatccagcagtgtaatatctactactacttattgtttgactagatatggatgccatatgtttgtaatttgaataaattgattggatacatttctgcacttgtttgaattgtggcaatgtcggacatgtctaaagatgtgatactattgagtgttgagatgcacatttttttttaaatcctttgtccataaaatttccgtttatgtgctgaaaacagttgtgtgttgtcttcttcatagttcataac

SEQ ID NO: 14250 - DNA, 1302 bp, Zea Mays
gcgccaaacaatcaaaccgggacttccttgtcacagtccatgtcgtagctattatgacatgggaatgggatggatgctgaaactttgctagctagctagctgaaaggctccggccgggcctggctggtacacacgcccagatccttgttgtgcacgtacgttccaaacttgctcatactactcagagcgcggcgacatgttcggctttctgaaacaacggaggcagaccccgtcagggttctcgtcgtcgtcagccgccgaggaggtcaccgccggcatcgatggctccggcctcgtcgcgatcgtcacgggcgcgtctagtgggatcggtgccgagacctgccgagttctggcgctgcggggcgttcgcgttgtgatgggcgtgaggacaccgtctgccggtgagcgcgtcaaggaagagatcgtgaagaacgtccccgctgccggccattttctactcactaatcttttacttgaaaagatgaaaatcacggccatggagagtggaatagaaggtagggttgtgattgttgcttctgacagctacaagcacacgtatcgagagggaattcgttttgataaactcaatgatgcatcaggctataaaggcatcctggcttatggccaatcgaagctggccaatatattgcgttccaatgaactttcttgccgcttgaaggaagaagatgcaaaagtagtagtcaactcactgcatccgggagttgttgccaccaacatcacgcgccatctgggtatcataaaagatattctttctccaattgctaaacttgtactaaggggtgttgaacaaggtgcagccaccgtttgttatctggcattgcatcctcaggttgctggagtcaccggcaaatactttgtggatttcaatgctgttgaactaaaaccgcctgcaactgacaaggagttgtccaaaaagctctgggattttagtgtcagcctactccagtgatataactgccgattagttctcctacgccagctggtaaataaaggtcgatctgaatgagagatcatgtttcagtaatagaacaaggtgatccagcagtgtaatatctactactacttattgtttgactagatatggatgccatatgtttgtaatttgaataaattgattggatacatttctgcacttgtttgaattgtggcaatgtcggacatgtctaaagatgtgatactattgagtgttgagatgcacatttttttttaaatcctttgtccataaaatttccgtttatgtgctgaaaacagttgtgtgttgtcttcttcatagttcataac

SEQ ID NO: 14251 - DNA, 616 bp, Zea Mays
aaaaatggagttgtcaaattagccctaaaagatatagtcatgtttttaagcaggctatgcgttctttctccgagaaagatattctttctccaattgctaaacttgtactaaggggtgttgaacaaggtgcagccaccgtttgttatctggcattgcatcctcaggttgctggagtcaccggcaaatactttgtggatttcaatgctgttgaactaaaaccgcctgcaactgacaaggagttgtccaaaaagctctgggattttagtgtcagcctactccagtgatataactgccgattagttctcctacgccagctggtaaataaaggtcgatctgaatgagagatcatgtttcagtaatagaacaaggtgatccagcagtgtaatatctactactacttattgtttgactagatatggatgccatatgtttgtaatttgaataaattgattggatacatttctgcacttgtttgaattgtggcaatgtcggacatgtctaaagatgtgatactattgagtgttgagatgcacatttttttttaaatcctttgtccataaaatttccgtttatgtgctgaaaacagttgtgtgttgtcttcttcatagttcataac

SEQ ID NO: 14252 - DNA, 87 bp, Zea Mays
aacagtattcatgtaagcatagtacttcaaaatgttttctgtgtgtaacaagacagcatcttgttcattcttgatataggcatatag

SEQ ID NO: 14253 - DNA, 1496 bp, Zea Mays
cccacgacgtcgcatggaaggtttccacgacgccgatccgcccccacccaccgcccgtcatggaaggttgccgcggatcccccaccctcctccccctctgctccatgattacggggatccgaggctgccatcaacgcgcaccagctccccggagaagtagcctgtcatcccacgcgctcggccgcctggagttacggtgcggtaggccgccgctcacgcactcggccgctgggaggcggcgtgcgtgcgggagtgggcctgcattggattctccgagcagatgcttcgcagtgtcgtgcttcctcttggcggctttcggcgcctacacgagatgtacatccgtccagtccagcaacgtgctgctggagcgccgcgcgggcagcaaaggctgcagttgccggtgaggatgggccgggatcaggtccaagtctcactatctctgctcttgacctcattctttctgaagatgtagaatactccaactcctcctaaggacaaggataaagatggagataataatggaggtggccagtgtgggtgatcactgatcaagtttgtgaaaaataggagcttacctcccatgcagcatcaccacaagctgcttatgttatgtaggtgattagattgtggttctttactgtatttgtgacagtaaagaggtgatcaagtcatttggattggtgggcagagaagactattcagataggtgcagattatgtaggtgattagattgtggttcttcactgtatttgtggcagtaaagaggtgatcaagtcatttggattggtgggcagagaagactattcagataggtgcggatgtactgatcgggaggcaaataaggtgagcgagattgtgtggaattgattgcaatagcgtattggatgactaccaagtctgtgtgttgtacctaaattacacacgaaatgagttcatctgtaaagtttccatgccatatatgtgaatatgcgaggtgccaagagagatgcagcatgctctttgtgctgttgtgccatgggaataagggtgagcctcttagggctttagcatgctctttgtgccatgggattcttcgttttaacttaaaacatagaacacatgatttttctagattgtatagaaatagcaaagtttcataaaagatgtgatgcgatgtgtttgttgtgtgcatattagtcttagtttcttccagttgcttttgcaagcttaaatttttatcctgtgtttcttcattcgcttgctggataactgaaatttggttctgttgctattccaagtcactctgaagattcttgatttgagcctcagattcttgtaactaagtcagtgcttagattgtggttcttcactgtatgtgtttttttattatttagtttattatattgtttttacaaaatcgcattgttgcatacatctattttttatttagcatattatattgttggatgcagttgtgccaatacaaaactaaatttaattttttgtgtcagtaaatt

SEQ ID NO: 14254 - DNA, 202 bp, Zea Mays
attattcagtaaatttgtttcacaactgtatatgttgagacacctaagtaacttaacacacaagcaaatacaacgcagtcaactttagatttacatcaattattcatttataaaacagaactataagccacgtgtaagatgtatgaagcacaaacatacaatgaatagcataccagccctagtaaattgccaacaatgattg

SEQ ID NO: 14255 - DNA, 3360 bp, Zea Mays
tcccgaatcgatatatagccgaacacgaaccggcagtcctcaaatacagttgctgcaccgcaaccccgcgccaaagccagcgcggccaaacgacgtgacgaccaaacgaagcaaccaggcgccgaaaaggatagccgaagtgcgaaacccaacagcaaggagaaggcgaggggaaaaaagaaagaaaaggcgcatcgaaaaggcaaagagcgagctccctctacccgcgatccccgcacaccggccgccggcgttcgtcgccgccgcggatgagatgcgctccccctccggcggcggcagcgtggtggcccgcgcacgttcgtgaggggccctccgccacgcgcccaggttactgtggctccgagtccgagttcgctccccgcgcccgcgctatcgccgcggggcggagcggatcccccaacatgtggcttttctggcgcactaggaatcgcttctcccttgaggagctccgatcagctacaaaaggttcatgttgtcaatgaagctaataaggaatttgtgattgaagcattgcgatcaattgcggaacttatgatatacggtgaccagcatgatgctttgttttttgaatattttatggagaaacagatcatgggtgagtttgctcgtgttctaaggatctcaaagctgtcaagagtgtcactccaattgctacagacaatgagtatcatgatccaaaatctgagaaatgaacattcaatttattacatttttagcaatgagcacatcaacttcttggttacgtacccattcgattttcgaattgatgagatgttatcgtactacatatcttttctgcgggcgataagtgggaagttgaacaagaatacaatttctttgctcgtgaagacgaaaaatgatgaggtcacttcctttcctctttatgttgaggccttaaagtttgcttttcacgaggatagcatgattcgagttgctatacgtaccttgacactcaatgtctatcacgttggagatgaatctgttaacagatttgtttcccgcacgcctttatcagattatttttcagacatggttcagcattttcagaagcagtgcattgacttggataagttggttgcacgctcctcacgaaagggaaattcttctgtgccaatatcttctattgaagatgcaattgtgcaaattgaagacacactgtattatttcagtgatgttatgtcttctggtattcctgatcttgaaaggttcatcactgaaaatatcttgcgagttctggtatttcgattcttactcccgtcactgcagaggcagagcacagatttggacttaagtgtcactacatccatgtatctactttgttgtatactacacatttttaagaataaggatatggcaagtactgtagctgctgccctttttcatcaacctgatggccctgatgataggaagcaaaggacacctaatggatatacatctgagcatgatagttgcaaatctgagaatcattgcaccactgcctctggtatcgagcaatcaagtgaggagccaaattctttgtcttctgttagttggaaacacttgcccaacaattcatcgcgaagtgattgctgccaaggaaacacaccaagggaacacttgctgtcctatatcacagaaggagatgattcacaagctttgggttcattgtgcttattcgctacattattgcagacgaaagaacttgatgaatcaatgctggatgcccttggaatcctccctcaaagaaagcagcataagaaacttctattacaagctttagtaggtgaagaccttgctgaaacacaattattttcgtcaagcagcagtctaactgatgacagcatttgtagtgattttgatatttatgtaaggaagcttcaggataaatatgggctacaatgtcaccatccacggcaaatgacttccaaagctcacagatatcaggtcaaaggtttctgcagatgttcgtttggttggtggctggcttttccggcaactgctgccccatggagaggaagagttcactgcttttcatctaagacgactaaaggattcacacaaggattgtagctcaaagctttctgaggaatctggaggatgctggtgtgacatgcttcttcctattgttaaagaagcttggaggaactgcaagaaagcaattgaggcatcttcgccaccaaaaggatccaaatctattattgtacccatggatttgtgttcatttgaaggtgattcttctgttgccatcgcagaggcactctatgagatggttaagggttttgtgctgcagcatcaagttatactcttctgtcttggagaaactttcacagagctacctcctatttaccctctggttgatttgcctataaatactagggcaagcgctgcagattttggtggttcagttcctaaacctgggcttgaagtcaacttagtcgacgctgttccttgtcgaatagcatttgagaggggcaaagaacggcacttctgctttttagccatagctcatggaacttctggttggattcttcttctagaagaattacctctaaaacgggaacgaggaattgtccgtgtcatggcacctttggcaggatctgatccaagaatagatacaaagcatgggaagtggttacatctacgcattcgcccttcttcggtcccttttttggacactgagaagcataaagcgaagacaaagaagtatcttgttgatgggagatggacccttgcttttagggacgagcagtcctgtaaggttgcagagagtatggttattgaagagatgaaactccaacgaggtgctgttgcagagcaattgaagccattggttgaatttgacatgcctgaggatggaatgcagcacccccagacttcacatgaaaccccttctgatgatggatcatgactaaattttcatcaagtgcagtgttgagcttctcaattaaggagacatggcaacagatggccgcaaaagtgccgcattgaacatttcaagcatgctggcaggaaaacccaccatggcaagtcatcgacaattctgtacattacattgggagattagagatgtctccttgttaacacacaactgtagagtttcgggccgtcctgagttgaactagctggataggattctttgtacaatagtttgtttctctccttgcccgttgtaaccttatatatcacatcaaaacccattctttgttaagtttcagggcacagttgtgttgtgcacacgaaatgtttaaagaaatttgcagttagtcatacctgttgtcaaagcaagccttgcctatgtggtaataaaatgtcagatcgataatttttcttggaaatatgaatgttcatggactgttggtt

SEQ ID NO: 14256 - DNA, 3459 bp, Zea Mays
tcccgaatcgatatatagccgaacacgaaccggcagtcctcaaatacagttgctgcaccgcaaccccgcgccaaagccagcgcggccaaacgacgtgacgaccaaacgaagcaaccaggcgccgaaaaggatagccgaagtgcgaaacccaacagcaaggagaaggcgaggggaaaaaagaaagaaaaggcgcatcgaaaaggcaaagagcgagctccctctacccgcgatccccgcacaccggccgccggcgttcgtcgccgccgcggatgagatgcgctccccctccggcggcggcagcgtggtggcccgcgcacgttcgtgaggggccctccgccacgcgcccaggttactgtggctccgagtccgagttcgctccccgcgcccgcgctatcgccgcggggcggagcggatcccccaacatgtggcttttctggcgcactaggaatcgcttctcccttgaggagctccggtatctaacagatcagctacaaaaggttcatgttgtcaatgaagctaataaggaatttgtgattgaagcattgcgatcaattgcggaacttatgatatacggtgaccagcatgatgctttgttttttgaatattttatggagaaacagatcatgggtgagtttgctcgtgttctaaggatctcaaagctgtcaagagtgtcactccaattgctacagacaatgagtatcatgatccaaaatctgagaaatgaacattcaatttattacatttttagcaatgagcacatcaacttcttggttacgtacccattcgattttcgaattgatgagatgttatcgtactacatatcttttctgcgggcgataagtgggaagttgaacaagaatacaatttctttgctcgtgaagacgaaaaatgatgaggtcacttcctttcctctttatgttgaggccttaaagtttgcttttcacgaggatagcatgattcgagttgctatacgtaccttgacactcaatgtctatcacgttggagatgaatctgttaacagatttgtttcccgcacgcctttatcagattatttttcagacatggttcagcattttcagaagcagtgcattgacttggataagttggttgcacgctcctcacgaaagggaaattcttctgtgccaatatcttctattgaagatgcaattgtgcaaattgaagacacactgtattatttcagtgatgttatgtcttctggtattcctgatcttgaaaggttcatcactgaaaatatcttgcgagttctggtatttcgattcttactcccgtcactgcagaggcagagcacagatttggacttaagtgtcactacatccatgtatctactttgttgtatactacacatttttaagaataaggatatggcaagtactgtagctgctgccctttttcatcaacctgatggccctgatgataggaagcaaaggacacctaatggatatacatctgagcatgatagttgcaaatctgagaatcattgcaccactgcctctggtatcgagcaatcaagtgaggagccaaattctttgtcttctgttagttggaaacacttgcccaacaattcatcgcgaagtgattgctgccaaggaaacacaccaagggaacacttgctgtcctatatcacagaaggagatgattcacaagctttgggttcattgtgcttattcgctacattattgcagacgaaagaacttgatgaatcaatgctggatgcccttggaatcctccctcaaagaaagcagcataagaaacttctattacaagctttagtaggtgaagaccttgctgaaacacaattattttcgtcaagcagcagtctaactgatgacagcatttgtagtgattttgatatttatgtaaggaagcttcaggataaatatgggctacaatgtcaccatccacggcaaatgacttccaaagctcacagatatcaggtgctcgatgctttagtcgaccttttctgcaggtcaaaggtttctgcagatgttcgtttggttggtggctggcttttccggcaactgctgccccatggagaggaagagttcactgcttttcatctaagacgactaaagcaaatgcaaggggagaactacgattctattcctatttattattaccaaatttcgctgattcacacaaggattgtagctcaaagctttctgaggaatctggaggatgctggtgtgacatgcttcttcctattgttaaagaagcttggaggaactgcaagaaagcaattgaggcatcttcgccaccaaaaggatccaaatctattattgtacccatggatttgtgttcatttgaaggtgattcttctgttgccatcgcagaggcactctatgagatggttaagggttttgtgctgcagcatcaagttatactcttctgtcttggagaaactttcacagagctacctcctatttaccctctggttgatttgcctataaatactagggcaagcgctgcagattttggtggttcagttcctaaacctgggcttgaagtcaacttagtcgacgctgttccttgtcgaatagcatttgagaggggcaaagaacggcacttctgctttttagccatagctcatggaacttctggttggattcttcttctagaagaattacctctaaaacgggaacgaggaattgtccgtgtcatggcacctttggcaggatctgatccaagaatagatacaaagcatgggaagtggttacatctacgcattcgcccttcttcggtcccttttttggacactgagaagcataaagcgaagacaaagaagtatcttgttgatgggagatggacccttgcttttagggacgagcagtcctgtaaggttgcagagagtatggttattgaagagatgaaactccaacgaggtgctgttgcagagcaattgaagccattggttgaatttgacatgcctgaggatggaatgcagcacccccagacttcacatgaaaccccttctgatgatggatcatgactaaattttcatcaagtgcagtgttgagcttctcaattaaggagacatggcaacagatggccgcaaaagtgccgcattgaacatttcaagcatgctggcaggaaaacccaccatggcaagtcatcgacaattctgtacattacattgggagattagagatgtctccttgttaacacacaactgtagagtttcgggccgtcctgagttgaactagctggataggattctttgtacaatagtttgtttctctccttgcccgttgtaaccttatatatcacatcaaaacccattctttgttaagtttcagggcacagttgtgttgtgcacacgaaatgtttaaagaaatttgcagttagtcatacctgttgtcaaagcaagccttgcctatgtggtaataaaatgtcagatcgataatttttcttggaaatatgaatgttcatggactgttggtt

SEQ ID NO: 14257 - DNA, 2953 bp, Zea Mays
gtcatgttgctgcaatcctaaggcatcaaggtatctaacagatcagctacaaaaggttcatgttgtcaatgaagctaataaggaatttgtgattgaagcattgcgatcaattgcggaacttatgatatacggtgaccagcatgatgctttgttttttgaatattttatggagaaacagatcatgggtgagtttgctcgtgttctaaggatctcaaagctgtcaagagtgtcactccaattgctacagacaatgagtatcatgatccaaaatctgagaaatgaacattcaatttattacatttttagcaatgagcacatcaacttcttggttacgtacccattcgattttcgaattgatgagatgttatcgtactacatatcttttctgcgggcgataagtgggaagttgaacaagaatacaatttctttgctcgtgaagacgaaaaatgatgaggtcacttcctttcctctttatgttgaggccttaaagtttgcttttcacgaggatagcatgattcgagttgctatacgtaccttgacactcaatgtctatcacgttggagatgaatctgttaacagatttgtttcccgcacgcctttatcagattatttttcagacatggttcagcattttcagaagcagtgcattgacttggataagttggttgcacgctcctcacgaaagggaaattcttctgtgccaatatcttctattgaagatgcaattgtgcaaattgaagacacactgtattatttcagtgatgttatgtcttctggtattcctgatcttgaaaggttcatcactgaaaatatcttgcgagttctggtatttcgattcttactcccgtcactgcagaggcagagcacagatttggacttaagtgtcactacatccatgtatctactttgttgtatactacacatttttaagaataaggatatggcaagtactgtagctgctgccctttttcatcaacctgatggccctgatgataggaagcaaaggacacctaatggatatacatctgagcatgatagttgcaaatctgagaatcattgcaccactgcctctggtatcgagcaatcaagtgaggagccaaattctttgtcttctgttagttggaaacacttgcccaacaattcatcgcgaagtgattgctgccaaggaaacacaccaagggaacacttgctgtcctatatcacagaaggagatgattcacaagctttgggttcattgtgcttattcgctacattattgcagacgaaagaacttgatgaatcaatgctggatgcccttggaatcctccctcaaagaaagcagcataagaaacttctattacaagctttagtaggtgaagaccttgctgaaacacaattattttcgtcaagcagcagtctaactgatgacagcatttgtagtgattttgatatttatgtaaggaagcttcaggataaatatgggctacaatgtcaccatccacggcaaatgacttccaaagctcacagatatcaggtgctcgatgctttagtcgaccttttctgcaggtcaaaggtttctgcagatgttcgtttggttggtggctggcttttccggcaactgctgccccatggagaggaagagttcactgcttttcatctaagacgactaaaggattcacacaaggattgtagctcaaagctttctgaggaatctggaggatgctggtgtgacatgcttcttcctattgttaaagaagcttggaggaactgcaagaaaggcatcttcgccaccaaaaggatccaaatctattattgtacccatggatttgtgttcatttgaaggtgattcttctgttgccatcgcagaggcactctatgagatggttaagggttttgtgctgcagcatcaagttatactcttctgtcttggagaaactttcacagagctacctcctatttaccctctggttgatttgcctataaatactagggcaagcgctgcagattttggtggttcagttcctaaacctgggcttgaagtcaacttagtcgacgctgttccttgtcgaatagcatttgagaggggcaaagaacggcacttctgctttttagccatagctcatggaacttctggttggattcttcttctagaagaattacctctaaaacgggaacgaggaattgtccgtgtcatggcacctttggcaggatctgatccaagaatagatacaaagcatgggaagtggttacatctacgcattcgcccttcttcggtcccttttttggacactgagaagcataaagcgaagacaaagaagtatcttgttgatgggagatggacccttgcttttagggacgagcagtcctgtaaggttgcagagagtatggttattgaagagatgaaactccaacgaggtgctgttgcagagcaattgaagccattggttgaatttgacatgcctgaggatggaatgcagcacccccagacttcacatgaaaccccttctgatgatggatcatgactaaattttcatcaagtgcagtgttgagcttctcaattaaggagacatggcaacagatggccgcaaaagtgccgcattgaacatttcaagcatgctggcaggaaaacccaccatggcaagtcatcgacaattctgtacattacattgggagattagagatgtctccttgttaacacacaactgtagagtttcgggccgtcctgagttgaactagctggataggattctttgtacaatagtttgtttctctccttgcccgttgtaaccttatatatcacatcaaaacccattctttgttaagtttcagggcacagttgtgttgtgcacacgaaatgtttaaagaaatttgcagttagtcatacctgttgtcaaagcaagccttgcctatgtggtaataaaatgtcagatcgataatttttcttggaaatatgaatgttcatggactgttggtt

SEQ ID NO: 14258 - DNA, 1523 bp, Zea Mays
aatctttcttgctttcattgggagcatctgcatgtactaaaaacctctaggcacgttaatgaagtatatcctaaggtgctcgatgctttagtcgaccttttctgcaggtcaaaggtttctgcagatgttcgtttggttggtggctggcttttccggcaactgctgccccatggagaggaagagttcactgcttttcatctaagacgactaaaggattcacacaaggattgtagctcaaagctttctgaggaatctggaggatgctggtgtgacatgcttcttcctattgttaaagaagcttggaggaactgcaagaaagcaattgaggcatcttcgccaccaaaaggatccaaatctattattgtacccatggatttgtgttcatttgaaggtgattcttctgttgccatcgcagaggcactctatgagatggttaagggttttgtgctgcagcatcaagttatactcttctgtcttggagaaactttcacagagctacctcctatttaccctctggttgatttgcctataaatactagggcaagcgctgcagattttggtggttcagttcctaaacctgggcttgaagtcaacttagtcgacgctgttccttgtcgaatagcatttgagaggggcaaagaacggcacttctgctttttagccatagctcatggaacttctggttggattcttcttctagaagaattacctctaaaacgggaacgaggaattgtccgtgtcatggcacctttggcaggatctgatccaagaatagatacaaagcatgggaagtggttacatctacgcattcgcccttcttcggtcccttttttggacactgagaagcataaagcgaagacaaagaagtatcttgttgatgggagatggacccttgcttttagggacgagcagtcctgtaaggttgcagagagtatggttattgaagagatgaaactccaacgaggtgctgttgcagagcaattgaagccattggttgaatttgacatgcctgaggatggaatgcagcacccccagacttcacatgaaaccccttctgatgatggatcatgactaaattttcatcaagtgcagtgttgagcttctcaattaaggagacatggcaacagatggccgcaaaagtgccgcattgaacatttcaagcatgctggcaggaaaacccaccatggcaagtcatcgacaattctgtacattacattgggagattagagatgtctccttgttaacacacaactgtagagtttcgggccgtcctgagttgaactagctggataggattctttgtacaatagtttgtttctctccttgcccgttgtaaccttatatatcacatcaaaacccattctttgttaagtttcagggcacagttgtgttgtgcacacgaaatgtttaaagaaatttgcagttagtcatacctgttgtcaaagcaagccttgcctatgtggtaataaaatgtcagatcgataatttttcttggaaatatgaatgttcatggactgttggtt

SEQ ID NO: 14259 - DNA, 1107 bp, Zea Mays
aaacctttcggggtcatgccatggttttgtgctgcagcatcaagttatactcttctgtcttggagaaactttcacagagctacctcctatttaccctctggttgatttgcctataaatactagggcaagcgctgcagattttggtggttcagttcctaaacctgggcttgaagtcaacttagtcgacgctgttccttgtcgaatagcatttgagaggggcaaagaacggcacttctgctttttagccatagctcatggaacttctggttggattcttcttctagaagaattacctctaaaacgggaacgaggaattgtccgtgtcatggcacctttggcaggatctgatccaagaatagatacaaagcatgggaagtggttacatctacgcattcgcccttcttcggtcccttttttggacactgagaagcataaagcgaagacaaagaagtatcttgttgatgggagatggacccttgcttttagggacgagcagtcctgtaaggttgcagagagtatggttattgaagagatgaaactccaacgaggtgctgttgcagagcaattgaagccattggttgaatttgacatgcctgaggatggaatgcagcacccccagacttcacatgaaaccccttctgatgatggatcatgactaaattttcatcaagtgcagtgttgagcttctcaattaaggagacatggcaacagatggccgcaaaagtgccgcattgaacatttcaagcatgctggcaggaaaacccaccatggcaagtcatcgacaattctgtacattacattgggagattagagatgtctccttgttaacacacaactgtagagtttcgggccgtcctgagttgaactagctggataggattctttgtacaatagtttgtttctctccttgcccgttgtaaccttatatatcacatcaaaacccattctttgttaagtttcagggcacagttgtgttgtgcacacgaaatgtttaaagaaatttgcagttagtcatacctgttgtcaaagcaagccttgcctatgtggtaataaaatgtcagatcgataatttttcttggaaatatgaatgttcatggactgttggtt

SEQ ID NO: 14260 - DNA, 1226 bp, Zea Mays
cacaatactgcccaaaatctagctccgtgcaggctgacctgcttccatgtggccatcacatagcagattagttgcccttgagtctgtccagagcgttgtgctcgctctttgtcctctatctaaaaccttgatctacgagagggttttgtgctgcagcatcaagttatactcttctgtcttggagaaactttcacagagctacctcctatttaccctctggttgatttgcctataaatactagggcaagcgctgcagattttggtggttcagttcctaaacctgggcttgaagtcaacttagtcgacgctgttccttgtcgaatagcatttgagaggggcaaagaacggcacttctgctttttagccatagctcatggaacttctggttggattcttcttctagaagaattacctctaaaacgggaacgaggaattgtccgtgtcatggcacctttggcaggatctgatccaagaatagatacaaagcatgggaagtggttacatctacgcattcgcccttcttcggtcccttttttggacactgagaagcataaagcgaagacaaagaagtatcttgttgatgggagatggacccttgcttttagggacgagcagtcctgtaaggttgcagagagtatggttattgaagagatgaaactccaacgaggtgctgttgcagagcaattgaagccattggttgaatttgacatgcctgaggatggaatgcagcacccccagacttcacatgaaaccccttctgatgatggatcatgactaaattttcatcaagtgcagtgttgagcttctcaattaaggagacatggcaacagatggccgcaaaagtgccgcattgaacatttcaagcatgctggcaggaaaacccaccatggcaagtcatcgacaattctgtacattacattgggagattagagatgtctccttgttaacacacaactgtagagtttcgggccgtcctgagttgaactagctggataggattctttgtacaatagtttgtttctctccttgcccgttgtaaccttatatatcacatcaaaacccattctttgttaagtttcagggcacagttgtgttgtgcacacgaaatgtttaaagaaatttgcagttagtcatacctgttgtcaaagcaagccttgcctatgtggtaataaaatgtcagatcgataatttttcttggaaatatgaatgttcatggactgttggtt

SEQ ID NO: 14261 - DNA, 1423 bp, Zea Mays
tgtgcacagatagcagacactggcacacagattgatcctggtagctccagagcacgtaagtctcatgtgaacgcatggcttggcagcagctgcgtttgcaaaacaaaagtatgtggcagcagtggtgtctacgtgggcgccctacgggcctctctagcctggttgtaggcttctagttgtagcagatatagcaaacatggcatgatggccactacacagcggcagtagctggatgctggtgcaatgatattggtggccatagatggttgtgtacatattgttgaatgcgcataggagttgggaggttgaggaagggaatgaccggagtgcaccagaatggttttgtgctgcagcatcaagttatactcttctgtcttggagaaactttcacagagctacctcctatttaccctctggttgatttgcctataaatactagggcaagcgctgcagattttggtggttcagttcctaaacctgggcttgaagtcaacttagtcgacgctgttccttgtcgaatagcatttgagaggggcaaagaacggcacttctgctttttagccatagctcatggaacttctggttggattcttcttctagaagaattacctctaaaacgggaacgaggaattgtccgtgtcatggcacctttggcaggatctgatccaagaatagatacaaagcatgggaagtggttacatctacgcattcgcccttcttcggtcccttttttggacactgagaagcataaagcgaagacaaagaagtatcttgttgatgggagatggacccttgcttttagggacgagcagtcctgtaaggttgcagagagtatggttattgaagagatgaaactccaacgaggtgctgttgcagagcaattgaagccattggttgaatttgacatgcctgaggatggaatgcagcacccccagacttcacatgaaaccccttctgatgatggatcatgactaaattttcatcaagtgcagtgttgagcttctcaattaaggagacatggcaacagatggccgcaaaagtgccgcattgaacatttcaagcatgctggcaggaaaacccaccatggcaagtcatcgacaattctgtacattacattgggagattagagatgtctccttgttaacacacaactgtagagtttcgggccgtcctgagttgaactagctggataggattctttgtacaatagtttgtttctctccttgcccgttgtaaccttatatatcacatcaaaacccattctttgttaagtttcagggcacagttgtgttgtgcacacgaaatgtttaaagaaatttgcagttagtcatacctgttgtcaaagcaagccttgcctatgtggtaataaaatgtcagatcgataatttttcttggaaatatgaatgttcatggactgttggtt

SEQ ID NO: 14262 - DNA, 114 bp, Zea Mays
tgccacctgtcacttctgttcccgagttcttggtcccaacacccaccacataatttttttctcgaaagcgcaggagagttgtgcatcattatattaagtagaaggaaaagaggg

SEQ ID NO: 14263 - DNA, 9292 bp, Zea Mays
cctggacaggcacgaggcaggagagcttcatcagcaccttttgataaaagaaggatcttaccagtctccccttcctttaccactacagacattcttttgcgatcagaagtgaattccaaaatgtccaacaactcataccaaaacttagacccattgaaacaaatctctgaagaaacaaaagggaattcaatcaaacagcttaatggaattgtaataatctcatcacaaaccgatgaacattcactaaccagctgtaatggtgtctttactgatgagcatcatattcagctttgctgcagcgttaactaaagcttcctcatcttgggattgtgctttgtatgacacagtaccatcattgctgaaagtatgaaaattttataaataacagcttaataccatgcagagtaacgaaaagaaactgtgacttgccttttgatagggaccactgtattgcaaagagccataaccaacagaaatttgatgacatcaggatcattacttgagaccgcatttacaagtctgacatctaagttgagagaattgtcagtggacgaaaaacagctttgcttctgcaacagtttgggcggcacatttagagcacaagttatttactaataagtaataaagcaataacaatatcaagaatggtaactcaaaatccatgaccgctgcatgttgtgaccaggctggagaaacaattgatcatttactcatgtgtatttgctcaacaagtatggtatatcctcttccagaaagtaggctttcaggattgacccctcaactggaaaatttttccttcaatgattggtgggccaaaacaaatgaaatagcagatggtcaagtctagaaaggctaccccaacctttctgccaccgctccccacaagcttgcccctcactccgccagctacgtcttcctcagttactcccctaatcacaaatggtacctatgccttgacctcaccactcatcctctcttgatctcccgtcgcgtcatcttcgtcaagacggatttccccttttcgactccctcccagtgcaccatcgactcccttcccgagttgaattttcttcgtgatcctaactctgcatctccatctagtcatccaccatttgtttccccttgcaggtttccccacgccgctcctgcctatggcaccggtgcctttcatggctcatgtgcccctggactccctccaggttgccctaccacaaccggtaggaccgtgtgcccccctgccgacctctgctaaaccgttggcggctccggtgacgcctccttcgtacttagcagtgccaatggggcctcaccggcaccggcctcacctcgctatgccaaccatgtgcatgcctatcaactacatgtgcgggtgggtgcaccgccccaatctcagaccaagccagcagtgtatcaccgcctcttcactgcaaccctcaccacgtccacgtcggtctcctatttgtcgtcttctgtccatagtgccctcgccaattctcacttgcatcacgctagggaggaagagtactaggccctccttgccaatcacacttgggattcggtgcccgtcccctaggcggcacaatgtgatgactagcaagtgagtctagacacatatgtggaaggctgatggctctatggatcagtacaaggcccgtttggtttctccatggcttcatttaacgtcatggtttgactacactaagacgttcaatccaggtgaagcctgctactgtccaagttctctcactaactctctcgttcttggccagttcatcagatcgacgtctagaataccttcctctatgggactctcattgagaccgtctattgcagtcagcctgtcggttttgttgactgcacaccctaatatggtctgcaaactcaagtccctctatagtctgaagcgagctccccatacttggtatagtaggtttgccacatatctgctctccctgggttttactgaggctaagttggacacctctctgttcatctatcagcacggtagtaacactatatgccttcttctatacattgatgacattgtgatcattgtctcttcctcgggcctactgcaccggatcattagaaccctttagcacaagttcgccatgaaggatttgggtcctcttcattttctagggattgttgttgagcatcgccgaatggcttgattcttcagcaacatcagtacaccctagatatcctggagcgtgctgggatgctggagtgcaagccttgcacaacacaggtggacacgcaggtcaaggtctatggcaacggttcccctgtcaacgatctcactgcctactgcagccttgccagtgctattcagtatctcaccttcaactacctgacatcgtgtatgttgtccggtaggtctatctctacatgcatgatccccgaaagtcacacctaagagcagtcaagcagatccttcattacctccagggtactatcgactatgggctccatcttcagtgttcctacacctgagctagtcgtctacacagatgttgattaggctagatgcctagatacttgtcgatcaaccttcggttatgcgctatttcttagggccaaccttatctcttggtcctctaagcgtcacccgtggtctcccgctctagtgctgagacggaatgtcgagctaccgccaatggggtggtttaggcaagctggttgtgccagctcctccaggagctccacaaccctctcatcaagagcacgcttgtctactacgataacgtcgtctacctctccatcaacctcgtcaagcaccagggcatgaagcatgttgaaattgatcttcactttgtccatgagtgtgttgctgtcgaggatgtccgtgttcatgtcttgatgagctcacaagttgctaacatcttcagtaagggtcttccctcattgttctcggagttttggtccagtctcaacgtctgacgcggctagaatttcaactgcgggggtgttagattgtatcttcttgtctaaatgtaaaaggcctagagcctggcccatgtaacatgatacacataaatatactagctagttgttcgtgctttgctacggttgttatataattattgtttatttctaaacactaaggtacgtgtggtctagtggttagctccaaatttctagagcagggggtgtgggttcgagtgctgctctgcactatttttgcgcggtgtggtagctgcgcgggcggggtcgagtgctaggcaggcgcagtagcccgctgcgcgggcgctgggggtccacaagtcagtagctgagagaattgcgcgggcgctgggcatggggcccatagggcacgacgccaaggcgaggcgcgtggggcgggagaaccagtaggagcgcgtgaggcgggtctagagagtcagtgcggagggtgaagttgtggtagcaccagccactagacgcccacattaggttcttaatagagtagtatagatacatgttatacctaaacgctaatcatcacctagtgtgacgagacgtatggtccatcacctgaaccaaaaggtccaatcggaccagcccacgagggaccaaccacattaggaaattaagcgcactaggaaactaaccccatcggccaatcagatccgcgcgcaattaccggagctgatccacccactgcccgttgggcgcaccaacaaatattcatccattgaatctttacttcatccattcaaggtttacttctatgtacaacaggaataagtattccgatattcaaggtttacttcaaccattcatcgtttttaaaactttacaaggaaaaaattcagcaattcaaggtttacttcagccatttagggataaacattcagtcattcaaggtttacttcagcgatttaaggtttacttcagtcatttaaggtttactttaatgtgcaacagaaaccaatatttagttatttaaggtttacttcaaccatttatcgtttctaaaattctacaatgaagaaacattcagcacttcaaggtatacttcagtcattcaaaaataaacattcagcaattcaaggtgatgagtcgagaacgagagacgtatgatgtggctaatgaatggaggcatgacgatgaggaattgcggacgttggggtagcgtagatcggtgcggtggtggattggattagatcagagcagactttagctaattgcaggtggcagcggagtgatacgtgcgagtggcgacatggggggaaattagtttgggtggctgacatgcatgcaggggtggttcgatgagctgttgcgcatggtttggtaggatttaattaggtttgggctggttcaggtgatgggcctctggtccatcaccctgggtgatgagtcgtcgtgcatatatatatacttagcccattcaagggttagggtttaaacaccattcaacataagagacagtaaaagaagacataaaaggatggaatgtatccaaagatttagccttgaataggagcaaatgaaaaacagctatccacgtgcctgaacctagattttgtggcttctgttaatttttaactctagcctacctcatcttgtttgagactaaaaggattagttgttgctgttcgttgggcccacagggttactcatctcctcgcccttgggtctagtgatagttagtttgatggtcaaggttgtttgttgtttgtagtcactggcaagcttatttttgtgtgaatgttctgtatgtgtggtattgtatgggttctacactcgttttttcttcttaatatattgatccgcagctctcctatatattcaagaaaaaactcaaaatccataaatagaatttataacacatctccaaaaacaccatggcattgttaagtgcactaacaatctagcagcaccattagaaaatagatgtcaaggggaagcgaagatgtcaactcttcggagctctctgaccattgtcccttagctctgcatcttaatgaggatgtcaaggggaagcgaagattccattttgagagtttttggactaagattccagattttttggagacggtggctacctcttgggagcagccagtgatgttttcttatcccttggaaagaatggctctaaagttgaaaaggcttgcaaaggctttgcagtcgtggagtcataaaaggatcggaaatattaaatctcagcttagcttggccagggaaattttgcacagacttgagattgctcaacacaatagactgttgtgtggggacgagatatggctgaaaggaaggcttaagcaccactgcctagggcttgcttctctggaaaggacaattgctagacttagatcgcggatcaaatatctgaaagagggagatgccaacacttccttttttcatctacaggcttgctattggaaaaagcggaactttatctctgaattagtgcatggggaccagatcgccacctctcaagagcaaaaacaagaggtcttgtttgattttttctccaatttgttgggtgtagcgaagcagcgtgagttcactctagatttggaggcttgccacagtgctgatgttgatcttggggctttggaccttcccattacagaggaggtccgggccactattgctagccttccctcggacaaagccccggggccagacggttatacaggaaggttttataaaacttgttggcacataattaaggctgatctgatggcggcagttatcaccctgcaccaaggtaacacgcgcaaattgtggatgatgaactctgcgtacctaacacttatccctaagaaggttgatgccaagacagctggagattacaggccaattagtcttattcacagctttgccaaattggtatccaaagtcttggctaatcgtttagcaccacaccttcataatctggtggctacaaatcaaagtgcctttgtcaagggtcgctccattcatgacaactacatgttggttcagcactctatcaatgcctttcacaggaagaagatcgctagcctatttctaaagctagatattacaaaagcttttgactcagtgtcctgggtctttctcctagaagtgttatctcatcttggcttcgggcccaggtggtgcggccttgtgttcaatttgttatccacttcttccacacaagtgttaattaacggaactccgggggattatattcgacaccggagggggctgcgccaaggcgaccccttatctcctatgcttttcataatcgtgatggatgtgcttagtagcttattcaagcatgctgaggaaagaggattgttgcatgacctggccatcagaaacatgaaatctaggctctccatttacgcagatgatgtggttctttttgtcaagcctgcagttgaagatcttatttgtgtcaaaatgatcctggattgctttggagaggcctcgggcttagttgtgaatttgcaaaaaaaaaagttgtgctatccctctcagttgtgatgatcagactgttcaggacaattgtaacattttgcagtgcaatctggcttcttttccatgcaactatttggagcgcctgtttctgataagaagttggggaggagggacctcttgcagtgggtgggcaagatagctaaccggctgtccggttggaaggctccatttctaaaccttgctggcaggacagccttggtccggttcgtgctctctgcaatccccgtatatcttttcatcgccatgaatgttcccaagtgggttatcagtgctattgacaaaattcggcgaggtttcttgtggaagggtggaaaagatgtgaaaggtgggcattgccttgtggcgtgggataaagtcagcagaccgctggaccttggtggacttggtatcccaaacctgatatataagagttgggcgctgcaagctaaatggctttggctcatcaagactgacccgaataggccttggagtggattggatctccctgttcagtcacaagtaaggaaactagtggccagttcaatgtacactcatgtgggcaatggcaaaaacaccctttttggagggacagatggttaaatgggtgctctatcgctgagctggcacctgaagtgatctcaaaggtggataaaaaggtggcctctaccaggacagtgcatcaagctttggagggcatgttgtgggttagggacatcaagccaaccctctccattgtaggtatacagtaatatcttacgttttgtgacaccttgggtgagatagtgctcactcttcaggaggatcaccatgtgtggagattcaagtcttcgggccttttctcttctaggtcctgctacaaggttctgtttttgggctccatcaccttcgaaccttggaaaagactttggaaatcttgggctcctcctaagtgtaagacctttttatggttagccatgcagaataagtgttggacagctgacaggctgcaaaaaagaggtcttccccatccggaagcatgccctttctgtgaacaagagcaagaaacagttcagcatctgttgaccggttgtgtcttcgccaggcagttttggcatagcatcctctccccctttggtatgggccacctaactccaggaccagaggatactaagtttgctgattagtggggaatagtgaccattcaggtgcacagaaacaagagaaagggagccaacagtgccattattttgggagcatggtgcctttggttgcatagaaacagttattttcgatggagattcaccaaccattggcaaggtgcatagaagcttcatcgacgagctatccttatgggtgctggttggtgccaaacacctcggaagtcttggtcttgctgccgctctaggcgcagcaggctcgacttaattttttcatcggtcgtctttttgtatcttggtcctatggacagttttatttatgcttgttgctggccaccatagggtgggtttttgtactggtcctcttggaccttaatttcccttcttaatataaagatgtgcagctctcctgagtttttcgaaaaaagaaaatagatatcatgaagtctaaagttgttccaaaagttagtcattgttgacctttctacatagagtaaaatgcatcaacggtctttgaacctagcacgttgtgtcacttgggtcaccaaacttagaaaaccacaaaaacggctccttcaactttgtcgaccggtgcaaaatcatccaaaaccggatttacttaaactagatgccagggacccaaatgacccagcatgccaaattcgagtacctaagtgacacaacatgtcaagttcgtagactgcgtataccaggtggcacacagcacgtgtgggaggctccaacgtggcattgccatgtcgccatccagtttgagcaaatccggttttggacgattttgcacgggtcggcaaagttcaagtactcgttttcgtggttttttaagttcgatgacccaagtgacacaagcgtgcaagttcaaggaccgctgatgcattttgctcttctacatataaccaccttaatatttttttattgtacaaagctttgtacagtatgaatttcgactaccattttcaatagtacatgaaaactgttaggtataattgccgactacaaaaagtgatatcattatactataagaggaaaaggggaaatacaacaatagtgggatccaaattgcaatgaagtgtgcacttcccgtctctaagaatttccggtcaccaagtctatctctagcagattacccatccccatagcatattcaaactccactctgcgaacagtgcagtctgcaatgtataacagtgcaaaacaatgttttgagtaaccatatgggtgaaactgctggacacggtctaacatgccacatttgcgcaagcaatagcatgtgttatggctaggaccctaacaagtggcctggttaggctgtagtactataaacaggcactgttgttgtggcatcctgatccaaagcttaatagaattgatagaatactcctacaaaaagacgtgccttctttttcggaaacttatcttggagtagttggagtgttacaactgctcacttgcagaaatagaaccatgggtgttgacgtgttgtattacgcccagctcagtctcctccatttagagggctgatgtacccttatcccccaattccacctccgcaatttctcataattcatacacataacaagcatgccttaatagagaaaagaaaaggatgaacattgtcccttaataggatgtaaagaacataatgagtaagtagacaaccgtttaatgcatctccgttgtcatttccatacaaagtatcacttatgcagcattgtttgaag

SEQ ID NO: 14264 - DNA, 5956 bp, Zea Mays
aaaagatctagggtttcctgcttgtcccacggggttttaggaagcacgcagccacacgccgccgcctcgctctctgctcccctctccatttttcatctcattcggcgccgcggcaccccctgctcgtcactcgcgatggcccggatcaaggtgcacgagctgcgcggaaagagcaagacggatctgcaagcgcagctcaaggagcttaaatcggagctctccctcctacgcgtcgccaaggtcaccggcggggctcccaacaagctctccaaaatcaagatcgtgcgcacctccatcgctcgcgtgctcaccgtcatctcgcagaagcagaagtcggcgctgcgtgaggcgtacaagaagaagaagcttctcccgctcgatctccgccccaagaagacccgcgccattcgcaggcgcctcaccaagtaccagctctccttgaagactgagagggaaaagaagcgtgagaagtattttcccatgcggaagtacgctatcaaggcctagattagtgaaagaacagcttttatcctatcaagttctgcccagaagtttcttgagtttgatgtaccgcacatctatcgtcattacaatggaatgatgaaaacgaatatgttttcggcttctactccacacagtctttgttggcgatgctacacgtcttattaatgaattcttgtccatgtgaaaaccttcgtcggtgaagtttcatgtctcataagtgaaccgatctcttcgttcgctttgacttcgcttcccactaaagttcgtcttatagctttgctcgacctctgacgaaaagagtattcgttagggaagcttcacttgtcttaagacctcggttgacctttagccaataggatgaaacaactttgcgccttattcttggtcttcgtgatatgacgtcctccaaaacatcaaggactgattgtctgaggtcaaatctccaacaggagcccctcgcagtcaaagacttctccgaaggtctgaatctgacgaaattatgtgagctaaggtaaaacgccatcctcgagattagatttagggtgcgtttggatgcaatgataggacgagacggaatgagacgattcctcaaataagattgtttggttcaggggttaggacataactatcctagtgttgccctcagttgtcccttcaaattggagagacgctagaggacgtccctgtcctgactgtcccgcaaccaaacacacccttagttgttagagagtgacgattgtatttcaaatttttaatggccaagttagaagtcaggtataaaaggaagacgaacagtcacttttggtggaagccgcctatatatatactgcttattggtcatggtttgctatcacattctaagaatgagaaatcttggtgtttgttttcacaaaacagatcttttgtgcaagtctatttaactgagcaatttgcttgcaaagttgtctagaagctttgcgaagaagtttcctcgctgctgcttgtgagccctaccaaggtaattttcttactttaattcttttttgtttgccatatcatggtttgattgatttcttttttgggctaattgtgtgacgtcaaagagtttcttttttatggcttcgtctagttcctaagatgatttaggggatgttgatgtgtctgactcggaactagtggaggatgagactaagtatgtgtttgtttagcttgtagattatataatctagattataatttaaattatataatctagattataatttgtcgagattataatttatatatagctgtttggtttctcagattataatgcagattattgatctctaaggcacaaaggcaacatatacttgttgcgtgtgatttgggagaaaagaagaatgtcagtccatgtaattttaacaacataattatgggtagtgagtattttgtaaaaaataatctaaaataagctagtcttgagaaaattacgagattatcacaatcttggggatagattatataatctagacatatagtctgtttgtttgtttactagcaagattatttacactgaattatataatctggcaaattataatctaaaacaaacaggacccaagtcccttaggtgccgtttggttcatgaaatgtaacataaatagtaatgataatgatttacactcgattaccagcagtaatgtcgtcgtttcgagaccggggggtccctgggccgacgagtgaaatgtcgctgcgtgccccagcccagatgggtcggcgcgaggccgagcgcgaaggggggagaaaggtggccggagacgggcgtgagagaggtggaaatcccgcggccttcgtgttcgtcccgcgcccaggtcgggtgcgcttgcagtagggggttacaagcgtccacacgggtgagggagcgagcggccttacgcgagcgcctgtctcgtcctcgtccccgcgcggccaaccctctgtaagagggccctggtccttccttttatagacgtaaggagaggatccaggtgtacaatgggaggtgtagcagagtgctacgtgtctagcggaggagagctagtgccctaagtacacgccgtcgtggcagccagagaggttttggcacccagttggtgtgatgtcgtggccgtcggaggagcgttggagcctggcggaaggacagctatcggggcggttgagtccttgctgacgtcctcttgcttccgtaagggggccgagagccgccgtcgtcagggagcgtgtggggcgccatcattgcctaactggcggagcgagccagatgggacgccggtcttgttccccgtagcctgagtcagctcggggtagggtaatgatggcgcctcctgttgacgtggctggcccgcgccctaggttgggtgatgtggaggctccttcgaggtcgaggtcgaggtcgagtctgtcttccgtggccgtggtcgagtccgagcccctgggtcgggcgaggcggagaccgtcggctgaagccagggctgagtccgagccctggggtcgggcgaagcggagttcgccgtctttcggggctgagcccaagtccgagccctgggtcgggcggagcggagttcgccgtcttccggggcttagcccaagtccgagccctgggtcgggcggagcggagttcgccgtcttccggggcttagcccgagtccgagccctgggtcaggcggagcggagttcaccgttttccggggcttagcccgagtccgagccctgggtcaggcggagcggagcttcctatggcacctgcggccgggcctgactgcctgtcagcctcactccgtcaagtggcaccgcagtcggagcggcgcaggcgacgctgtctttctgtcgggccggtcagtggagcggcgaagtgacggcggtcacttcggctctgtcgactgaagggcgcgcgtcaggataaaggtgtcaggccacctttgcattaaatgctcctgcgatttggtcggtcggcgtggtgatttggtcagggttgcttcttggcgaagacatggcctcgggcgagccgaaaatatgttcgccgctggaggggggcctcgggcgaggcggagatcctccggggtcggctgcccttgtccaaggctaggctcgggcgaggcgtgatcgagtccctcgaatggaccgatccctgacttaatcgcacccatcaggcctttgcagctttatgctgatgggggttaccagctgagaattaggagccttgagggtacccctaattatggtccccgacagtagcccccgagcctcgaagggagtgttagcactcgcttggaggctttcgtcgcacttctttgcaaggggaccagcctttctcggttgcgttttgttccggtgggtgcgcgcgagcgcacccgccgggtgtagcccccgaggccttggaggagtggtttgactcctccgaggtcttaatgcctcgcgtaatgcttcggctggtctggtcgttccctcatgcgagctggccgtagcccgggtgtacggtcgggtcccaagttctcgggctggtatgttgacgctgtcaacggtttggccggagccgggttcgcgagagcagcccccaagcctctgcacagggcgagagggcgatcaggggcagacttgacttttttacatacgcccctgcgtcgcctttccgcaaggaggagggggggaaagcgccatgttgccctcggtgggcgccgaacatggtgtctccggtgagctgcaagcgggtaatccgagcggacgtccgtgccccattcgctaggggtcggctagaggcccagaggcacgcccaaaaatacctgcgggtgatctgccggacccggtcccctgtcgacggggtccgagggctcgatgcctccctctgatgggattccgttacaagatcgttcccgctggtctcggaaatgtcctagggtacctcgggagcgcagcccgagccttggttatgtatcgaacgtacccatggtcatccctcgctctgtgtctgaggcggctgtgaacccttcgggggccagccttcaaacccctgatcagtagtgggcgcggagcccgagtagcctgaggcggccgttgaacccttccgaggggccagccttcgaacctctgaccagtagtgggtgtggagcccacgtgctctgaggcggctgttgaacccttccgaggggccagccttcgaacctctgatcagtagggaggctcggagcctggttccttcacggggaaggatccttttcggggtatccccctttcccggtccctgttgtaagagagagaaagaggagaaagaggaaaaaaaggaaaaggatatgaaatcgaacgacgcggcgtaccttttttgacgcggtcattatggcgaaggcgaagcgtcgctcgcttctcctgccagaggcaccgcctgtcccgccgcggagttaatgcgacggggcgagtggttcgcggggcggccgttgcgcgtgcgcgggccgttcgaggaacggaacacgggcgcgtcgtcttcacgccgtgagagagggttctctcgctgcccccggatgggacgtaagcttggctgacgacgtgaccgctgctcctgcccgcctgccaccgccattactgccggcccgtttttggccgcattggccgtcgcgccaggctggcgctgctgggtcgtgcgctgggtcgcctcgagtcgcggtatcggttccgcagtcgaggaggcgcggtagtggcgcaagtggcggtgcagttgcttgcacgaagcatccgtcgtgccggttgcatgacgcgtgggcctgggcctccatgcagggcgtgctggaagtcagagaagtgcgcccacttggcgcggttgcatgccgcctgcatggctgcccgccctttcgcccgctggtctgggcaaaagtggagagccgcttgtaatccgttgggcggttgcacgcatcgcgcgcggcggtttggcttcttctgctctgggccagcttgcatgacgtgtgggacccagccttcgcgccgtagggggaggaccttggagcgtgtcggagaagactcagcccccgacggttggggacgcaagtagggagagtcgcctttaaaaggagggtgacccccttgaaaggcgaccatgtcttcgcgctcccttatgcatcgtgcctttccaccttccaagcccccggatgggggatacccgcaatctttccgccttgtcgttgggggaacgcaactccgtgggagttggtacctttcagccatctttcggcttcaaggattttcatcatgcagcccggctgcacccctccatcggtggtcacccaagacggtgaccaccagcccctgggtggggagaagcaagccgggctgcgatcttggtcccaccctcagcttcaaggatgttcatcatcctcgctggggtggaggccgggctgagccggagctctacctcccgcgcgggttcgtgggtcggcctctccttcggcgttcgagggagagggcgctc

SEQ ID NO: 14265 - DNA, 5912 bp, Zea Mays
agggtttcctgcttgtcccacggggttttaggaagcacgcagccacacgccgccgcctcgctctctgctcccctctccatttttcatctcattcggcgccgcggcaccccctgctcgtcactcgcgatggcccggatcaaggtgcacgagctgcgcggaaagagcaagacggatctgcaagcgcagctcaaggagcttaaatcggagctctccctcctacgcgtcgccaagcaagatcgtgcgcacctccatcgctcgcgtgctcaccgtcatctcgcagaagcagaagtcggcgctgcgtgaggcgtacaagaagaagaagcttctcccgctcgatctccgccccaagaagacccgcgccattcgcaggcgcctcaccaagtaccagctctccttgaagactgagagggaaaagaagcgtgagaagtattttcccatgcggaagtacgctatcaaggcctagattagtgaaagaacagcttttatcctatcaagttctgcccagaagtttcttgagtttgatgtaccgcacatctatcgtcattacaatggaatgatgaaaacgaatatgttttcggcttctactccacacagtctttgttggcgatgctacacgtcttattaatgaattcttgtccatgtgaaaaccttcgtcggtgaagtttcatgtctcataagtgaaccgatctcttcgttcgctttgacttcgcttcccactaaagttcgtcttatagctttgctcgacctctgacgaaaagagtattcgttagggaagcttcacttgtcttaagacctcggttgacctttagccaataggatgaaacaactttgcgccttattcttggtcttcgtgatatgacgtcctccaaaacatcaaggactgattgtctgaggtcaaatctccaacaggagcccctcgcagtcaaagacttctccgaaggtctgaatctgacgaaattatgtgagctaaggtaaaacgccatcctcgagattagatttagggtgcgtttggatgcaatgataggacgagacggaatgagacgattcctcaaataagattgtttggttcaggggttaggacataactatcctagtgttgccctcagttgtcccttcaaattggagagacgctagaggacgtccctgtcctgactgtcccgcaaccaaacacacccttagttgttagagagtgacgattgtatttcaaatttttaatggccaagttagaagtcaggtataaaaggaagacgaacagtcacttttggtggaagccgcctatatatatactgcttattggtcatggtttgctatcacattctaagaatgagaaatcttggtgtttgttttcacaaaacagatcttttgtgcaagtctatttaactgagcaatttgcttgcaaagttgtctagaagctttgcgaagaagtttcctcgctgctgcttgtgagccctaccaaggtaattttcttactttaattcttttttgtttgccatatcatggtttgattgatttcttttttgggctaattgtgtgacgtcaaagagtttcttttttatggcttcgtctagttcctaagatgatttaggggatgttgatgtgtctgactcggaactagtggaggatgagactaagtatgtgtttgtttagcttgtagattatataatctagattataatttaaattatataatctagattataatttgtcgagattataatttatatatagctgtttggtttctcagattataatgcagattattgatctctaaggcacaaaggcaacatatacttgttgcgtgtgatttgggagaaaagaagaatgtcagtccatgtaattttaacaacataattatgggtagtgagtattttgtaaaaaataatctaaaataagctagtcttgagaaaattacgagattatcacaatcttggggatagattatataatctagacatatagtctgtttgtttgtttactagcaagattatttacactgaattatataatctggcaaattataatctaaaacaaacaggacccaagtcccttaggtgccgtttggttcatgaaatgtaacataaatagtaatgataatgatttacactcgattaccagcagtaatgtcgtcgtttcgagaccggggggtccctgggccgacgagtgaaatgtcgctgcgtgccccagcccagatgggtcggcgcgaggccgagcgcgaaggggggagaaaggtggccggagacgggcgtgagagaggtggaaatcccgcggccttcgtgttcgtcccgcgcccaggtcgggtgcgcttgcagtagggggttacaagcgtccacacgggtgagggagcgagcggccttacgcgagcgcctgtctcgtcctcgtccccgcgcggccaaccctctgtaagagggccctggtccttccttttatagacgtaaggagaggatccaggtgtacaatgggaggtgtagcagagtgctacgtgtctagcggaggagagctagtgccctaagtacacgccgtcgtggcagccagagaggttttggcacccagttggtgtgatgtcgtggccgtcggaggagcgttggagcctggcggaaggacagctatcggggcggttgagtccttgctgacgtcctcttgcttccgtaagggggccgagagccgccgtcgtcagggagcgtgtggggcgccatcattgcctaactggcggagcgagccagatgggacgccggtcttgttccccgtagcctgagtcagctcggggtagggtaatgatggcgcctcctgttgacgtggctggcccgcgccctaggttgggtgatgtggaggctccttcgaggtcgaggtcgaggtcgagtctgtcttccgtggccgtggtcgagtccgagcccctgggtcgggcgaggcggagaccgtcggctgaagccagggctgagtccgagccctggggtcgggcgaagcggagttcgccgtctttcggggctgagcccaagtccgagccctgggtcgggcggagcggagttcgccgtcttccggggcttagcccaagtccgagccctgggtcgggcggagcggagttcgccgtcttccggggcttagcccgagtccgagccctgggtcaggcggagcggagttcaccgttttccggggcttagcccgagtccgagccctgggtcaggcggagcggagcttcctatggcacctgcggccgggcctgactgcctgtcagcctcactccgtcaagtggcaccgcagtcggagcggcgcaggcgacgctgtctttctgtcgggccggtcagtggagcggcgaagtgacggcggtcacttcggctctgtcgactgaagggcgcgcgtcaggataaaggtgtcaggccacctttgcattaaatgctcctgcgatttggtcggtcggcgtggtgatttggtcagggttgcttcttggcgaagacatggcctcgggcgagccgaaaatatgttcgccgctggaggggggcctcgggcgaggcggagatcctccggggtcggctgcccttgtccaaggctaggctcgggcgaggcgtgatcgagtccctcgaatggaccgatccctgacttaatcgcacccatcaggcctttgcagctttatgctgatgggggttaccagctgagaattaggagccttgagggtacccctaattatggtccccgacagtagcccccgagcctcgaagggagtgttagcactcgcttggaggctttcgtcgcacttctttgcaaggggaccagcctttctcggttgcgttttgttccggtgggtgcgcgcgagcgcacccgccgggtgtagcccccgaggccttggaggagtggtttgactcctccgaggtcttaatgcctcgcgtaatgcttcggctggtctggtcgttccctcatgcgagctggccgtagcccgggtgtacggtcgggtcccaagttctcgggctggtatgttgacgctgtcaacggtttggccggagccgggttcgcgagagcagcccccaagcctctgcacagggcgagagggcgatcaggggcagacttgacttttttacatacgcccctgcgtcgcctttccgcaaggaggagggggggaaagcgccatgttgccctcggtgggcgccgaacatggtgtctccggtgagctgcaagcgggtaatccgagcggacgtccgtgccccattcgctaggggtcggctagaggcccagaggcacgcccaaaaatacctgcgggtgatctgccggacccggtcccctgtcgacggggtccgagggctcgatgcctccctctgatgggattccgttacaagatcgttcccgctggtctcggaaatgtcctagggtacctcgggagcgcagcccgagccttggttatgtatcgaacgtacccatggtcatccctcgctctgtgtctgaggcggctgtgaacccttcgggggccagccttcaaacccctgatcagtagtgggcgcggagcccgagtagcctgaggcggccgttgaacccttccgaggggccagccttcgaacctctgaccagtagtgggtgtggagcccacgtgctctgaggcggctgttgaacccttccgaggggccagccttcgaacctctgatcagtagggaggctcggagcctggttccttcacggggaaggatccttttcggggtatccccctttcccggtccctgttgtaagagagagaaagaggagaaagaggaaaaaaaggaaaaggatatgaaatcgaacgacgcggcgtaccttttttgacgcggtcattatggcgaaggcgaagcgtcgctcgcttctcctgccagaggcaccgcctgtcccgccgcggagttaatgcgacggggcgagtggttcgcggggcggccgttgcgcgtgcgcgggccgttcgaggaacggaacacgggcgcgtcgtcttcacgccgtgagagagggttctctcgctgcccccggatgggacgtaagcttggctgacgacgtgaccgctgctcctgcccgcctgccaccgccattactgccggcccgtttttggccgcattggccgtcgcgccaggctggcgctgctgggtcgtgcgctgggtcgcctcgagtcgcggtatcggttccgcagtcgaggaggcgcggtagtggcgcaagtggcggtgcagttgcttgcacgaagcatccgtcgtgccggttgcatgacgcgtgggcctgggcctccatgcagggcgtgctggaagtcagagaagtgcgcccacttggcgcggttgcatgccgcctgcatggctgcccgccctttcgcccgctggtctgggcaaaagtggagagccgcttgtaatccgttgggcggttgcacgcatcgcgcgcggcggtttggcttcttctgctctgggccagcttgcatgacgtgtgggacccagccttcgcgccgtagggggaggaccttggagcgtgtcggagaagactcagcccccgacggttggggacgcaagtagggagagtcgcctttaaaaggagggtgacccccttgaaaggcgaccatgtcttcgcgctcccttatgcatcgtgcctttccaccttccaagcccccggatgggggatacccgcaatctttccgccttgtcgttgggggaacgcaactccgtgggagttggtacctttcagccatctttcggcttcaaggattttcatcatgcagcccggctgcacccctccatcggtggtcacccaagacggtgaccaccagcccctgggtggggagaagcaagccgggctgcgatcttggtcccaccctcagcttcaaggatgttcatcatcctcgctggggtggaggccgggctgagccggagctctacctcccgcgcgggttcgtgggtcggcctctccttcggcgttcgagggagagggcgctc

SEQ ID NO: 14266 - DNA, 1746 bp, Zea Mays
cctgcttgtcccacggggttttaggaagcacgcagccacacgccgccgcctcgctctctgctcccctctccatttttcatctcattcggcgccgcggcaccccctgctcgtcactcgcgatggcccggatcaaggtgcacgagctgcgcggaaagagcaagacggatctgcaagcgcagctcaaggagcttaaatcggagctctccctcctacgcgtcgccaaggtcaccggcggggctcccaacaagctctccaaaatcaagatcgtgcgcacctccatcgctcgcgtgctcaccgtcatctcgcagaagcagaagtcggcgctgcgtgaggcgtacaagaagaagaagcttctcccgctcgatctccgccccaagaagacccgcgccattcgcaggcgcctcaccaagtaccaggtatatacttatgttccttgcgtctacttcaatgcgttctctttcattgctgaagcgcttattttattgttctaccagtgctgtgaggctagctgggtttaagatttgttttgtactgtaacttttactcattactttgagttgtcgaattgatcctgtcgaggccaacgtgcttctgttaattaaaagtggttcagacgatttgtatgacatatcgagatattcacatgtagtcgcagtgtttgttacataggtggattgttgaagcagcattagatagtactagcagtgattatagtttcatcggtcggttgcctctactgtttactatttttacttgtgaatgaacaccatgaagttttactttggatagtgattctgtatttggtatcaacttggtgccgtgctaattgtgtattactttcacatttacttggtttgactaaagttatgtttctggaagaataaaacgacccagtgggtcagggtttgtgtagggtgcttgttagttgtcgtacttgtatgtcttgtgttccaattccatatacagatggtgtaattgactagtgaatagaatgaccaatgctatatgcagtagtataatgtgtactagtagttgaagtaatatatcaagctactcatcgttcttagatcttcttgtctgttgacttgtggtgtttgtgttcttcagctctccttgaagactgagagggaaaagaagcgtgagaagtattttcccatgcggaagtacgctatcaaggcctagattagtgaaagaacagcttttatcctatcaagttctgcccagaagtttcttgagtttgatgtaccgcacatctatcgtcattacaatggaatgatgaaaacgaatatgttttcggcttctactccacacagtctttgttggcgatgctacacgtcttattaatgaattcttgtccatgtgaaaaccttcgtcggtgaagtttcatgtctcataagtgaaccgatctcttcgttcgctttgacttcgcttcccactaaagttcgtcttatagctttgctcgacctctgacgaaaagagtattcgttagggaagcttcacttgtcttaagacctcggttgacctttagccaataggatgaaacaactttgcgccttattcttggtcttcgtgatatgacgtccttgaataccaataaagataatcagataacttcaacatttgcttggagattttgcattcaagccgagcaaagcattaatcttgccttctctattactttctaatttgagacgaaatcaatcgtaaaaagtaaaaatatacatcaagtaaaaaaagagaaaggaa

SEQ ID NO: 14267 - DNA, 2848 bp, Zea Mays
attacaccaaatttataaaatcacctcataatggaccacttcatctagaatagattgatttttcaaaataaacactacggtaagcataagtcgattctaaaaataccaaaatccggcacgaagcggatctaagtaggccctatatctccccaaactgcgcctggccctgggctgaattcgtctccgcccggcgcccaccttgccgccaaaagccgtacacccaattcccaaaactcctctacccctcccaggaagaggccaagaacgccagcagcatcgccgcccatggactggtctgaggaggggatcgacgaggaggagtccacgctgcgcaggcggacggcgaggccgcgttctcctccaggcggtcgacccttgcctcccccgcgatcaccgggatcgaggtcgccttctcctcaccgcggcggtctggcggcctcctcagggttgaggtcgccctcgccgcgccgcgtcacaataatggcgacgaggatgggcagctctgtgcggacgatccggcgatctccaacgccaagaaggtccggcgccgatgctcccgcgagcgacggtgtggatggcaccggcgtcaaggagatcatcgccaagatgagggaggggtttcccactctcgaatcgtgggatggcgccgacacgggcgactctggtcccggaggaggagagggaggtggggcggacgaggaggagccgcaggtggaccagagctccgtcgctttctcgttccaggagctcgtggctccgctggtcgtcgatggggcggaggttattgacgccttcgtcggctccgatgaggcgaggacgggcaaggccgcggccgagcttctggacgcaaccatgggcgccaacaccgggcccaggaccgaagcgatcaagactgagctcctcgtcaaccggcggctgctcgacctcgcggggctggagcggtggatgcggacggtggaggcggtctccgagctcgagtggttcacgggcctctgctgcgacgagaacagcccgccaccgcatatcgacctcttcgagtgcgcgttccgggccctggagaacgcgtcggacgtcgagctccaccacggcgccgacgccaggaagcgctggatcggcccagtgggcgtgccggagttcttcatctgccccatctccaacaaggtcatggagaaccccgtcgtcatcgcctccggaaaggtgcgatgaatctttcatcggctctgttctcgtggcggtcctggtacgcttgttcttgaattatatatttctgcaaacatgtttcttagtgttggatgacagaaatgtgccaatctgcaaacaagtttcttaatgttgggtctcttgcaatgtgccaatctgaaaaatctgctgtctgaaattgttgaggctatgtgttttaatcagttagatactgatagcagactcttccgtggctgtggctgcagacagttgatcgctcagctctggagaaatggcagaagaagaacgggcgcatctgtcccgtcactggcgagcttgtcccgtacaccatgttcatccccaacgtcttcatcaagctctgcatcgagcattggcgtgcagaaaataagattgcatgcgtgacgacggcagccaccaatccacctcacatttccaacgagttgcaagtcctgatcgggcaagccaccctaatgcctcactcccccggaagctccaaagaggtccggaagtcgctttttctgctccacaaggtcctcgccgacaaggagagcgcagtcgtacacctgatcggctgccgccccgggacgatcgcgaagctcgtcaccgtcctgccggagacctgcctggaccctgaccccgaactggaggacgtcatcctgaggatcttggagaaagcggcttcctacgggcccaacaaggcggtgttcggggacgaccagtacgccttgcccgtgctgatcgcaaggacattgctgggtccagcgcccatgcgagcgaggtgtgctcgcatcctcgggctgctggccgacgaccactacaacaagatcaagatcggcgagctcggaggcttcgccccgctggtcgagctgctctacgtcggagacaaaggcgccaagaagaccgcggcgaaggttattggcagcctctgcgaggcccaggagaaccagagcaagttcctgaaggagggagtggtggacgccgccatatccgcgctgcggagcgacgggctggtggaggaggcccaggacatcctgctgcggatttccggctcttctgtcgccttcggggaggcctacttgaagctcgaatcgattaaggacgacgacttgtgccagaagacgagtgtgctcctttggaaaactttcgttttaatgaatggagaagacaagcacgacgccggttgttccatgacggcctcgaagagtgcttggggtgagagctcttctacatcgtcagacgctgcgatgtcttccacgtcctccgacagttctgcagacgagcgtgcgttgagaaagcagaactgggaagatgccaagatcatcgcctcatggctgcagaagaggtgctccttccccaatacgtacagatcagctgagggcgtgttcggctggctacaagccgacactgttgcagctgtttggattgctgcagctgcaatccatagagagaaaaatactgtagaagccgcagccgcagccggattgcagccgcagcaagccgcagcgaacaagctgttagattcgaatgcggttgctgagatgatgtgatgttcggttcatccaatgtagtttcatgagaagtccaaggtgtgttttcaggttttgctgtggtagatttttattcaggttttgtgattgttaacacggtc

SEQ ID NO: 14268 - DNA, 2331 bp, Zea Mays
  misc_feature (2330)..(2331): n is a, c, g, or t
cttctcacttctgtgtgtgattgagtgtggtgtggaatgcaagtatggaataattgtctatgtactggcgttcacgttctgttacccgtcctgctgctatcaatgttacatgttacttcacatccgccaccagagtccgtctacattgatttattactttactttactggacggatcctaccgctaccggtgttggatgaaagaatggacccatttcttggtagattggctagaccagtcaccattgaccaatcatggtttaccgcccagggtgatctgtccttgctcaacagaccggcttccagtgacactaagacttctgcagagcttaacaatggtttaatcgagttcaacgatgcaactgcgccatcgccaggattgtcgtgtcataattgctctagtgtcgcaagcaacttcaaaccatttgcaactgtagtgtcagggctgcatcaacacttcttggatgcaaatgtagaagttacttacgcagaatacttggatttgatgaaagtggaagtcgatcagcagcttaataagctcatcgaggatataagggtcctcaagagctataacgtggctcataaatgtgacctaaatgacccgtgctctacactaggccatgttgggaagctgactgagatagacgaggggttcaacagcttgaagttgctgctggttgtggtgttccgacaaattagagagatgctcacactggttaattcttcaattcatgattttcagtgggagcatgagttacagttagaaattactggctttattattggagactgtgtcagaggtcttaaggatgaactagagaggaagttgtatgagcaaagctccattgtgaacagtctaagaaaaaattcgcaagaaactgtggctcagtgtgcttccatccgtgaagacctgattgctatttctaatatgctattaccttcagaagaggaacaccatattcctctgtgtagacatgaaagtttgggtaattggagcgacagatggaagttcagctttttcagaaagataccacaaaaggatcactctctatcttcctctgaggaaaatcagaaatctgcaacacagaaatctataagtcccagtgaagttatttcagaaaaatctgacttccgacatctgaagggcatgactggacaagaaattcttaactatttcagatctgagatcagtaaattgaaaatgttgcatgagctggatttgcaggagaaaacagaagagctgttcaaattcaaacgagagaaatggtcactggctctcaagtacgatgtagaatttgagcctttgaggaagagattccctgaagtcatttcaagatttgaccaaattatgtccaatggaatggaagcacctacaatcagtactagtgatgcagttgatgaaaggagcagattgaatagtagaattgattcactatactgtgaaaaccagcatcttaggaatttgcttgcagagaagacaaagaatgttcaggaattatcctgccagatatctgatgccagcaagaaaatgtcatctcaatattatctagagaaagaacatttgagacaagtcaagaacattaaagaagagtatgaggatctatatgttgaaagtacaataagagatgaaatttaccaaactgttacaagcaaattggttgatagtcatagggacatcttggaggagactacccaaattttgcatgctaaagtttcctcacttgaagctgcacattcagaaaaggacatggcgctgtgtttatctaacgaagaaaataggaagctgaaggaaaagttgtcaatactagaaaaggtgcatttcatcaaagataatcagcatgatcaattgctaatgaaacaagagagtgaggaaatgatactccgtgatattgagatggagccccacgtgccgccacaaagatcatgtcagatttctgatcaggatatgcagtatgaagaactcatcaagctgaatcagacattagagatggcctcaaccaccttaaaagaagttgaaacaaaaaagttggattacagtgacatcactagtgaaagaaagcaagaaaaacagttagattccatcctgatatctatcatggatttgtcaaaagaatttgtggagatggaacataaaatgtcagaagaaataaaaggaaatgagaaaaagacggagaatctaaatgatcggtgcaaccatatggtgcagcaggccatcgtactgacaaagaagggcctgtggtacaagcaaatgcttgagataagacgttctgagcttcaaaaggctgaatctgaggttgacgttttaggaggcaaggtcaatgcactcttaann

SEQ ID NO: 14269 - DNA, 2145 bp, Zea Mays
  misc_feature (2144)..(2145): n is a, c, g, or t
catgtgttggatgaaagaatggacccatttcttggtagattggctagaccagtcaccattgaccaatcatggtttaccgcccagggtgatctgtccttgctcaacagaccggcttccagtgacactaagacttctgcagagcttaacaatggtttaatcgagttcaacgatgcaactgcgccatcgccaggattgtcgtgtcataattgctctagtgtcgcaagcaacttcaaaccatttgcaactgtagtgtcagggctgcatcaacacttcttggatgcaaatgtagaagttacttacgcagaatacttggatttgatgaaagtggaagtcgatcagcagcttaataagctcatcgaggatataagggtcctcaagagctataacgtggctcataaatgtgacctaaatgacccgtgctctacactaggccatgttgggaagctgactgagatagacgaggggttcaacagcttgaagttgctgctggttgtggtgttccgacaaattagagagatgctcacactggttaattcttcaattcatgattttcagtgggagcatgagttacagttagaaattactggctttattattggagactgtgtcagaggtcttaaggatgaactagagaggaagttgtatgagcaaagctccattgtgaacagtctaagaaaaaattcgcaagaaactgtggctcagtgtgcttccatccgtgaagacctgattgctatttctaatatgctattaccttcagaagaggaacaccatattcctctgtgtagacatgaaagtttgggtaattggagcgacagatggaagttcagctttttcagaaagataccacaaaaggatcactctctatcttcctctgaggaaaatcagaaatctgcaacacagaaatctataagtcccagtgaagttatttcagaaaaatctgacttccgacatctgaagggcatgactggacaagaaattcttaactatttcagatctgagatcagtaaattgaaaatgttgcatgagctggatttgcaggagaaaacagaagagctgttcaaattcaaacgagagaaatggtcactggctctcaagtacgatgtagaatttgagcctttgaggaagagattccctgaagtcatttcaagatttgaccaaattatgtccaatggaatggaagcacctacaatcagtactagtgatgcagttgatgaaaggagcagattgaatagtagaattgattcactatactgtgaaaaccagcatcttaggaatttgcttgcagagaagacaaagaatgttcaggaattatcctgccagatatctgatgccagcaagaaaatgtcatctcaatattatctagagaaagaacatttgagacaagtcaagaacattaaagaagagtatgaggatctatatgttgaaagtacaataagagatgaaatttaccaaactgttacaagcaaattggttgatagtcatagggacatcttggaggagactacccaaattttgcatgctaaagtttcctcacttgaagctgcacattcagaaaaggacatggcgctgtgtttatctaacgaagaaaataggaagctgaaggaaaagttgtcaatactagaaaaggtgcatttcatcaaagataatcagcatgatcaattgctaatgaaacaagagagtgaggaaatgatactccgtgatattgagatggagccccacgtgccgccacaaagatcatgtcagatttctgatcaggatatgcagtatgaagaactcatcaagctgaatcagacattagagatggcctcaaccaccttaaaagaagttgaaacaaaaaagttggattacagtgacatcactagtgaaagaaagcaagaaaaacagttagattccatcctgatatctatcatggatttgtcaaaagaatttgtggagatggaacataaaatgtcagaagaaataaaaggaaatgagaaaaagacggagaatctaaatgatcggtgcaaccatatggtgcagcaggccatcgtactgacaaagaagggcctgtggtacaagcaaatgcttgagataagacgttctgagcttcaaaaggctgaatctgaggttgacgttttaggaggcaaggtcaatgcactcttaann

SEQ ID NO: 14270 - DNA, 1756 bp, Zea Mays
tcaatacagcagttcaaagatcctcacaattctgcagcacacacactgtacaaatacatcaccataagtcactcttattacagcccccacctttctccatcactcaaaaacacacacaagaggccggagatatcttcagcagtcagcaccacagttcagtgattttctggtgggaagctgttgctgattagtgcatatcaggttccacctggattctctctggtctagactttaactgggcagagaggctcccagcttctcagctcgactgatgctttttacatgttaaattccttttgtccctgaaaaaattgcatatatggtctcttttatatttgtctattatattgataactcacaatatgattcttctgttgaaatgcttgtacatggtcccttaagatcattcaatgatagccagaactcagaagggcagagtataattcataattgatgccgtgcatgcagctactggatgctttcttgaagacatgcaagcttgttgcaggtataagaagtagacaaaaagagaacttgcaagatacaacataagttggaatagctagattactgtgagttcgtgacgttagtttctaccacaccgtgactccctaactcttcttagaagacagcaaaagcagttaactataaccacaaatgaaggggcatcgctctctcccgtgggcggctcgggaggcgaaaccctagccgctgccccactctcccccgccctctccgtctcgccgctgccagaggggctggccgggttggccgcgcgggcccccatgacggcggcggcgaggcatcccctgttggcgttgagagctcccagattcgtgcggggaaggagctcgtggccaaggcttgatcttggtggccgtggtggtgctgtgcgacgtcgtgggcacctcatggggagattcgtgctgtgcggcgaggcatcccctgttggcgttccggagttttggcctgacaggttgtgctgggagcttcttggcgaaagcctcgcgacggtgacgccatgggcgcggttttccctcataagggcgtcgcacggtgaaagcccgatccatcttggacatgcgatgatggcgtcctcgatgtcactgcctaggcgccgtttttgaagttcgtctcggccacgttgttctcttttggttgcttttgcttctcggcgtccgatatatgggtggaggtgtggtcctccagcgtgaagtcggagctgctacatcagttaatgtgggtcgacaacgatgacataaggcgtgcccccttcttcgcggaccagtttgcttcggaggctgagcgttttgccgaggcagggcggaggatcaagtttggaagtcctattggtgaagaatcggaactgcctcgctcgggtgtctagaggcttggcaacgacgccgcgccgcggtcttcatccttctgtgccgtttttgggtatagacattgttggtttcctcatttggccttgtgttgctcgttttggagagtcggtgttgctcgtcctttgtgttgagctcgaccacaatgatcttgtatgagccttgtgtgttgggctaccattgtctaggttgcttgtgcaccctgtgtaggtaattgactcggttttccttaaaactaggtcaattcctttcttctttttaattgagaagtagagctcctgtcatcacattaaaaaaacatcaacactgatttattaaatggttatgtttcctgcagaatattttttatgaagtgcattgactagttattg

SEQ ID NO: 14271 - DNA, 1940 bp, Zea Mays
atcctcacaattctgcagcacacacactgtacaaatacatcaccataagtcactcttattacagcccccacctttctccatcactcaaaaacacacacaagaggccggagatatcttcagcagtcagcaccacagttcagtgattttctggtgggaagctgttgctgattagtgcatatcagctactggatgctttcttgaagacatgcaagcttgttgcaggtataagaagtagacaaaaagagaacttgcaagatacaacataagttggaatagctagattactgtgagttcgtgacgttagtttctaccacaccgtgactccctaactcttcttagaagacagcaaaagcagttaactataaccacaaatgaaggggcatcgctctctcccgtgggcggctcgggaggcgaaaccctagccgctgccccactctcccccgccctctccgtctcgccgctgccagaggggctggccgggttggccgcgcgggcccccatgacggcggcggcgaggcatcccctgttggcgttgagagctcccagattcgtgcggggaaggagctcgtggccaaggcttgatcttggtggccgtggtggtgctgtgcgacgtcgtgggcacctcatggggagattcgtgctgtgcggcgaggcatcccctgttggcgttccggagttttggcctgacaggttgtgctgggagcttcttggcgaaagcctcgcgacggtgacgccatgggcgcggttttccctcataagggcgtcgcacggtgaaagcccgatccatcttggacatgcgatgatggcgtcctcgatgtcactgcctaggcgccgtttttgaagttcgtctcggccacgttgttctcttttggttgcttttgcttctcggcgtccgatatatgggtggaggtgtggtcctccagcgtgaagtcggagctgctacatcagttaatgtgggtcgacaacgatgacataaggcgtgcccccttcttcgcggaccagtttgcttcggaggctgagcgttttgccgaggcagggcggaggatcaagtttggaagtcctattggtgaagaatcggaactgcctcgctcgggtgtctagaggcttggcaacgacgccgcgccgcggtcttcatccttctgtgccgtttttggctatgtacgcatggcagactgctattactactatgcccatcgcttggttcttttcatgagcaacagatgcctggaactgaggtatggaaacttcgtcatgaactgccatttgcatgggaggagaagggcctcaatgaactatgtggcatgctgaaaatagtagatggtgacataaagaaatgcgctgacaactgtggacatgtgatggcggtccaaaacaaacccaactttaagaaggataaatctcaaaagaagaatgacaaggctaaagatacgatctccaagccaaaccaaaagcccaaggctggaccagttgtagatgctgaatgtttttattgcaaagcagtacttggcctctattaagcatcgcgatggtaagtatacagtcgtagcagatatacttgctattcacattacagaaatttttattgctgattcttatactaattattgggtatttgatagcggatcgtttgcccatatttgcaattcgatgcaaggaattataaaaagtagaagcgtgaaaggataagttgattatcgcgtcgacaataatgcaagagttgttgctttgaccatcaggacgatgcaactccacctcccatcagtatttattttagagttaaataattgtcatctagtttctagtatgagtcgaaacattttatctccttcatgtttaatgaaggatggttattcatttgtgagtgaaaacaatggttgtgtgatctctaagaatgacatgtttgttgcttttgcatccattatgaatgagttatttatttt

SEQ ID NO: 14272 - DNA, 1496 bp, Zea Mays
aggggacaaccacaagcgcctaagatcccgtcctccgcgtcgagatctttgccgaggcggtgaccgtcgagggatcgccatggcgttgagggcgtcccccgtgtcgcatggcaccgcggcagcgccgctgccgcctttcgcgcggaggaggatggcccgtggggtggtggtggccatggcgtccaccatcaacagggtcaaaactgtcaaagaaccctatacccctccacgagaggtacatcgccaaattacccattcactaccacctcaaaagcgggagattttcgattcacttcaaccttgggccaaggataacctactgaacctactgaagccagttgaaaagtcatggcagccacaggacttcctaccagagccttcttctgatgggttttatgatgaagttaaagaactgagggagcgggcaaatgaaatacctgatgaatactttgtttgcttagttggtgatatggttactgaggaagccttacctacataccaaacaatgcttaacactcttgatggagtccgggatgaaactggtgcaagtccaaccacgtgggcggtttggacaagggcatggacagctgaagagaacagacatggtgacctccttaacaagtacatgtaccttactggacgggttgacatgaaacaaattgagaagaccatacaatatctgattggttccggaatggatcctggaactgagaacaacccctacttgggtttcctctacacatcattccaagaaagggcaacatttgtgtcgcatgggaatactgcaaggcatgccaaggagtatggtgatctcaagctggcccagatatgtggcacgatagcagccgatgagaagcgccacgaaacagcctacaccaagatagtcgagaagctcttcgagatggaccctgattacacagtgcttgcgtttgctgacatgatgaggaagaagatcacgatgccagcccatctcatgtacgacggtaaggacgacaacctgttcgagcacttcagcgcggtggcgcagaggcggctggatgatagagctcaagcgagggcgaagcaagcaccggttattcctttcagttgggtttatgaccgcaaggtgcagctttaatcaagaacgctaggcaatgtgggcatttactacgtatatcattttcagtcctggggttctctataagaaacagtctctaggttatctagcagggtagaattcaactactcgtggatctcactcggtgcaaagtagtgcaaagtacgctatctgttgttaccgtgcaagctgcagagtttggattactatgtgggcctggtggtggagaggaattctgtggggtgcctgcagccagttatgagtggcagctccatcgcaactgagttgttgtattgaatatgttacaggacctatagtaaccgaaagtaataatatggagtttgtatatcgacaagcttgctttggtgattgatgagaatctgaagtaataatatggagt

SEQ ID NO: 14273 - DNA, 1989 bp, Zea Mays
gttttgtttagatccattaactgataattattagctagctattagctattgtctgatttgatctaattaggtagataattagtatttactgctatagctaacaattagctattttattatctatacctgtttgaataaaaaaatataattatttgcaggagatctaaacagggacttagtaaaatttacggttctgtcaaggttgctacccatttttttgaaagtgttacacccatttgtacggttccatgaaaccatatggctggagttgcgaatgagccgccttggcacgctgggcttttggaaggccatcaattcttgcaccggctctggcgccacgcgcccaccaaacacacagggtggactgtcagagagacaggcaagccgagcgagcggagatttgagctgggcacgcggcgcgaaggccgaggggtcgtgcccaacggccttctcagtcagcccatctcgtgcccaccacccccttcgcatttcttcccttttctgtcccacccgtcttcatccctcggactacaaatgcggcgcaaccgtgggcgtatcagcacccgagcagtttgtagcaggatcctctcgctctcgccatcgcatcgcgcacagtagacactcaaaatccgattgccgagggggagaaggcggagaccgttgcaacggctagttgcggcggcccgatggacccgtcgtacgatggcagcgcccccgccgccggtggaagcgccgacgaccatggccaaactctctgggattggacagtagagcattgtgaacccaacgattcaagtcatgcagatgctactaaattcgtgtgggattgcctcaatcaagatgacgatgagctaatgggattgcttggaaatcaaaccccgttgagagactgccgtgatttctttgctgaccttggtgatttcacatgcaaggagaccttggacctggaggaatctcgggaatcaaagcggcggcgcacattagagtacccttcagagtctagtcagtcagaagttgggactcatgatgctgcttcaccttttgtcacatctgaggcagcagaaatttcattgctctgcactgataaaccacagagcttaaattgggatatgcaccacacttcaaataatttagatgaagcaccctaccggcaagaagatattctttctgaacattgctcttatggaactccagtgtacctcgagcctgatcaaacgccttgtagtcaggagagcattgcatgtataaatgatcaatctggtatttcaggaacaagtgagactggaccaatgacagaaagtttcataatgcaggaaactagaaagctttgtacactcaaagtgtccaaagctcaacactagttaaggtgaaggaaaacttaactacctcagtagcatatccttttactcttatcaaaccatcttgggaggaaggcgatgttaccttgcaggatataaatcagcgaattcgtgctcctcctaagaaggcccccgagatccttggaacttcagcattctctggcaagccagtgattggcaagacaagaatcagaacagaaggggggaaaggaagcatcacaatactaagaacaaagggctgagaaccggaaaataccttcgatccttatttatctgctagtctctccatttatcagatgagaaaggggagaaggcagctccttggtggtcaattgtgcaagtctgagcacctgaaacttccattgattcacagttcaaggctgagcctgaggatgccattgattcttatttatctgccattctctcgattgcttttggcactttggtcaatgtgcagacctctgtagctttccatcatttttttgttttagttttgcaccgtgggtgtcttgtgaattaatgtagacgcaaaacaacaactttcggcattcttctggtgtatttatgacatgtggtcaatgatatatatacatcaaactgaagtcaatagaattaatgtgttatattccat

SEQ ID NO: 14274 - DNA, 1475 bp, Zea Mays
attttttacaatcctatccaccaaaccaggcctcaactgcacgtctcccgctttgtgctattcccgcagccagaaaaccctaacttcccggccgccgctttcctttccctcgatccacagctcgcgccgttcctgcaagtgcgcacccatcgtcccacctacgcactgccgcccaacgatctacgagctgccatggctaactcggcaccgggaggaatgaggtcgttcctgcaggccgtgtctacggtcaccgaggaggcgccgacgccactccgcgtcgtccagatggagggcctggctgtactgaagatcatcaagcactgtgaggagtttgcgccagctttagttacaggtcaattgcttggtttggatgttggtagtgttctggaagtgaccaactgttttccgttccctatcagggaagaggatgatgaagcagatgcagatggtgccaattatcagcttgagatgatgaggtgtttgagggaagttaatgttgacaacaatactattggatggtatcagtcttgcttgcttggatcttttcaaactgtggaactgattgaaacatttatgaactatcaggagagcatcaggagatgtgtgtgcattgtctatgacccatctagatctagtcaaggcgtgctagctctcaaagccttaaagcttacagactcgtttatggatctttaccgtaacaatggtttaactggggagaagttaagggagaagaaattgtcctgggttgatatttttgaggagataccaataaaagtttccaactcagcgcttgtcagtgcctttatgaaggagctggaacctgagtcacctgttacccagtgtgacctggaccgacttaaattgtcaaccgccccctttatggaaaggaacttggaatttctgattgggtgcatggatgatctttcatcagagcagaacaagttccaatattataaccgcaatctctcaagacaacagtcacagcagcaggcatggcttcaaaagagaaggcaggagaacatggcgaggaaagcagctggtgaggagccactaccagaagaagatccatccaatcctatatttaagcctattcctgagccctcacgattggagggctatctagtaactaatcagatctccagttactgcaaccatatcaacggggttgctggtcagaatttcgacaggctatacctgatgaaggccttgcatgaggattagaagactgggctgtgatgaatgctgttagaattagcttgtgatactgctcaaaatcgtaattttgtgatgtacctttacatggggcgtgcctgtcctctacttaatgtttccatggaccagatggttagctcgtgatacttaatgtacttgcatatgtatgcgttgccgtataaaccaattttctccattagtatttttgtgacgctcagtttgaagtccatagtgtagcttgttttcgttctcgatttgggctg

SEQ ID NO: 14275 - DNA, 1439 bp, Zea Mays
aactgcacgtctcccgctttgtgctattcccgcagccagaaaaccctaacttcccggccgccgctttcctttccctcgatccacagctcgcgccgttcctgcaagtgcgcacccatcgtcccacctacgcactgccgcccaacgatctacgagctgccatggctaactcagcggcaccgggaggaatgaggtcgttcctgcaggccgtgtctacggtcaccgaggaggcgccgacgccactccgcgtcgtccagatggagggcctggctgtactgaagatcatcaagcactgtgaggagtttgcgccagctttagttacaggtcaattgcttggtttggatgttggtagtgttctggaagtgaccaactgttttccgttccctggaagaggatgatgaagcagatgcagatggtgccaattatcagcttgagatgatgaggtgtttgagggaagttaatgttgacaacaatactattggatggtatcagtcttgcttgcttggatcttttcaaactgtggaactgattgaaacatttatgaactatcaggagagcatcaggagatgtgtgtgcattgtctatgacccatctagatctagtcaaggcgtgctagctctcaaagccttaaagcttacagactcgtttatggatctttaccgtaacaatggtttaactggggagaagttaagggagaagaaattgtcctgggttgatatttttgaggagataccaataaaagtttccaactcagcgcttgtcagtgcctttatgaaggagctggaacctgagtcacctgttacccagtgtgacctggaccgacttaaattgtcaaccgccccctttatggaaaggaacttggaatttctgattgggtgcatggatgatctttcatcagagcagaacaagttccaatattataaccgcaatctctcaagacaacagtcacagcagcaggcatggcttcaaaagagaaggcaggagaacatggcgaggaaagcagctggtgaggagccactaccagaagaagatccatccaatcctatatttaagcctattcctgagccctcacgattggagggctatctagtaactaatcagatctccagttactgcaaccatatcaacggggttgctggtcagaatttcgacaggctatacctgatgaaggccttgcatgaggattagaagactgggctgtgatgaatgctgttagaattagcttgtgatactgctcaaaatcgtaattttgtgatgtacctttacatggggcgtgcctgtcctctacttaatgtttccatggaccagatggttagctcgtgatacttaatgtacttgcatatgtatgcgttgccgtataaaccaattttctccattagtatttttgtgacgctcagtttgaagtccatagtgtagcttgttttcgttctcgatttgggctg

SEQ ID NO: 14276 - DNA, 1242 bp, Zea Mays
agacaatgtagcttcaggcgggagtaaataggggttcgagccccagcctcttcatattatgcgggctgtactgaagatcatcaagcactgtgaggagtttgcgccagctttagttacaggtcaattgcttggtttggatgttggtagtgttctggaagtgaccaactgttttccgttccctatcagggaagaggatgatgaagcagatgcagatggtgccaattatcagcttgagatgatgaggtgtttgagggaagttaatgttgacaacaatactattggatggtatcagtcttgcttgcttggatcttttcaaactgtggaactgattgaaacatttatgaactatcaggagagcatcaggagatgtgtgtgcattgtctatgacccatctagatctagtcaaggcgtgctagctctcaaagccttaaagcttacagactcgtttatggatctttaccgtaacaatggtttaactggggagaagttaagggagaagaaattgtcctgggttgatatttttgaggagataccaataaaagtttccaactcagcgcttgtcagtgcctttatgaaggagctggaacctgagtcacctgttacccagtgtgacctggaccgacttaaattgtcaaccgccccctttatggaaaggaacttggaatttctgattgggtgcatggatgatctttcatcagagcagaacaagttccaatattataaccgcaatctctcaagacaacagtcacagcagcaggcatggcttcaaaagagaaggcaggagaacatggcgaggaaagcagctggtgaggagccactaccagaagaagatccatccaatcctatatttaagcctattcctgagccctcacgattggagggctatctagtaactaatcagatctccagttactgcaaccatatcaacggggttgctggtcagaatttcgacaggctatacctgatgaaggccttgcatgaggattagaagactgggctgtgatgaatgctgttagaattagcttgtgatactgctcaaaatcgtaattttgtgatgtacctttacatggggcgtgcctgtcctctacttaatgtttccatggaccagatggttagctcgtgatacttaatgtacttgcatatgtatgcgttgccgtataaaccaattttctccattagtatttttgtgacgctcagtttgaagtccatagtgtagcttgttttcgttctcgatttgggctg

SEQ ID NO: 14277 - DNA, 1311 bp, Zea Mays
cactcgtcctcatacattttgcactggttcatctacatcgtcgaccctgccaccgctgcgttgctccacgacgccggcgagtctttcgtctccgacgagccctccagctgtactgaagatcattaagcactgtgaggagtttgcgcctgctttagttacaggtcaattgcttggtttggatgtcggtagtgttctggaagtgaccaactgttttccattccctatgagggaagaggatgatgaagcagatgcagatggtgccaattatcagcttgagatgatgaggtgtttgagggaagttaatgttgacaacaatactattggatggtatcagtcttgcttgcttggatcttttcaaactgtggaactgattgaaacatttatgaactatcaggagagcataaggagatgtgtgtgcattgtctatgacccatctagatctagtcaaggcgtgctagctctcaaagccttaaagcttacagactcgtttatggatctttaccgtaacaatggtttaactggggagaagttaagagagaagaaattgtcctgggttgatatttttgaggagataccaataaaagtttccaactcagcgcttgtcagtgccttcatgaaggagctggaacctgaatcacctgttactcagtgtgacctggaccgacttaaattgtcaactgccccctttatggaaaggaacttggaatttctgattgggtgcatggatgatctttcatcagagcagaacaagttccaatattataaccgcaacctctcaagacaacagtcacagcagcaggcatggcttcaaaagagaaggcaggagaacatggcaagaaaagcagctggcgaggagccactgccagaagaagatccatccaatcctatatttaagcctattcctgagccatcacgattggaaggctatcttgtaaccaatcagatctccagttactgcaaccatatcaacggggttgctggtcagaatttcgacaggctatacctgatgaaggccttgcatgaggattagaagactgggttgtgactgaaggctgctagatttagctcgtgatactgcttaaaatcacaattttgcgatgtaccttacatgagcgcacctgtcttgtacttaatgtttccgattagatggttagcacacattttgacacacttcctaattataccagcattcttggtagtaattcaaaaatgatcactttgattacttattagttaatgtatgtgttgccgtataaaccaatgttctccattagtaattttgggacgcacagtttaaagtccatactgtac

SEQ ID NO: 14278 - DNA, 1329 bp, Zea Mays
gtctttcgtctccgacgagccctccacagcggcaccgggaggagtgaggtcgttcctgcaggccgtgtctacggtcaccgaggagacgcggacgccgctccgtgtcgtccagatggagggcctggctgtactgaagatcattaagcactgtgaggagtttgcgcctgctttagttacaggtcaattgcttggtttggatgtcggtagtgttctggaagtgaccaactgttttccattccctatgagggaagaggatgatgaagcagatgcagatggtgccaattatcagcttgagatgatgaggtgtttgagggaagttaatgttgacaacaatactattggatggtatcagtcttgcttgcttggatcttttcaaactgtggaactgattgaaacatttatgaactatcaggagagcataaggagatgtgtgtgcattgtctatgacccatctagatctagtcaaggcgtgctagctctcaaagccttaaagcttacagactcgtttatggatctttaccgtaacaatggtttaactggggagaagttaagagagaagaaattgtcctgggttgatatttttgaggagataccaataaaagtttccaactcagcgcttgtcagtgccttcatgaaggagctggaacctgaatcacctgttactcagtgtgacctggaccgacttaaattgtcaactgccccctttatggaaaggaacttggaatttctgattgggtgcatggatgatctttcatcagagcagaacaagttccaatattataaccgcaacctctcaagacaacagtcacagcagcaggcatggcttcaaaagagaaggcaggagaacatggcaagaaaagcagctggcgaggagccactgccagaagaagatccatccaatcctatatttaagcctattcctgagccatcacgattggaaggctatcttgtaaccaatcagatctccagttactgcaaccatatcaacggggttgctggtcagaatttcgacaggctatacctgatgaaggccttgcatgaggattagaagactgggttgtgactgaaggctgctagatttagctcgtgatactgcttaaaatcacaattttgcgatgtaccttacatgagcgcacctgtcttgtacttaatgtttccgattagatggttagcacacattttgacacacttcctaattataccagcattcttggtagtaattcaaaaatgatcactttgattacttattagttaatgtatgtgttgccgtataaaccaatgttctccattagtaattttgggacgcacagtttaaagtccatactgtac

SEQ ID NO: 14279 - DNA, 2042 bp, Zea Mays
cgaaagaaggcgcgcggttgctgtcgttgattcttgatggttggtggcttggtgccctgccagctagtgcttcttcatcctttctctaacgagtgagggacgatgatgcactcccagtcgcaggctcccactcccaccttgcggtgctgccgcactctagctgagctgccagctcggatctccatggcctctcttttcctcctcctcctcgtcgtcgtggcggcgctcctctggccgcctgccgtcgcggcgcccgaggagcacctcgtcaccggtctcccgggcttccatggcgccttcccctccaagcactactccgggtacgtgaccgtggacgagcgcagcgagcggagcctcttctactacctggtgctgtcggagcgcgacccggccggcgaccccgtcgtggtctggctcaacggaggtccgggatgctccagtttcgacggcttcgtctacgggaacggacccttcaatttcgagcctgggagctcgcctggaagcctgcccaagctgcagctcaacccctacagctggtcaaaggtctcgaacatcatgtacctagactctcctgccggtgtggggatgtcgtactcgctgaacagatcggattatgtaacaggtgacctgaaaaccgcagctgacgcccacaaattcctgtcgaagtggttcgagttgtaccccgagtttcagttgaacccgttctacatctcgggggagtcgtacgcaggggtctacatccccacgatcactgacgaagttgttaaaggcattgagagaggtgtgaagccaagaatcaatttcaagggctatctgattggcaatccgttaactgacgtggactacgatttcaattccttcgtgccatttgcgcatgggatgggcctcatctcaaccgacatgtatgaggatgtcaaagcgtcctgccgcggcacattcttcggcgccgtggatgatctgtgccaggagaagatcgacagagtgcgctgggaactgaaggacctgaacaagtacaacatccttgcgccttgctaccatcatcccgaaatccaagaggtagagttcagcaacagcagcttgccgcggagtttcagaaggctaggagagacggacaggccgtttccagtgaggaagcggatgtcggggcgttcttggccgctccgtcttgctctcaaggacggccacgtccccatgtggccaggccttagtggcagatcacttccctgcacggtgatgaagtcgctacggcgtggctggacgacgaagatgttagagctgcgattcatgccaaaccaaaaagcttaattggatcatgggaactgtacactgcaaggatagacttcactcatgatacagggacgatggtgagctaccacaagaagtttacggctttgggatatcgcgtgctaatctacagcggagaccatgacctgtgtattccttaccctggtaccgaagcgtgggtgaaatcaataggctaccaagttactgatagatggcggccatggtacttcggagaccaagttgccggatatacagaaggatacggtcacaatattaccttcctcactataaagggagccggacatgctgtgcccgagtacaagcccaaggaggctctcgcgttctacagtcgctggctggcaggagagaagttctaagaagaccaggaccattacagatttcacaagccttcagttattcgtcgctcatcggacaattactgtgtgcatggactcagagtagatgtatgcagatcagatccgttcactcggctgtgtaagcctctgtatacagctgaagagatttttaacgtgggatcttcacctctactcaattaaccatgggtcagatccattggcaatattattctactattatataaagaataatttaaatatacagaaataaatactcacaagatatcaattaaccatgggttagtgacaaaagaggcatggtcacagcataaatatggatggatgaaagtagtgttagaagcagagagcgagaggggtggggtcaagagtgatgtaaatggg

SEQ ID NO: 14280 - DNA, 1964 bp, Zea Mays
cgaaagaaggcgcgcggttgctgtcgttgattcttgatggttggtggcttggtgccctgccagctagtgcttcttcatcctttctctaacgagtgagggacgatgatgcactcccagtcgcaggctcccactcccaccttgcggtgctgccgcactctagctgagctgccagctcggatctccatggcctctcttttcctcctcctcctcgtcgtcgtggcggcgctcctctggccgcctgccgtcgcggcgcccgaggagcacctcgtcaccggtctcccgggcttccatggcgccttcccctccaagcactactccgggtacgtgaccgtggacgagcgcagcgagcggagcctcttctactacctggtgctgtcggagcgcgacccggccggcgaccccgtcgtggtctggctcaacggaggtccgggatgctccagtttcgacggcttcgtctacgggaacggacccttcaatttcgagcctgggagctcgcctggaagcctgcccaagctgcagctcaacccctacagctggtcaaaggtgacctgaaaaccgcagctgacgcccacaaattcctgtcgaagtggttcgagttgtaccccgagtttcagttgaacccgttctacatctcgggggagtcgtacgcaggggtctacatccccacgatcactgacgaagttgttaaaggcattgagagaggtgtgaagccaagaatcaatttcaagggctatctgattggcaatccgttaactgacgtggactacgatttcaattccttcgtgccatttgcgcatgggatgggcctcatctcaaccgacatgtatgaggatgtcaaagcgtcctgccgcggcacattcttcggcgccgtggatgatctgtgccaggagaagatcgacagagtgcgctgggaactgaaggacctgaacaagtacaacatccttgcgccttgctaccatcatcccgaaatccaagaggtagagttcagcaacagcagcttgccgcggagtttcagaaggctaggagagacggacaggccgtttccagtgaggaagcggatgtcggggcgttcttggccgctccgtcttgctctcaaggacggccacgtccccatgtggccaggccttagtggcagatcacttccctgcacgagtgatgaagtcgctacggcgtggctggacgacgaagatgttagagctgcgattcatgccaaaccaaaaagcttaattggatcatgggaactgtacactgcaaggatagacttcactcatgatacagggacgatggtgagctaccacaagaagtttacggctttgggatatcgcgtgctaatctacagcggagaccatgacctgtgtattccttaccctggtaccgaagcgtgggtgaaatcaataggctaccaagttactgatagatggcggccatggtacttcggagaccaagttgccggatatacagaaggatacggtcacaatattaccttcctcactataaagggagccggacatgctgtgcccgagtacaagcccaaggaggctctcgcgttctacagtcgctggctggcaggagagaagttctaagaagaccaggaccattacagatttcacaagccttcagttattcgtcgctcatcggacaattactgtgtgcatggactcagagtagatgtatgcagatcagatccgttcactcggctgtgtaagcctctgtatacagctgaagagatttttaacgtgggatcttcacctctactcaattaaccatgggtcagatccattggcaatattattctactattatataaagaataatttaaatatacagaaataaatactcacaagatatcaattaaccatgggttagtgacaaaagaggcatggtcacagcataaatatggatggatgaaagtagtgttagaagcagagagcgagaggggtggggtcaagagtgatgtaaatggg

SEQ ID NO: 14281 - DNA, 1420 bp, Zea Mays
ttggtccccgtccccttcctcgcctcgtgcgctccgcccgtcgcgccgtcatcgcggagcttccaaagcccccgtcccccaatagactcctccccatccgtgctctgctccgtcacggctcaaatactccgcctgcatctccaaagcacactgctccctctggcttcccgcctcctcttcggctccttcgcgtcccgacgccccctcatggccaccgccgccgccaccgcagcagcagcagcagtctcctccccggctgcgcgtggagcagccggggccgccgccgcctcccgccgggggttcgtcacgtttggtggaggcgccgcccgcttctctcccacgctgcggtccggccgtgggttctctggtgtgcaaacccatgttgctgctgttgaacaagcagttgtaaaagatgctaccaagctggaagctccagttgttgttgttacaggtgcatctagagggattggtaaggcaactgctctagcccttggaaaagcaggatgcaaggttctggtaaactatgcccggtcctcgaaagaggctgaagaggtctccaaagagattgaagcatctggtggtgaggctatcaccttcggaggagatgtttcaaaagaagctgatgtagagtctatgatgaaagcagctctagataaatggggaacaatagatgtgctggtaaataatgcagggattacacgagacacattgttgatgaggatgaagaaatctcagtggcaagacgtaattgatctgaatcttactggcgtcttcctttgtacacaggctgcaacaaaagtaatgatgaaaaagagaaaggatttgaaagtacaaacgaaacctaggattagaagcatgtatgaattatgggaaaaattatcaacattgcatctgtagttggtcttactggcaatgttggccaagctaattatagcgcagccaaggctggagtgattggtttcacaaaaacagttgccagggagtatgcaagcagaaatatcaatgtgaatgctattgcaccagggttcattgcatctgatatgactgccgaacttggagaagagcttgagaagaaaatcttgtcaaccattccgttagggagatatggccaaccagaggaagttgcagggttggtcgagttcctggcccttaaccccgcagctagctatatgactggacaggtgcttacaattgacggagggatggtaatgtaagatttgagttagcttgatgcacttctacttttgctgagcatttaatgttgaacacccttgttgtgcacgggcgattttggacaacaaattagtgttgtctctttctttgtaatactctctggtaataaatctagcatgtggaatggaagttgaaatctgggttttcgtgtatattctgtgccaacttgtcaatgctatttgactat

SEQ ID NO: 14282 - DNA, 1363 bp, Zea Mays
ttggtccccgtccccttcctcgcctcgtgcgctccgcccgtcgcgccgtcatcgcggagcttccaaagcccccgtcccccaatagactcctccccatccgtgctctgctccgtcacggctcaaatactccgcctgcatctccaaagcacactgctccctctggcttcccgcctcctcttcggctccttcgcgtcccgacgccccctcatggccaccgccgccgccaccgcagcagcagcagcagtctcctccccggctgcgcgtggagcagccggggccgccgccgcctcccgccgggggttcgtcacgtttggtggaggcgccgcccgcttctctcccacgctgcggtccggccgtgggttctctggtgtgcaaacccatgttgctgctgttgaacaagcagttgtaaaagatgctaccaagctggaagctccagttgttgttgttacaggtgcatctagagggattggtaaggcaactgctctagcccttggaaaagcaggatgcaaggttctggtaaactatgcccggtcctcgaaagaggctgaagaggtctccaaagagattgaagcatctggtggtgaggctatcaccttcggaggagatgtttcaaaagaagctgatgtagagtctatgatgaaagcaataaatggggaacaatagatgtgctggtaaataatgcagggattacacgagacacattgttgatgaggatgaagaaatctcagtggcaagacgtaattgatctgaatcttactggcgtcttcctttgtacacaggctgcaacaaaagtaatgatgaaaaagagaaagggaaaaattatcaacattgcatctgtagttggtcttactggcaatgttggccaagctaattatagcgcagccaaggctggagtgattggtttcacaaaaacagttgccagggagtatgcaagcagaaatatcaatgtgaatgctattgcaccagggttcattgcatctgatatgactgccgaacttggagaagagcttgagaagaaaatcttgtcaaccattccgttagggagatatggccaaccagaggaagttgcagggttggtcgagttcctggcccttaaccccgcagctagctatatgactggacaggtgcttacaattgacggagggatggtaatgtaagatttgagttagcttgatgcacttctacttttgctgagcatttaatgttgaacacccttgttgtgcacgggcgattttggacaacaaattagtgttgtctctttctttgtaatactctctggtaataaatctagcatgtggaatggaagttgaaatctgggttttcgtgtatattctgtgccaacttgtcaatgctatttgactat

SEQ ID NO: 14283 - DNA, 693 bp, Zea Mays
ctcaacttcccatgggattacacgagacacattgttgatgaggatgaagaaatctcagtggcaagacgtaattgatctgaatcttactggcgtcttcctttgtacacaggctgcaacaaaagtaatgatgaaaaagagaaagggaaaaattatcaacattgcatctgtagttggtcttactggcaatgttggccaagctaattatagcgcagccaaggctggagtgattggtttcacaaaaacagttgccagggagtatgcaagcagaaatatcaatgtgaatgctattgcaccagggttcattgcatctgatatgactgccgaacttggagaagagcttgagaagaaaatcttgtcaaccattccgttagggagatatggccaaccagaggaagttgcagggttggtcgagttcctggcccttaaccccgcagctagctatatgactggacaggtgcttacaattgacggagggatggtaatgtaagatttgagttagcttgatgcacttctacttttgctgagcatttaatgttgaacacccttgttgtgcacgggcgattttggacaacaaattagtgttgtctctttctttgtaatactctctggtaataaatctagcatgtggaatggaagttgaaatctgggttttcgtgtatattctgtgccaacttgtcaatgctatttgactat

SEQ ID NO: 14284 - DNA, 1145 bp, Zea Mays
atattctaatctgtgtacatagaatttctgtttgcatttgctcacttctgctgttcttcaaatttggatacaatagcatactgggaagataggttgaggagttggggctatgatccactgtttctaagtgttgataagcaatcaggatttactgctcttgaagagatgttggaaggacaaacaactgtagttgttggtccaagcggcgttgggaagtccagcctgatcaatgcactgaggtgtaaccaggacatatcagaagaagatccaatacataaactagttgaacagaatagtaaatggtttggtgaacagcgtgttggaactgtgtccaagaaaagtggtaaaggaaagcacacaacgcgccatgtctcgttgcttcctatagctagcggaggcttccttgctgatactcctggatttaaccagcctagtttgatgaaagtgacaaaaaagagtcttgcagaaacatttcctgagataagaaaagcgctgaaagagaacgagcccaaaaaatgcttatttaatgattgtgttcacctgggtgagcatggatgtgctgtgaagggggactgggaaaggtatccatactatctccagatgcttgatgagatcaaaattagagaagaaatccagctacggacatttggaacaaaaagagaaggtgatgtcaggtacaaaacaggtgtcatgggggtgaagcaagcagagcctcgtcttgaactcaagaagcacaggagggtgtctagaaagaagattaaccaatcgattcttgacgaaatcgaagatgatgttgatgacctcgatgatgactaccagtttgacgtcaagcagcgttctaggaaatgataatcttttttcatctgatgatctaacggcatgaaggaacctttgggtgctgtacacagttggttttgtagtgccaccaccatgcccttgagcagtatgctgatcactgtaagtagaagcgtaatggccggaacccggggtgtcttgacgttgctccagacgtttttctttgcggtagaacgttaagggcatgtttggaaacataatttttttagtatcaagataataccgtgatggcaacgactgctatacaagcagtctttctatgcaagcgtgcaagcaaaccatctaatcta

SEQ ID NO: 14285 - DNA, 1095 bp, Zea Mays
ctcacttctgctgttcttcaaatttggatacaatagcatactgggaagataggttgaggagttggggctatgatccactgtttctaagtgttgataagcaatcaggatttactgctcttgaagagatgttggaaggacaaacaactgtagttgttggtccaagcggcgttgggaagtccagcctgatcaatgcactgaggtgtaaccaggacatatcagaagaagatccaatacataaactagttgaacagaatagtaaatggtttggtgaacagcgtgttggaactgtgtccaagaaaagtggtaaaggaaagcacacaacgcgccatgtctcgttgcttcctatagctagcggaggcttccttgctgatactcctggatttaaccagcctagtttgatgaaagtgacaaaaaagagtcttgcagaaacatttcctgagataagaaaagcgctgaaagagaacgagcccaaaaaatgcttatttaatgattgtgttcacctgggtgagcatggatgtgctgtgaagggggactgggaaaggtatccatactatctccagatgcttgatgagatcaaaattagagaagaaatccagctacggacatttggaacaaaaagagaaggtacaaaacaggtgtcatgggggtgaagcaagcagagcctcgtcttgaactcaagaagcacaggagggtgtctagaaagaagattaaccaatcgattcttgacgaaatcgaagatgatgttgatgacctcgatgatgactaccagtttgacgtcaagcagcgttctaggaaatgataatcttttttcatctgatgatctaacggcatgaaggaacctttgggtgctgtacacagttggttttgtagtgccaccaccatgcccttgagcagtatgctgatcactgtaagtagaagcgtaatggccggaacccggggtgtcttgacgttgctccagacgtttttctttgcggtagaacgttaagggcatgtttggaaacataatttttttagtatcaagataataccgtgatggcaacgactgctatacaagcagtctttctatgcaagcgtgcaagcaaaccatctaatcta

SEQ ID NO: 14286 - DNA, 1448 bp, Zea Mays
tcaccacctcgcgatttgcgatccctttccaacaagatcaccggcaccaccacttgcattggaatcgtgtgagccacatggacatggaggaacagttgctgcacctggagcacttcatgcccagcagcccgggcttctttgacgtcggcagtggccacgaccccgcccacttcccgaacggcgggttattcgtcgagcaggtcggcgccaccgacgacggcgggtgggtggaggaactcatgcagctgggcgaggagctgttcggcggtccgggcgatggcggcatcatgggcgacgccgacgaccactaccagcagtggcagtgcgacgacgacgtcgacggcggctccccagacggcggtccgccaccgagcgtgtccttggacggcgacgacgcgagcccaggggagcaaggcgccggggagctcgcctccgagccgcaccgcgaggacggcgacgacgtgtcgggcgcgacgcggaagcggagggaccggtccaagaccatcgtgtcggagcggaagcggagggtccggatgaaggagaagctctacgagctcaggtcgctcgtccccaacatcacaaaggtgaggctagctccggtctggacttcggagttcggacgactgttcgctggggagctcggtcattcgattcatgtcgtccccctgcatgcatgtgcgcgccatgtgcagatggacaaggcgtccatcatcgccgacgcggtggtgtacgtgaagaacctccaggcgcacgccaggaagctgaaggacgaggtcgccacgctggaggcccggccgagatcgcctacccgacaggaccagccgcagctgcagcacggccggagcgcggggcccggccgacgacgccagcagcagcagcaggtggagcgccgcgacgcggggagcgcgggcgccggcgcccgggtgacgcacgtgggcgcggcgcaggtcggcgacggcaggttcttcgtgaccgtggagtgcgagcggcgggacggcgtggcggcgccgctctgcgcggccgccgagtcgctgctgtgcttccgggtggagagctccagcatcggccggtcggggccggaccgcgtcgtgtccacgctcacgctcaaggtgagcgaacaagtaggagatgcagccatcggcgaggcctccgtgaagcattggatgatggcggctcttatcagggaaggcttccggcccgaagcgacggtccagatctcatgatccgatccacctggcggttcaccggctgctcctctttaaaggctgctgtaaatgtctggagtgtttctagagggactcccttcccttcgtccatcgactatctccgcttctactccctgtttcaatcaccggctgcttctgtttctaggtgatgcgtagcaccttcttaatgtgatctcgaccgttcatccgacttatccgatggtatcgaccgttgctttccca

SEQ ID NO: 14287 - DNA, 890 bp, Zea Mays
gggagcccatggagcagggaggtggatcctctacaacccgtgcttcttcgtctactgctagcttctcacctaccgcagcaatctgtaggcgcaacatctgtaggcggcgccgcagcaacccgtgcgttctttgttagatctctactgctagcttctcggcggcgtagtaagcagacggcggcccagatctgccgcggaggagctcgaccgcgatggagagggtttcatcagctctagaaatggatgaggctgcctcaactgatcaatcaagcagattaacaaaaagaagggctaaagtttgggattacgttgatacagaggtagtagatgggaaagagaaggcagtctgcaaatattgtaaggtccacttatcttctgctgtgggtaaaggtacaactcatctgaataggcacatttttgtgtattgccatgcaattccacaagaagagagacaaatgttcttagcgacccaaaaaacaaagcctggcgatgatcatgttttcgacccagtagtctttcatggtctaatagccaagtacttccttagcgcagagatttcatttcgaaagtgtgaagatccatcctggaaagaaatgataatttactatcaaccatcttttcgattagtcggtcgacagactgtccgttcagattgtgtgttgttgtatgaagaggagaagttgcagttaattgagcagtttacaaagttgaaatctcatgttagtttgactgctgatctttgaaaaacatgtgggttgtattgaaaaattaatacttgcaaaaaactcataaatttgaaggatgtttattaatatttgcatgcagcataacattgaattcagtttgttaaaacttaatgcgcatgtatcgttttatttcaaagataattt

SEQ ID NO: 14288 - DNA, 506 bp, Zea Mays
aagcagtctgatcaatgtcagcaacgaaacatgacgaaatgctacaaaaccagacagaagcaatattgctgaaacgtacaaaaaacatgattcatataatacttctttcaaaagtaggagggcacgagccaaacatcgaaacccaatgctggaaaactgcacagcaatgtcaaagcaaatgcacttgggttcagaaagaaactgccggaaaatgagtatctacaatgtcaaaccaaaaagaaaaagaaaaaaaaaccctcactgcatggctgaaacaggccagattgcataacccggtgcatgaaagggaaataacaccatataatgtcgtacaaggcaacggagtaccagtggtccttcactaccgtccattctcaggaggtaaggttgtcttgctcactatgcccttgctaaaatagtctgcaatgacagagaagccgtccttggaacccctcaactgcctgaaaaagagatcatggtccctggcgttttgctctagcttctgc

SEQ ID NO: 14289 - DNA, 656 bp, Zea Mays
gcgcccagccggagttccgccgtcagcgcccctggtcccggtcctcggcgcgccgctccttcagctcggccgcctctccttggccgcggtttcctccccaagatccttcctgctcgccctccagcttccgtgcgcgcgcatctctggcctccgctcgaatcccgcccgtccgcgctctgtccagctccagctcgccatggtgttgtgcccctcaagcttgcgaagctcccttgtgtgcgcgcccagccaaggttcctctctgcgtgcgtgcgaactccgttgcgagcgtcgatctgtacccacaaagtctcgccggtgctcgactggctcggcctgaccgtcgccctgctgtttcatgccctagaccgttaaatcgccgttaatcttgtcgtgcacggtgccgtctcgaacctgccatgtccgttgccggtcgacgaccccgccctgctgcttatcccgtcgccaagctgtgtgccgctgttccgtgacctcgacggtgcgcaaggtcgctcgccccagaaccacatcgccgtcgtggcttttggagttcatcgtgacgcgctgctgatgatctgcatattacgggagatcttcacaagttcacgcagcttcgtggtacgttaattaatcacgttatgcggaggactagaactgag

SEQ ID NO: 14290 - DNA, 386 bp, Zea Mays
ccatggcctcaagctgaatgagctcgcccccatgtccgatggcagttgtctctgcccctcctccctgtttttgtgccagccaagttcgtccagccccttgccgctccatctcatcagcaccgtgcagctcgcttccatggccgttccctgctcgttcttcctggcgcgcgtgctcttcccctgcgctcgccgacgctcctccctcgcccatgccgcagcgctccagctcgcatccaatccctgcgctcatgcttttccccaagccaagcacgtttgggtgttgacggctccagtctcctagtcgagctcttgctcagcgcctgacgccgctgctccctggtgctccctgctcaccagcagaagcgcccagccggagttccgccgtc

SEQ ID NO: 14291 - DNA, 3487 bp, Zea Mays
cgtttgaaatccgttgcagcgttttcatatttcgtttcagcgaaaactcgtcaaatagaaaaattggcatcaaaattttcgaaatctcacaattgggccttctccgataaggcgataaccgaaccgattccgtgaaccgcccccgaactttccatcgaccttttctcccctaaaaaaaaccgagcgattccaaatcagactgccttccggttccccatctcccctccctcagcgcagactcagccatggcttccgccgaaaccctagcccgctccccctcgcgcgagccttcctccgacccgccccgcgcaggctcttccgagccccaccacaacggcgccggtgactcgtctcgccgccgccgccgcagccgctgggagcagtctaacgacgactccgccaacaactccggcggcgagggcggggccgtgggccggaagcgcaaaacgcggtgggccgaggaggagccgcgcccagccatcgcgctgccggacttcatgaaggacttcgcggccgagatggaccccgaggtgcacgctctcaacgcgcgcctcctcgacatctcgcgcctgctgcagtcgggcctcccgctcgacgaccggcccgagggcgcgcgctctccgtcccccgagcccgtctacgacaacttcggcatccgcataaacacccgcgaataccgcgccagggagcgcctcaaccgcgagaggcaggatattatctcgcagctcatccgccgcaaccccgccttcaagcccccctccgactaccgcccacccaagctccagaagaaactctacatccccatgaaggaataccccggctacaactttatcggcctcatcattggccctcgtggcaacacgcagaagcgtatggagaaggagactggtgccaagattgtcattagggggaagggtagtgtcaaggaagggaagtttctgcagaagagggacctcaagccggatcccagtgagaacgaagatctccacgtgcttgttgaggcagagacgcaggaggcactcgatgcggctgctggtatggtggagaagctgctcaccccggtggatgaggtgctcaatgagcacaagcggcagcagctccgggagcttgccgctcttaatggaacaattagggacgacgagttttgtagaacatgtggtgaggctggtcacaggcagtatgcttgccctaacaagatgaacacgtttaagagtgatgtgcagtgcaagatctgtggggatggtgggcacccgactattgattgtccagtcaagggcacttctggtaagaagatggatgatgaataccagaacttcctggctgagcttggtggcggcagtgcacctgagtccatgaacaaatctggtggtccaatgttggctcttacaggaagtggtggtagcggtggtgcttctgctggaacggggagtaacccgccttggtcagccggtggtggtgctgctgtcattgggctcaatggtatcaagaaagactatgacgagacaaatctgtatatcggctacctgccacctacaatggatgatgatggattagtcagtctgttttcgcaatttggggatattgtcatggctaaggtgatcaaggatcgaaacaccggacagagcaaaggatatggatttgtcaagtattcagacgtgtcagaggccaatgcagcgattgctgcaatgaacggtcaccatcttgaaggtagagttattgcggttagagttgctggaaagccaccacagccggcaccagcagtgtcagcacccccatcgtatcctcctacggatcctacttcaggtggatattcctcccaatcctacatgggggtaccaccaccacctcctccagggagttacgctccagttccttggggacagccaccaccgtatgcttcatatcctccgccaccaccaggctctagcatctacaatcctgcaccccctgcacctggccatgctgccccacctccatatggggtgcagtatccaccacccccagcagctcccatccctccaccaggcactacatcaagtgatggagctcagaactacccccccggtgtaacaccaccaagttctggtacacccactcaccctgttgcaacatcagtatatgcatcatctggcgcaccaaatgcaccattgatgtaccctccaccaccttatagttattccccatactatcctcctccaccatttcagccaccacctccaccaccactggctagtgttgatccctctcagagtattgcaactgcaccttgggctacccacagtgcagtgcctccaccaccaccaccacctttgtcctccacaaccgaccagcctactgctccctatggtgccgatgcagaatatgacaagtttatggcagatatgaagtgatataagcgaagttgggtgattcttccaatgaagggcaaaaggcttgatctttcttggagcttataccaacctgatttatttcttgttggaagtttgggactcacatcttaaccttgctgtgtgctgttgtaaaccattgcagaggttgcatgcttaagaaggcatcaagtgttactggctcagctggcatcgaaatatttgcttatgtccttgaactattttaaagaaccttttactaatgcttttgttttgatatctattcttgttattatttgagattatcctgttatgtcactttaatgctctgttcttcgtgacagtgtgttaaccctcactattattcatattttgttcttcatcttgatttggtagtgctagcagtccttttgatctggaacagaaaagcttgctgcaccatgctgttgttgtgacagcttggcacaggcaatagcacttgatgaatatcaggacatgctggcatgcagatctagtctggagtcctgtgcgcaagacacttgtcacaatgatatttgtgagatggtctgaaggtttggaggttggcttcgattatgtttttctaagtaggatatcaccataagcttattctagtcaaagaatgcgatagtcagtccacaaccagcattaggaaccttcatcatgttgcagatataccagcttcctagggttgtctcatagatttctaggtgttaactgtcctactttttgtctattttttgaagttactttcttatccagtgtgctgtgtagatgggaaaaaatatgtgatgtaatgattaagggtacaagtctttttcccttgtcatttgtttcctttctcccttgctttcttcctttctcccttaatgtaagcctagttagttttgcgatggatgttttttcatgattgtggtgtctaagtgggacgcagcctcactgttgttggcccaatagtattgtagacataggttgcttatattcagtttaatgtgacctcgaatctagagcgttagccacctcaatttgcaatataaatttatttagcctttggcatatcgtttttttaagtggaacatgaactttgccatttaggtttgtct

SEQ ID NO: 14292 - DNA, 3586 bp, Zea Mays
cgtttgaaatccgttgcagcgttttcatatttcgtttcagcgaaaactcgtcaaatagaaaaattggcatcaaaattttcgaaatctcacaattgggccttctccgataaggcgataaccgaaccgattccgtgaaccgcccccgaactttccatcgaccttttctcccctaaaaaaaaccgagcgattccaaatcagactgccttccggttccccatctcccctccctcagcgcagactcagccatggcttccgccgaaaccctagcccgctccccctcgcgcgagccttcctccgacccgccccgcgcaggctcttccgagccccaccacaacggcgccggtgactcgtctcgccgccgccgccgcagccgctgggagcagtctaacgacgactccgccaacaactccggcggcgagggcggggccgtgggccggaagcgcaaaacgcggtgggccgaggaggagccgcgcccagccatcgcgctgccggacttcatgaaggacttcgcggccgagatggaccccgaggtgcacgctctcaacgcgcgcctcctcgacatctcgcgcctgctgcagtcgggcctcccgctcgacgaccggcccgagggcgcgcgctctccgtcccccgagcccgtctacgacaacttcggcatccgcataaacacccgcgaataccgcgccagggagcgcctcaaccgcgagaggcaggatattatctcgcagctcatccgccgcaaccccgccttcaagcccccctccgactaccgcccacccaagctccagaagaaactctacatccccatgaaggaataccccggctacaactttatcggcctcatcattggccctcgtggcaacacgcagaagcgtatggagaaggagactggtgccaagattgtcattagggggaagggtagtgtcaaggaagggaagtttctgcagaagagggacctcaagccggatcccagtgagaacgaagatctccacgtgcttgttgaggcagagacgcaggaggcactcgatgcggctgctggtatggtggagaagctgctcaccccggtggatgaggtgctcaatgagcacaagcggcagcagctccgggagcttgccgctcttaatggaacaattagggacgacgagttttgtagaacatgtggtgaggctggtcacaggcagtatgcttgccctaacaagatgaacacgtttaagagtgatgtgcagtgcaagatctgtggggatggtgggcacccgactattgattgtccagtcaagggcacttctggtaagaagatggatgatgaataccagaacttcctggctgagcttggtggcggcagtgcacctgagtccatgaacaaatctggtggtccaatgttggctcttacaggaagtggtggtagcggtggtgcttctgctggaacggggagtaacccgccttggtcagccggtggtggtgctgctgtcattgggctcaatggtatcaagaaagactatgacgagacaaatctgtatatcggctacctgccacctacaatggatgatgatggattagtcagtctgttttcgcaatttggggatattgtcatggctaaggtgatcaaggatcgaaacaccggacagagcaaaggatatggatttgtcaagtattcagacgtgtcagaggccaatgcagcgattgctgcaatgaacggtcaccatcttgaaggtagagttattgcggttagagttgctggaaagccaccacagccggcaccagcagtgtcagcacccccatcgtatcctcctacggatcctacttcaggtggatattcctcccaatcctacatgggggtaccaccaccacctcctccagggagttacgctccagttccttggggacagccaccaccgtatgcttcatatcctccgccaccaccaggctctagcatctacaatcctgcaccccctgcacctggccatgctgccccacctccatatggggtgcagtatccaccacccccagcagctcccatccctccaccaggcactacatcaagtgatggagctcagaactacccccccggtgtaacaccaccaagttctggtacacccactcaccctgttgcaacatcagtatatgcatcatctggcgcaccaaatgcaccattgatgtaccctccaccaccttatagttattccccatactatcctcctccaccatttcagccaccacctccaccaccactggctagtgttgatccctctcagagtattgcaactgcaccttgggctacccacagtgcagtgcctccaccaccaccaccacctttgtcctccacaaccgaccagcctactgctccctatggtgccgatgcagaatatgacaagtttatggcagatatgaagtgatataagcgaagttgggtgattcttccaatgaagggcaaaaggcttgatctttcttggagcttataccaacctgatttatttcttgttggaagtttgggactcacatcttaaccttgctgtgtgctgttgtaaaccattgcagaggttgcatgcttaagaaggcatcaagtgttactggctcagctggcatcgaaatatttgcttatgtccttgaactattttaaagaaccttttactaatgcttttgttttgatatctattcttgttattatttgagattatcctgttatgtcactttaatgctctgttcttcgtgacagtgtgttaaccctcactattattcatattttgttcttcatcttgatttggtagtgctagcagtccttttgatctggaacagaaaagcttgctgcaccatgctggttggtataacaccaaaattaaaatgcatgtttggtatcttctgatgaatctgtcatgcttttctatcttatgacttcacctaagttgtttggcagttgttgtgacagcttggcacaggcaatagcacttgatgaatatcagtaggacatgctggcatgcagatctagtctggagtcctgtgcgcaagacacttgtcacaatgatatttgtgagatggtctgaaggtttggaggttggcttcgattatgtttttctaagtaggatatcaccataagcttattctagtcaaagaatgcgatagtcagtccacaaccagcattaggaaccttcatcatgttgcagatataccagcttcctagggttgtctcatagatttctaggtgttaactgtcctactttttgtctattttttgaagttactttcttatccagtgtgctgtgtagatgggaaaaaatatgtgatgtaatgattaagggtacaagtctttttcccttgtcatttgtttcctttctcccttgctttcttcctttctcccttaatgtaagcctagttagttttgcgatggatgttttttcatgattgtggtgtctaagtgggacgcagcctcactgttgttggcccaatagtattgtagacataggttgcttatattcagtttaatgtgacctcgaatctagagcgttagccacctcaatttgcaatataaatttatttagcctttggcatatcgtttttttaagtggaacatgaactttgccatttaggtttgtct

SEQ ID NO: 14293 - DNA, 4243 bp, Zea Mays
cgtttgaaatccgttgcagcgttttcatatttcgtttcagcgaaaactcgtcaaatagaaaaattggcatcaaaattttcgaaatctcacaattgggccttctccgataaggcgataaccgaaccgattccgtgaaccgcccccgaactttccatcgaccttttctcccctaaaaaaaaccgagcgattccaaatcagactgccttccggttccccatctcccctccctcagcgcagactcagccatggcttccgccgaaaccctagcccgctccccctcgcgcgagccttcctccgacccgccccgcgcaggctcttccgagccccaccacaacggcgccggtgactcgtctcgccgccgccgccgcagccgctgggagcagtctaacgacgactccgccaacaactccggcggcgagggcggggccgtgggccggaagcgcaaaacgcggtgggccgaggaggagccgcgcccagccatcgcgctgccggacttcatgaaggacttcgcggccgagatggaccccgaggtgcacgctctcaacgcgcgcctcctcgacatctcgcgcctgctgcagtcgggcctcccgctcgacgaccggcccgagggcgcgcgctctccgtcccccgagcccgtctacgacaacttcggcatccgcataaacacccgcgaataccgcgccagggagcgcctcaaccgcgagaggcaggatattatctcgcagctcatccgccgcaaccccgccttcaagcccccctccgactaccgcccacccaagctccagaagaaactctacatccccatgaaggaataccccggctacaactttatcggcctcatcattggccctcgtggcaacacgcagaagcgtatggagaaggagactggtgccaagattgtcattagggggaagggtagtgtcaaggaagggaagtttctgcagaagagggacctcaagccggatcccagtgagaacgaagatctccacgtgcttgttgaggcagagacgcaggaggcactcgatgcggctgctggtatggtggagaagctgctcaccccggtggatgaggtgctcaatgagcacaagcggcagcagctccgggagcttgccgctcttaatggaacaattagggacgacgagttttgtagaacatgtggtgaggctggtcacaggcagtatgcttgccctaacaagatgaacacgtttaagagtgatgtgcagtgcaagatctgtggggatggtgggcacccgactattgattgtccagtcaagggcacttctggtaagaagatggatgatgaataccagaacttcctggctgagcttggtggcggcagtgcacctgagtccatgaacaaatctggtggtccaatgttggctcttacaggaagtggtggtagcggtggtgcttctgctggaacggggagtaacccgccttggtcagccggtggtggtgctgctgtcattgggctcaatggtatcaagaaagactatgacgagacaaatctgtatatcggctacctgccacctacaatggatgatgatggattagtcagtctgttttcgcaatttggggatattgtcatggctaaggtgatcaaggatcgaaacaccggacagagcaaaggatatggatttgtcaagtattcagacgtgtcagaggccaatgcagcgattgctgcaatgaacggtcaccatcttgaaggtagagttattgcggttagagttgctggaaagccaccacagccggcaccagcagtgtcagcacccccatcgtatcctcctacggatcctacttcaggtggatattcctcccaatcctacatgggggtaccaccaccacctcctccagggagttacgctccagttccttggggacagccaccaccgtatgcttcatatcctccgccaccaccaggctctagcatctacaatcctgcaccccctgcacctggccatgctgccccacctccatatggggtgcagtatccaccacccccagcagctcccatccctccaccaggcactacatcaagtgatggagctcagaactacccccccggtgtaacaccaccaagttctggtacacccactcaccctgttgcaacatcagtatatgcatcatctggcgcaccaaatgcaccattgatgtaccctccaccaccttatagttattccccatactatcctcctccaccatttcagccaccacctccaccaccactggctagtgttgatccctctcagagtattgcaactgcaccttgggctacccacagtgcagtgcctccaccaccaccaccacctttgtcctccacaaccgaccagcctactgctccctatggtgccgatgcagaatatgacaagtttatggcagatatgaagtgatataagcgaagttgggtgattcttccaatgaagggcaaaaggtaacttaacatgatctctctctgcgtgttctattaatttcgcaagatgcaattgggcatgatttgcaattttattgacatggaaacccatgtttgtgttattctatgtgttttgttatttatgtactatatactactatacttaaatttgaccattgtgctgatataccatatactaatatcttacccattgtttcgttttgacttaatgagtctacactgtaaaagttttctggagtctatattatgccagattttcacctttcaacatcttttggtgttatggattttcatgcttttgctagaggtattgtttttttattaaaccaaacacacatattatctcattgaggatgcttatttatgataatatctttttttaaaattgaggtcaggactaacatgctcattgcttgtttgggatgataaggaagtcagaagaaatcaaagacaacatttgcttttgataggatgtgacattatcattttttagaatgcctggatatttttggggatctgatatctaatgcacttcctcaagcagtgtggtcctttaatagaccatatgctttatgcttaccctgctcccctcttttacgtgcaatgctcggtttactaattaaacctcaccttttctatgttgtctcgacttgttgacaggcttgatctttcttggagcttataccaacctgatttatttcttgttggaagtttgggactcacatcttaaccttgctgtgtgctgttgtaaaccattgcagaggttgcatgcttaagaaggcatcaagtgttactggctcagctggcatcgaaatatttgcttatgtccttgaactattttaaagaaccttttactaatgcttttgttttgatatctattcttgttattatttgagattatcctgttatgtcactttaatgctctgttcttcgtgacagtgtgttaaccctcactattattcatattttgttcttcatcttgatttggtagtgctagcagtccttttgatctggaacagaaaagcttgctgcaccatgctggttggtataacaccaaaattaaaatgcatgtttggtatcttctgatgaatctgtcatgcttttctatcttatgacttcacctaagttgtttggcagttgttgtgacagcttggcacaggcaatagcacttgatgaatatcaggacatgctggcatgcagatctagtctggagtcctgtgcgcaagacacttgtcacaatgatatttgtgagatggtctgaaggtttggaggttggcttcgattatgtttttctaagtaggatatcaccataagcttattctagtcaaagaatgcgatagtcagtccacaaccagcattaggaaccttcatcatgttgcagatataccagcttcctagggttgtctcatagatttctaggtgttaactgtcctactttttgtctattttttgaagttactttcttatccagtgtgctgtgtagatgggaaaaaatatgtgatgtaatgattaagggtacaagtctttttcccttgtcatttgtttcctttctcccttgctttcttcctttctcccttaatgtaagcctagttagttttgcgatggatgttttttcatgattgtggtgtctaagtgggacgcagcctcactgttgttggcccaatagtattgtagacataggttgcttatattcagtttaatgtgacctcgaatctagagcgttagccacctcaatttgcaatataaatttatttagcctttggcatatcgtttttttaagtggaacatgaactttgccatttaggtttgtct

SEQ ID NO: 14294 - DNA, 3725 bp, Zea Mays
cgtttgaaatccgttgcagcgttttcatatttcgtttcagcgaaaactcgtcaaatagaaaaattggcatcaaaattttcgaaatctcacaattgggccttctccgataaggcgataaccgaaccgattccgtgaaccgcccccgaactttccatcgaccttttctcccctaaaaaaaaccgagcgattccaaatcagactgccttccggttccccatctcccctccctcagcgcagactcagccatggcttccgccgaaaccctagcccgctccccctcgcgcgagccttcctccgacccgccccgcgcaggctcttccgagccccaccacaacggcgccggtgactcgtctcgccgccgccgccgcagccgctgggagcagtctaacgacgactccgccaacaactccggcggcgagggcggggccgtgggccggaagcgcaaaacgcggtgggccgaggaggagccgcgcccagccatcgcgctgccggacttcatgaaggacttcgcggccgagatggaccccgaggtgcacgctctcaacgcgcgcctcctcgacatctcgcgcctgctgcagtcgggcctcccgctcgacgaccggcccgagggcgcgcgctctccgtcccccgagcccgtctacgacaacttcggcatccgcataaacacccgcgaataccgcgccagggagcgcctcaaccgcgagaggcaggatattatctcgcagctcatccgccgcaaccccgccttcaagcccccctccgactaccgcccacccaagctccagaagaaactctacatccccatgaaggaataccccggctacaactttatcggcctcatcattggccctcgtggcaacacgcagaagcgtatggagaaggagactggtgccaagattgtcattagggggaagggtagtgtcaaggaagggaagtttctgcagaagagggacctcaagccggatcccagtgagaacgaagatctccacgtgcttgttgaggcagagacgcaggaggcactcgatgcggctgctggtatggtggagaagctgctcaccccggtggatgaggtgctcaatgagcacaagcggcagcagctccgggagcttgccgctcttaatggaacaattagggacgacgagttttgtagaacatgtggtgaggctggtcacaggcagtatgcttgccctaacaagatgaacacgtttaagagtgatgtgcagtgcaagatctgtggggatggtgggcacccgactattgattgtccagtcaagggcacttctggtaagaagatggatgatgaataccagaacttcctggctgagcttggtggcggcagtgcacctgagtccatgaacaaatctggtggtccaatgttggctcttacaggaagtggtggtagcggtggtgcttctgctggaacggggagtaacccgccttggtcagccggtggtggtgctgctgtcattgggctcaatggtatcaagaaagactatgacgagacaaatctgtatatcggctacctgccacctacaatggatgatgatggattagtcagtctgttttcgcaatttggggatattgtcatggctaaggtgatcaaggatcgaaacaccggacagagcaaaggatatggatttgtcaagtattcagacgtgtcagaggccaatgcagcgattgctgcaatgaacggtcaccatcttgaaggtagagttattgcggttagagttgctggaaagccaccacagccggcaccagcagtgtcagcacccccatcgtatcctcctacggatcctacttcaggtggatattcctcccaatcctacatgggggtaccaccaccacctcctccagggagttacgctccagttccttggggacagccaccaccgtatgcttcatatcctccgccaccaccaggctctagcatctacaatcctgcaccccctgcacctggccatgctgccccacctccatatggggtgcagtatccaccacccccagcagctcccatccctccaccaggcactacatcaagtgatggagctcagaactacccccccggtgtaacaccaccaagttctggtacacccactcaccctgttgcaacatcagtatatgcatcatctggcgcaccaaatgcaccattgatgtaccctccaccaccttatagttattccccatactatcctcctccaccatttcagccaccacctccaccaccactggctagtgttgatccctctcagagtattgcaactgcaccttgggctacccacagtgcagtgcctccaccaccaccaccacctttgtcctccacaaccgaccagcctactgctccctatggtgccgatgcagaatatgacaagtttatggcagatatgaagtgatataagcgaagttgggtgattcttccaatgaagggcaaaaggcttgatctttcttggagcttataccaacctgatttatttcttgttggaagtttgggactcacatcttaaccttgctgtgtgctgttgtaaaccattgcagaggttgcatgcttaagaaggcatcaagtgttactggctcagctggcatcgaaatatttgcttatgtccttgaactattttaaagaaccttttactaatgcttttgttttgatatctattcttgttattatttgagattatcctgttatgtcactttaatgctctgttcttcgtgacagtgtgttaaccctcactattattcatattttgttcttcatcttgatttggtagtgctagcagtccttttgatctggaacagaaaagcttgctgcaccatgctgttgttgtgacagcttggcacaggcaatagcacttgatgaatatcaggtatactgaggtgctaattattgtgtggacctaatgtttttcattttggtttctgcacaattttcaactgacagacagtaactagtttctcatttttggtagttgatgtttgtgcattagagtatctaagcatgcacgtaatgctgaaaaaaaatctttgatgaagagcttacaaatatattttatgttgctaatgctcttttgacatcattggaatttttgtttgcggttcaagtaggacatgctggcatgcagatctagtctggagtcctgtgcgcaagacacttgtcacaatgatatttgtgagatggtctgaaggtttggaggttggcttcgattatgtttttctaagtaggatatcaccataagcttattctagtcaaagaatgcgatagtcagtccacaaccagcattaggaaccttcatcatgttgcagatataccagcttcctagggttgtctcatagatttctaggtgttaactgtcctactttttgtctattttttgaagttactttcttatccagtgtgctgtgtagatgggaaaaaatatgtgatgtaatgattaagggtacaagtctttttcccttgtcatttgtttcctttctcccttgctttcttcctttctcccttaatgtaagcctagttagttttgcgatggatgttttttcatgattgtggtgtctaagtgggacgcagcctcactgttgttggcccaatagtattgtagacataggttgcttatattcagtttaatgtgacctcgaatctagagcgttagccacctcaatttgcaatataaatttatttagcctttggcatatcgtttttttaagtggaacatgaactttgccatttaggtttgtct

SEQ ID NO: 14295 - DNA, 3378 bp, Zea Mays
cgtttgaaatccgttgcagcgttttcatatttcgtttcagcgaaaactcgtcaaatagaaaaattggcatcaaaattttcgaaatctcacaattgggccttctccgataaggcgataaccgaaccgattccgtgaaccgcccccgaactttccatcgaccttttctcccctaaaaaaaaccgagcgattccaaatcagactgccttccggttccccatctcccctccctcagcgcagactcagccatggcttccgccgaaaccctagcccgctccccctcgcgcgagccttcctccgacccgccccgcgcaggctcttccgagccccaccacaacggcgccggtgactcgtctcgccgccgccgccgcagccgctgggagcagtctaacgacgactccgccaacaactccggcggcgagggcggggccgtgggccggaagcgcaaaacgcggtgggccgaggaggagccgcgcccagccatcgcgctgccggacttcatgaaggacttcgcggccgagatggaccccgaggtgcacgctctcaacgcgcgcctcctcgacatctcgcgcctgctgcagtcgggcctcccgctcgacgaccggcccgagggcgcgcgctctccgtcccccgagcccgtctacgacaacttcggcatccgcataaacacccgcgaataccgcgccagggagcgcctcaaccgcgagaggcaggatattatctcgcagctcatccgccgcaaccccgccttcaagcccccctccgactaccgcccacccaagctccagaagaaactctacatccccatgaaggaataccccggctacaactttatcggcctcatcattggccctcgtggcaacacgcagaagcgtatggagaaggagactggtgccaagattgtcattagggggaagggtagtgtcaaggaagggaagtttctgcagaagagggacctcaagccggatcccagtgagaacgaagatctccacgtgcttgttgaggcagagacgcaggaggcactcgatgcggctgctggtatggtggagaagctgctcaccccggtggatgaggtgctcaatgagcacaagcggcagcagctccgggagcttgccgctcttaatggaacaattagggacgacgagttttgtagaacatgtggtgaggctggtcacaggcagtatgcttgccctaacaagatgaacacgtttaagagtgatgtgcagtgcaagatctgtggggatggtgggcacccgactattgattgtccagtcaagggcacttctggtaagaagatggatgatgaataccagaacttcctggctgagcttggtggcggcagtgcacctgagtccatgaacaaatctggtggtccaatgttggctcttacaggaagtggtggtagcggtggtgcttctgctggaacggggagtaacccgccttggtcagccggtggtggtgctgctgtcattgggctcaatggtatcaagaaagactatgacgagacaaatctgtatatcggctacctgccacctacaatggatgatgatggattagtcagtctgttttcgcaatttggggatattgtcatggctaaggtgatcaaggatcgaaacaccggacagagcaaaggatatggatttgtcaagtattcagacgtgtcagaggccaatgcagcgattgctgcaatgaacggtcaccatcttgaaggtagagttattgcggttagagttgctggaaagccaccacagccggcaccagcagtgtcagcacccccatcgtatcctcctacggatcctacttcaggtggatattcctcccaatcctacatgggggtaccaccaccacctcctccagggagttacgctccagttccttggggacagccaccaccgtatgcttcatatcctccgccaccaccaggctctagcatctacaatcctgcaccccctgcacctggccatgctgccccacctccatatggggtgcagtatccaccacccccagcagctcccatccctccaccaggcactacatcaagtgatggagctcagaactacccccccggtgtaacaccaccaagttctggtacacccactcaccctgttgcaacatcagtatatgcatcatctggcgcaccaaatgcaccattgatgtaccctccaccaccttatagttattccccatactatcctcctccaccatttcagccaccacctccaccaccactggctagtgttgatccctctcagagtattgcaactgcaccttgggctacccacagtgcagtgcctccaccaccaccaccacctttgtcctccacaaccgaccagcctactgctccctatggtgccgatgcagaatatgacaagtttatggcagatatgaagtgatataagcgaagttgggtgattcttccaatgaagggcaaaaggcttgatctttcttggagcttataccaacctgatttatttcttgttggaagtttgggactcacatcttaaccttgctgtgtgctgttgtaaaccattgcagaggttgcatgcttaagaaggcatcaagtgttactggctcagctggcatcgaaatatttgcttatgtccttgaactattttaaagaaccttttactaatgcttttgttttgatatctattcttgttattatttgagattatcctgttatgtcactttaatgctctgttcttcgtgacagtgtgttaaccctcactattattcatattttgttcttcatcttgatttggtagtgctagcagtccttttgatctggaacagaaaagcttgctgcaccatgctggttggtataacaccaaaattaaaatgcatgtttggtatcttctgatgaatctgtcatgcttttctatcttatgacttcacctaagttgtttggcagttgttgtgacagcttggcacaggcaatagcacttgatgaatatcaggtatactgaggtgctaattattgtgtggacctaatgtttttcattttggtttctgcacaattttcaactgacagacagtaactagtttctcatttttggtagttgatgtttgtgcattagagtatctaagcatgcacgtaatgctgaaaaaaaatctttgatgaagagcttacaaatatattttatgttgctaatgctcttttgacatcattggaatttttgtttgcggttcaagtaggacatgctggcatgcagatctagtctggagtcctgtgcgcaagacacttgtcacaatgatatttgtgagatggtctgaaggtttggagcacgattactctactggtcatattgcccgagatcctcaaagccaacataatttattctgcatgcaaatcttcggctaaaatcgaacgctttagccaac

SEQ ID NO: 14296 - DNA, 2452 bp, Zea Mays
cgtttgaaatccgttgcagcgttttcatatttcgtttcagcgaaaactcgtcaaatagaaaaattggcatcaaaattttcgaaatctcacaattgggccttctccgataaggcgataaccgaaccgattccgtgaaccgcccccgaactttccatcgaccttttctcccctaaaaaaaaccgagcgattccaaatcagactgccttccggttccccatctcccctccctcagcgcagactcagccatggcttccgccgaaaccctagcccgctccccctcgcgcgagccttcctccgacccgccccgcgcaggctcttccgagccccaccacaacggcgccggtgactcgtctcgccgccgccgccgcagccgctgggagcagtctaacgacgactccgccaacaactccggcggcgagggcggggccgtgggccggaagcgcaaaacgcggtgggccgaggaggagccgcgcccagccatcgcgctgccggacttcatgaaggacttcgcggccgagatggaccccgaggtgcacgctctcaacgcgcgcctcctcgacatctcgcgcctgctgcagtcgggcctcccgctcgacgaccggcccgagggcgcgcgctctccgtcccccgagcccgtctacgacaacttcggcatccgcataaacacccgcgaataccgcgccagggagcgcctcaaccgcgagaggcaggatattatctcgcagctcatccgccgcaaccccgccttcaagcccccctccgactaccgcccacccaagctccagaagaaactctacatccccatgaaggaataccccggctacaactttatcggcctcatcattggccctcgtggcaacacgcagaagcgtatggagaaggagactggtgccaagattgtcattagggggaagggtagtgtcaaggaagggaagtttctgcagaagagggacctcaagccggatcccagtgagaacgaagatctccacgtgcttgttgaggcagagacgcaggaggcactcgatgcggctgctggtatggtggagaagctgctcaccccggtggatgaggtgctcaatgagcacaagcggcagcagctccgggagcttgccgctcttaatggaacaattagggacgacgagttttgtagaacatgtggtgaggctggtcacaggcagtatgcttgccctaacaagatgaacacgtttaagagtgatgtgcagtgcaagatctgtggggatggtgggcacccgactattgattgtccagtcaagggcacttctggtaagaagatggatgatgaataccagaacttcctggctgagcttggtggcggcagtgcacctgagtccatgaacaaatctggtggtccaatgttggctcttacaggaagtggtggtagcggtggtgcttctgctggaacggggagtaacccgccttggtcagccggtggtggtgctgctgtcattgggctcaatggtatcaagaaagactatgacgagacaaatctgtatatcggctacctgccacctacaatggatgatgatggattagtcagtctgttttcgcaatttggggatattgtcatggctaaggtgatcaaggatcgaaacaccggacagagcaaaggatatggatttgtcaagtattcagacgtgtcagaggccaatgcagcgattgctgcaatgaacggtcaccatcttgaaggtagagttattgcggttagagttgctggaaagccaccacagccggcaccagcagtgtcagcacccccatcgtatcctcctacggatcctacttcaggtggatattcctcccaatcctacatgggggtaccaccaccacctcctccagggagttacgctccagttccttggggacagccaccaccgtatgcttcatatcctccgccaccaccaggctctagcatctacaatcctgcaccccctgcacctggccatgctgccccacctccatatggggtgcagtatccaccacccccagcagctcccatccctccaccaggcactacatcaagtgatggagctcagaactacccccccggtgtaacaccaccaagttctggtacacccactcaccctgttgcaacatcagtatatgcatcatctggcgcaccaaatgcaccattgatgtaccctccaccaccttatagttattccccatactatcctcctccaccatttcagccaccacctccaccaccactggctagtgttgatccctctcagagtattgcaactgcaccttgggctacccacagtgcagtgcctccaccaccaccaccacctttgtcctccacaaccgaccagcctactgctccctatggtgccgatgcagaatatgacaagtttatggcagatatgaagtgatataagcgaagttgggtgattcttccaatgaagggcaaaaggtgaagagcaggtgccaccgg

SEQ ID NO: 14297 - DNA, 2509 bp, Zea Mays
cgtttgaaatccgttgcagcgttttcatatttcgtttcagcgaaaactcgtcaaatagaaaaattggcatcaaaattttcgaaatctcacaattgggccttctccgataaggcgataaccgaaccgattccgtgaaccgcccccgaactttccatcgaccttttctcccctaaaaaaaaccgagcgattccaaatcagactgccttccggttccccatctcccctccctcagcgcagactcagccatggcttccgccgaaaccctagcccgctccccctcgcgcgagccttcctccgacccgccccgcgcaggctcttccgagccccaccacaacggcgccggtgactcgtctcgccgccgccgccgcagccgctgggagcagtctaacgacgactccgccaacaactccggcggcgagggcggggccgtgggccggaagcgcaaaacgcggtgggccgaggaggagccgcgcccagccatcgcgctgccggacttcatgaaggacttcgcggccgagatggaccccgaggtgcacgctctcaacgcgcgcctcctcgacatctcgcgcctgctgcagtcgggcctcccgctcgacgaccggcccgagggcgcgcgctctccgtcccccgagcccgtctacgacaacttcggcatccgcataaacacccgcgaataccgcgccagggagcgcctcaaccgcgagaggcaggatattatctcgcagctcatccgccgcaaccccgccttcaagcccccctccgactaccgcccacccaagctccagaagaaactctacatccccatgaaggaataccccggctacaactttatcggcctcatcattggccctcgtggcaacacgcagaagcgtatggagaaggagactggtgccaagattgtcattagggggaagggtagtgtcaaggaagggaagtttctgcagaagagggacctcaagccggatcccagtgagaacgaagatctccacgtgcttgttgaggcagagacgcaggaggcactcgatgcggctgctggtatggtggagaagctgctcaccccggtggatgaggtgctcaatgagcacaagcggcagcagctccgggagcttgccgctcttaatggaacaattagggacgacgagttttgtagaacatgtggtgaggctggtcacaggcagtatgcttgccctaacaagatgaacacgtttaagagtgatgtgcagtgcaagatctgtggggatggtgggcacccgactattgattgtccagtcaagggcacttctggtaagaagatggatgatgaataccagaacttcctggctgagcttggtggcggcagtgcacctgagtccatgaacaaatctggtggtccaatgttggctcttacaggaagtggtggtagcggtggtgcttctgctggaacggggagtaacccgccttggtcagccggtggtggtgctgctgtcattgggctcaatggtatcaagaaagactatgacgagacaaatctgtatatcggctacctgccacctacaatggatgatgatggattagtcagtctgttttcgcaatttggggatattgtcatggctaaggtgatcaaggatcgaaacaccggacagagcaaaggatatggatttgtcaagtattcagacgtgtcagaggccaatgcagcgattgctgcaatgaacggtcaccatcttgaaggtagagttattgcggttagagttgctggaaagccaccacagccggcaccagcagtgtcagcacccccatcgtatcctcctacggatcctacttcaggtggatattcctcccaatcctacatgggggtaccaccaccacctcctccagggagttacgctccagttccttggggacagccaccaccgtatgcttcatatcctccgccaccaccaggctctagcatctacaatcctgcaccccctgcacctggccatgctgccccacctccatatggggtgcagtatccaccacccccagcagctcccatccctccaccaggcactacatcaagtgatggagctcagaactacccccccggtgtaacaccaccaagttctggtacacccactcaccctgttgcaacatcagtatatgcatcatctggcgcaccaaatgcaccattgatgtaccctccaccaccttatagttattccccatactatcctcctccaccatttcagccaccacctccaccaccactggctagtgttgatccctctcagagtattgcaactgcaccttgggctacccacagtgcagtgcctccaccaccaccaccacctttgtcctccacaaccgaccagcctactgctccctatggtgccgatgcagaatatgacaagtttatggcagatatgaagtgatataagcgaagttgggtgattcttccaatgaagggcaaaagtgggaatggacatgttgaaagggtgtggtcccttcgcagaagaggtgtggcccttcggtgaagagcaggtgccaccgg

SEQ ID NO: 14298 - DNA, 1113 bp, Zea Mays
aaaagaaaaggaaaaattaacggctcgtcggtcctccacgaaaagtcgaaaaccaagtccagcagacggacgcgaactgagaaaaatctcacgtgacgacgacggacgcggcggcgatggcgtgccgcgcacttgccctccgcttcctgctcctcccggacccgctacaccgcctcccggccacgccgccatctgttgggagggcatccggctcccgcggtggtcgccgtccgcacctccgctgcagctccggcggcgggggtggggagcccgggcagccgccgcaagaagctgtgctcgaggccatatccaatagcaaggtctaaaggaagggttgcactcacaacaaatgtggtcatgggtggtactgtgatggacgatgcaagtgatgaatggcttgctctggatcagaaggtaaattcctaccccacagatagaggttttacagcaattggcattggaggtgatgattttgtccagtcgatggtagttgctgttgaatctgttcttcaagaatccattcccaagggccgagtatctcagaaactatcttcaggaggaaaatatgtttctgtaaaaattgggccaattcgtgttgtttcaagtgagcaggtccaagctgtatatcgtgccatgagaagagataacagaatgaaatacttcttatgaagtgcaattgcatgtcctgcacgttccctggtccattccatcatgtaaacaaaaggagtccaacagtacattttcgccacattttgctggactggactggactggacccccgatgaattgcaaaaggaaaatgggaagacttttatgtgccattcatgccctgatggaagcttctcaaataacctgctacaggcaatttggtgggatcggttatgttatgtagtgcttgtgtagtacagtgggcgtatatagctactatatatgctaaagttgtattttagtgtctcatattagatgcattttaatattttataaaccatatgaaactagcggtataagtgttcctaatttatcatgtttgtttgcttgcaggattatataatccagcttatattatatagattatataatccagattttataatctagtttatatattcttat

SEQ ID NO: 14299 - DNA, 1011 bp, Zea Mays
aaaagaaaaggaaaaattaacggctcgtcggtcctccacgaaaagtcgaaaaccaagtccagcagacggacgcgaactgagaaaaatctcacgtgacgacgacggacgcggcggcgatggcgtgccgcgcacttgccctccgcttcctgctcctcccggacccgctacaccgcctcccggccacgccgccatctgttgggagggcatccggctcccgcggtggtcgccgtccgcacctccgctgcagctccggcggcgggggtggggagcccgggcagccgccgcaagaagctgtgctcgaggccatatccagtaaattcctaccccacagatagaggttttacagcaattggcattggaggtgatgattttgtccagtcgatggtagttgctgttgaatctgttcttcaagaatccattcccaagggccgagtatctcagaaactatcttcaggaggaaaatatgtttctgtaaaaattgggccaattcgtgttgtttcaagtgagcaggtccaagctgtatatcgtgccatgagaagagataacagaatgaaatacttcttatgaagtgcaattgcatgtcctgcacgttccctggtccattccatcatgtaaacaaaaggagtccaacagtacattttcgccacattttgctggactggactggactggacccccgatgaattgcaaaaggaaaatgggaagacttttatgtgccattcatgccctgatggaagcttctcaaataacctgctacaggcaatttggtgggatcggttatgttatgtagtgcttgtgtagtacagtgggcgtatatagctactatatatgctaaagttgtattttagtgtctcatattagatgcattttaatattttataaaccatatgaaactagcggtataagtgttcctaatttatcatgtttgtttgcttgcaggattatataatccagcttatattatatagattatataatccagattttataatctagtttatatattcttat

SEQ ID NO: 14300 - DNA, 1107 bp, Zea Mays
aaaagaaaaggaaaaattaacggctcgtcggtcctccacgaaaagtcgaaaaccaagtccagcagacggacgcgaactgagaaaaatctcacgtgacgacgacggacgcggcggcgatggcgtgccgcgcacttgccctccgcttcctgctcctcccggacccgctacaccgcctcccggccacgccgccatctgttgggagggcatccggctcccgcggtggtcgccgtccgcacctccgctgcagctccggcggcgggggtggggagcccgggcagccgccgcaagaagctgtgctcgaggccatatccaagatagcaaggtctaaaggaagggttgcactcacaacaaatgtggtcatgggtggtactgtgatggacgatgcaagtgatgaatggcttgctctggatcagaaggtaaattcctaccccacagatagaggttttacagcaattggcattggaggtgatgattttgtccagtcgatggtagttgctgttgaatctgttcttcaagaatccattcccaagggccgagtatctcagaaactatcttcaggaggaaaatatgtttctgtaaaaattgggccaattcgtgttgtttcaagtccaagctgtatatcgtgccatgagaagagataacagaatgaaatacttcttatgaagtgcaattgcatgtcctgcacgttccctggtccattccatcatgtaaacaaaaggagtccaacagtacattttcgccacattttgctggactggactggactggacccccgatgaattgcaaaaggaaaatgggaagacttttatgtgccattcatgccctgatggaagcttctcaaataacctgctacaggcaatttggtgggatcggttatgttatgtagtgcttgtgtagtacagtgggcgtatatagctactatatatgctaaagttgtattttagtgtctcatattagatgcattttaatattttataaaccatatgaaactagcggtataagtgttcctaatttatcatgtttgtttgcttgcaggattatataatccagcttatattatatagattatataatccagattttataatctagtttatatattcttat

SEQ ID NO: 14301 - DNA, 2135 bp, Zea Mays
gttccaacactcagttttttaaaatattggttccatatctcgcatctgggcaaccgaacacgaccgccgtctctactcccagtcccagctgccaaggtcttcgtcgcctcgtcgggctcgggtcctttgccggcgacgagcgcgtgcacaccagaatacagtggaagtggtatgcggttgtaaaacgatttcgattattccaagcggccggcgatggctcggagcccctgcgacctccgcctcctcctcctcgctgcagctgcagctttcatctacatccaagtgcgcctctttgctactcagtcccattatgcggaccgtcttgcggaagcagactaggatcgaaggcattccataactcaaaagttgtttacacctgtagtttgctccatacaggaaagatctgaaaatcaatgcaccagtcaattaaagtccttgatcgatcaagtcagcatgcagcaggagaagattgtagcattggaagagataaaggtacggcaagatgaagaacgtgcacatctgaggattttgataaaggatcttgaaaaaaggagtgtgcagaagctactagacaagaatgtggttcccgttgctgctgttgtcataatggcttgcaatcgaccagactatttagagagaacagttgaatctatcctgaagtatcagacatcagttgcttcgaagtttccgctttttatatctcaggatggagcaaatggagctgtgaagaataaagctttggaatataaacaaataacatacatgcagcatgtggatcttgaacctgtgcaaactgaaaggccaggagaattgacagcatattacaagattgctaaacattataagtgggccttggacaacctattcattaaacataattttgctcgagtgatcattctagaagatgacatggagattgccccggattttttcgactacttcgaggctgcagctaaattacttgataatgacaagacgattatggctgtttcttcttggaatgacaatgggcagaagcagtttgttaacgacccaaaagctctttaccgctcagatttctttcctgggcttggatggatgttaacaaagtccacttggattgaactgtcaccaaagtggcctaaagcttattgggatgattgggtgaggctaaaggaggtacatggacatcggcaattcatacgcccggaaatttgtagaacatacaattttggcaagcatggatcaagcttgggacagttcttcgagcaatacttggagcccattaagttaaacgatgttcatattgattggaattctgaggatctgagctaccttggggaggataagttttcaaccaaatttggaaaagaggtggctagtgccactcctctccgtggatcagatgctgtgttgaaagcccacaatatggctgaggatgtaaggatccaatacgacgaccaagaaggtttcgagcagatagctcgtcaatttggaatattcgaagaatggaaggatggcatcccaagaacggcttacaaaggagtggtggtcttccggtacaacagtagtcaaaggcgaatatttctcgtcagcccagattctcttcgtcagctgggggtgtagcatgttgagaaggtagattttttacccttggaatggcaaatatcatggaattgcttaactggtttctgtgagcatggaggaaccgggatgcatggtgaagaaattatttttgagaagtgattgtgttgacccaaaggtactggagtagtagaagcatgggcttggtttataggacatttgcaagatataatacatcgttgttatatctttctccgcatcaggaaatgtttagtcagtatgggacttgttatccttgagtgtatttagggtttacacgatgcagttgtatgcgctcaaaagagtgtagcaggagctcactagctgacctgacgctcgatcctttttggtagaagaaaggtgtatctttatgaccaaatttttcttattgggcatcttggaatattaagatggaaggaaatcttgtgcattcgtttgttgtactgttttgtggtgacttcgcagatgtgcgacaagatgggagcgtaagcatccaatcaattccatcgagtttgttgaggtgtcttgttctg

SEQ ID NO: 14302 - DNA, 1498 bp, Zea Mays
ctgaatcattcattttcaaaaggtatcagacatcagttgcttcgaagtttccgctttttatatctcaggatggagcaaatggagctgtgaagaataaagctttggaatataaacaaataacatacatgcagcatgtggatcttgaacctgtgcaaactgaaaggccaggagaattgacagcatattacaagattgctaaacattataagtgggccttggacaacctattcattaaacataattttgctcgagtgatcattctagaagatgacatggagattgccccggattttttcgactacttcgaggctgcagctaaattacttgataatgacaagacgattatggctgtttcttcttggaatgacaatgggcagaagcagtttgttaacgacccaaaagctctttaccgctcagatttctttcctgggcttggatggatgttaacaaagtccacttggattgaactgtcaccaaagtggcctaaagcttattgggatgattgggtgaggctaaaggaggtacatggacatcggcaattcatacgcccggaaatttgtagaacatacaattttggcaagcatggatcaagcttgggacagttcttcgagcaatacttggagcccattaagttaaacgatgttcatattgattggaattctgaggatctgagctaccttggggaggataagttttcaaccaaatttggaaaagaggtggctagtgccactcctctccgtggatcagatgctgtgttgaaagcccacaatatggctgaggatgtaaggatccaatacgacgaccaagaaggtttcgagcagatagctcgtcaatttggaatattcgaagaatggaaggatggcatcccaagaacggcttacaaaggagtggtggtcttccggtacaacagtagtcaaaggcgaatatttctcgtcagcccagattctcttcgtcagctgggggtgtagcatgttgagaaggtagattttttacccttggaatggcaaatatcatggaattgcttaactggtttctgtgagcatggaggaaccgggatgcatggtgaagaaattatttttgagaagtgattgtgttgacccaaaggtactggagtagtagaagcatgggcttggtttataggacatttgcaagatataatacatcgttgttatatctttctccgcatcaggaaatgtttagtcagtatgggacttgttatccttgagtgtatttagggtttacacgatgcagttgtatgcgctcaaaagagtgtagcaggagctcactagctgacctgacgctcgatcctttttggtagaagaaaggtgtatctttatgaccaaatttttcttattgggcatcttggaatattaagatggaaggaaatcttgtgcattcgtttgttgtactgttttgtggtgacttcgcagatgtgcgacaagatgggagcgtaagcatccaatcaattccatcgagtttgttgaggtgtcttgttctg

SEQ ID NO: 14303 - DNA, 2855 bp, Zea Mays
gttcctgtcattgtcttgaattgcagaagcagcagactcagccgatcgatttacccatctgtgacttctctcgccctgaggttttgacatcaacgtacttcgtgaagaagcaaggagtcggtggttaaagccttctgaagtgtactatatcttgcagaatcacgagaggttcccgatcacccatgaggcaccaaagaagccgcccagtggttccctattcctttacaatcgtcgtgtcaatcgttatttccggagagatggtcacacatggcggcggaagaaggatggaagaactgttggagaggctcatgaacgactgaaggttggaaatgttgatgctttgagctgctattacgctcacggggagcaaaatccaagtttccagagacggtgtttctggatgctggaacctgcatacgaacacattgtgctggtacaatatagagaggttgatgtggttagaaattattcatcacaactgtcaaatggcctcccagaacctctttcatccttgggatatccaaatgccatctgtggaaaccaataccacagctcctcttctggcgctagcgagtgtagtgagtcccatcagagctattctaatttgagttctgtaactgaagtaagttcctattccggtaacaaagagtacaccaaaaatgatggcggtttactgagcataccggaggttggacacacttgtctgcaacaaaatcggactgataatggtaactcgaaaaataaatctgggcttaatattgctttaaagaagatagctgagcagttaagtttgggtgaagatgatgatgactatattttctcaaatcaagctcattctgtgggaggcgacaaccaagtaaaacatattcaacaagaaggaacacagaaaggtttaagtaggaatatagcgccatcatgggaagatgtactgcagtccagttcaggtttaccaatttcatccatataccagcaatcggatgtcgagtatcagaaaaattcagaataccatccaccagaacgcctggacagcagtgatttacgcatacaacttgctgctgctaaaaagtttcttttaggaccagaagccaccgttgactcaccatctttgaactctgtgctgagaaatagagcgaactgtgtaactgatactatttcagcttatgacagtagatttggaagctctctgaacccagattggcaaacaaaaacagcattaacatttcaaagcaattctcagggctctgaaataacggagttgtttgaccatggtcattttgaacactactccagagaagatacaacattttctttaggacagacaaacaagtttaatattcgtgagatctctccagaatgggcattttcatatgagatcaccaaggtcatcattactggagattttctatgtaatccatcgaatttgggttgggctgtgatgtttggtgatagtgaggtacctgctaaagtagtccagccaggtgttcttctctgccacacgccactgcactgcagtggaaatctcagaatctgcattacttcgggaaacagagaagtttgcagtgaattcaaagactttgagttccgctcaaaaccctcttctagtttcacagacatcgcaccatcttctagacatctgaaatccagtgaagagttactaattcttgcaaaatttgctagaatgcttttgtctgggaatggaaaccctgaagttccagatggtgatccccaatctggacagtgtccaaaacttaagatggatgaagggctctgggataggttgattgaagaactcaaagtagggtgtgaaagtccattaagctcggttgattggattttggaggaactgctgaaaagtaaattacaaaagtggttatctgtgaagctcagaggattcaatggaacggattctatatccaagcatgaccagggtattatacacttaatctctgccctaggctatgagtgggcattgtcttcagttctcagtgttggtgttggtctaaattttcgtgattcaaatggatggactgctcttcattgggctgcttattttggaagctgttcattcagaagaaatacaaaggttgcaaaggtcgcaacatttctcaacatgagaagaaatgcagttaaaatacaggctcatgtaagaggccatcaagtgagaaagaaatacagaacaattgtaagcactgtcagtgtgctagagaaagtaatacttaggtggcgccgtaaaggtcatggcctccgtggcttccgagctgagcagcaatcaatggtcgaagcaatagaggaagatgatgaggaggatgatgacttcgatgatgacgaagcagtcaagatctttcgccggcagaaggtcgatcaagctgtaaaggaggctgtgtcaagagtgttgtccatggtagactctacagaagcgaggatgcaataccggcgaatgcttgaggaatttcgccaggcaactaattggaaggatcaaatgaagtaacatcaatatttgacagtgatttagagttattacttattagggatcaacgacttcatgtaaggagcatttatgtctcgagatctgccagcacccatcaatgacataaattaagtatttagggaatgtgttccagttgctactaattggccgtctaattgtacagtgttagcgaaatcgaaagtagattatttctgccacgatgtattttcactttctgtatttaggtatattttgacaatggcagatcaattaagtatattttttatgggttgttggcttcgccagtttggaaaaaatcagtttctcaacaatggcagaacttcataatgctgttaaaaaaaagacagcatgagacattgtattaaaa

SEQ ID NO: 14304 - DNA, 2919 bp, Zea Mays
ctcgtatttgttaagcggctaatctcagagcttctgttgggagctggggaccatttgtttagattcagtgcggggtttcctcgcctccctccttccatgggagcttggaagctgctggatctctgcaagtgactatgagccagagttttgacatcaacgtacttcgtgaagaagcaaggagtcggtggttaaagccttctgaagtgtactatatcttgcagaatcacgagaggttcccgatcacccatgaggcaccaaagaagccgcccagtggttccctattcctttacaatcgtcgtgtcaatcgttatttccggagagatggtcacacatggcggcggaagaaggatggaagaactgttggagaggctcatgaacgactgaaggttggaaatgttgatgctttgagctgctattacgctcacggggagcaaaatccaagtttccagagacggtgtttctggatgctggaacctgcatacgaacacattgtgctggtacaatatagagaggttgatgtggttagaaattattcatcacaactgtcaaatggcctcccagaacctctttcatccttgggatatccaaatgccatctgtggaaaccaataccacagctcctcttctggcgctagcgagtgtagtgagtcccatcagagctattctaatttgagttctgtaactgaagtaagttcctattccggtaacaaagagtacaccaaaaatgatggcggtttactgagcataccggaggttggacacacttgtctgcaacaaaatcggactgataatggtaactcgaaaaataaatctgggcttaatattgctttaaagaagatagctgagcagttaagtttgggtgaagatgatgatgactatattttctcaaatcaagctcattctgtgggaggcgacaaccaagtaaaacatattcaacaagaaggaacacagaaaggtttaagtaggaatatagcgccatcatgggaagatgtactgcagtccagttcaggtttaccaatttcatccatataccagcaatcggatgtcgagtatcagaaaaattcagaataccatccaccagaacgcctggacagcagtgatttacgcatacaacttgctgctgctaaaaagtttcttttaggaccagaagccaccgttgactcaccatctttgaactctgtgctgagaaatagagcgaactgtgtaactgatactatttcagcttatgacagtagatttggaagctctctgaacccagattggcaaacaaaaacagcattaacatttcaaagcaattctcagggctctgaaataacggagttgtttgaccatggtcattttgaacactactccagagaagatacaacattttctttaggacagacaaacaagtttaatattcgtgagatctctccagaatgggcattttcatatgagatcaccaaggtcatcattactggagattttctatgtaatccatcgaatttgggttgggctgtgatgtttggtgatagtgaggtacctgctaaagtagtccagccaggtgttcttctctgccacacgccactgcactgcagtggaaatctcagaatctgcattacttcgggaaacagagaagtttgcagtgaattcaaagactttgagttccgctcaaaaccctcttctagtttcacagacatcgcaccatcttctagacatctgaaatccagtgaagagttactaattcttgcaaaatttgctagaatgcttttgtctgggaatggaaaccctgaagttccagatggtgatccccaatctggacagtgtccaaaacttaagatggatgaagggctctgggataggttgattgaagaactcaaagtagggtgtgaaagtccattaagctcggttgattggattttggaggaactgctgaaaagtaaattacaaaagtggttatctgtgaagctcagaggattcaatggaacggattctatatccaagcatgaccagggtattatacacttaatctctgccctaggctatgagtgggcattgtcttcagttctcagtgttggtgttggtctaaattttcgtgattcaaatggatggactgctcttcattgggctgcttattttggaagctgttcattcagaagaaatacaaaggttgcaaaggtcgcaacatttctcaacatgagaagaaatgcagttaaaatacaggctcatgtaagaggccatcaagtgagaaagaaatacagaacaattgtaagcactgtcagtgtgctagagaaagtaatacttaggtggcgccgtaaaggtcatggcctccgtggcttccgagctgagcagcaatcaatggtcgaagcaatagaggaagatgatgaggaggatgatgacttcgatgatgacgaagcagtcaagatctttcgccggcagaaggtcgatcaagctgtaaaggaggctgtgtcaagagtgttgtccatggtagactctacagaagcgaggatgcaataccggcgaatgcttgaggaatttcgccaggcaactaattggaaggatcaaatgaagtaacatcaatatttgacagtgatttagagttattacttattagggatcaacgacttcatgtaaggagcatttatgtctcgagatctgccagcacccatcaatgacataaattaagtatttagggaatgtgttccagttgctactaattggccgtctaattgtacagtgttagcgaaatcgaaagtagattatttctgccacgatgtattttcactttctgtatttaggtatattttgacaatggcagatcaattaagtatattttttatgggttgttggcttcgccagtttggaaaaaatcagtttctcaacaatggcagaacttcataatgctgttaaaaaaaagacagcatgagacattgtattaaaa

SEQ ID NO: 14305 - DNA, 2977 bp, Zea Mays
gaagcatacgtgcgccctctcctacaggattgtcttgccttaagatttcattgaccttatgttgcacctataaagatacaaatcttggcaaggttcatggcttatgttgggcttttgaccctcctgaggccagtacattcgacgaacttgaaaagattaggatttttcttttcataactttattagatatctttatattgagaagggaatgatttcgccaactaatcatatcccatgatgagattcatgttagtattaaaattttattgtggtccgatggggtttaatagaatattaactaacggtgcacctatcggcttattctttggtggttccctattcctttacaatcgtcgtgtcaatcgttatttccggagagatggtcacacatggcggcggaagaaggatggaagaactgttggagaggctcatgaacgactgaaggttggaaatgttgatgctttgagctgctattacgctcacggggagcaaaatccaagtttccagagacggtgtttctggatgctggaacctgcatacgaacacattgtgctggtacaatatagagaggttgatgtggttagaaattattcatcacaactgtcaaatggcctcccagaacctctttcatccttgggatatccaaatgccatctgtggaaaccaataccacagctcctcttctggcgctagcgagtgtagtgagtcccatcagagctattctaatttgagttctgtaactgaagtaagttcctattccggtaacaaagagtacaccaaaaatgatggcggtttactgagcataccggaggttggacacacttgtctgcaacaaaatcggactgataatggtaactcgaaaaataaatctgggcttaatattgctttaaagaagatagctgagcagttaagtttgggtgaagatgatgatgactatattttctcaaatcaagctcattctgtgggaggcgacaaccaagtaaaacatattcaacaagaaggaacacagaaaggtttaagtaggaatatagcgccatcatgggaagatgtactgcagtccagttcaggtttaccaatttcatccatataccagcaatcggatgtcgagtatcagaaaaattcagaataccatccaccagaacgcctggacagcagtgatttacgcatacaacttgctgctgctaaaaagtttcttttaggaccagaagccaccgttgactcaccatctttgaactctgtgctgagaaatagagcgaactgtgtaactgatactatttcagcttatgacagtagatttggaagctctctgaacccagattggcaaacaaaaacagcattaacatttcaaagcaattctcagggctctgaaataacggagttgtttgaccatggtcattttgaacactactccagagaagatacaacattttctttaggacagacaaacaagtttaatattcgtgagatctctccagaatgggcattttcatatgagatcaccaaggtcatcattactggagattttctatgtaatccatcgaatttgggttgggctgtgatgtttggtgatagtgaggtacctgctaaagtagtccagccaggtgttcttctctgccacacgccactgcactgcagtggaaatctcagaatctgcattacttcgggaaacagagaagtttgcagtgaattcaaagactttgagttccgctcaaaaccctcttctagtttcacagacatcgcaccatcttctagacatctgaaatccagtgaagagttactaattcttgcaaaatttgctagaatgcttttgtctgggaatggaaaccctgaagttccagatggtgatccccaatctggacagtgtccaaaacttaagatggatgaagggctctgggataggttgattgaagaactcaaagtagggtgtgaaagtccattaagctcggttgattggattttggaggaactgctgaaaagtaaattacaaaagtggttatctgtgaagctcagaggattcaatggaacggattctatatccaagcatgaccagggtattatacacttaatctctgccctaggctatgagtgggcattgtcttcagttctcagtgttggtgttggtctaaattttcgtgattcaaatggatggactgctcttcattgggctgcttattttggaagctgttcattcagaagaaatacaaaggttgcaaaggtcgcaacatttctcaacatgagaagaaatgcagttaaaatacaggctcatgtaagaggccatcaagtgagaaagaaatacagaacaattgtaagcactgtcagtgtgctagagaaagtaatacttaggtggcgccgtaaaggtcatggcctccgtggcttccgagctgagcagcaatcaatggtcgaagcaatagaggaagatgatgaggaggatgatgacttcgatgatgacgaagcagtcaagatctttcgccggcagaaggtcgatcaagctgtaaaggaggctgtgtcaagagtgttgtccatggtagactctacagaagcgaggatgcaataccggcgaatgcttgaggaatttcgccaggcaactaattggaaggatcaaatgaagtaacatcaatatttgacagtgatttagagttattacttattagggatcaacgacttcatgtaaggagcatttatgtctcgagatctgccagcacccatcaatgacataaattaagtatttagggaatgtgttccagttgctactaattggccgtctaattgtacagtgttagcgaaatcgaaagtagattatttctgccacgatgtattttcactttctgtatttaggtatattttgacaatggcagatcaattaagtatattttttatgggttgttggcttcgccagtttggaaaaaatcagtttctcaacaatggcagaacttcataatgctgttaaaaaaaagacagcatgagacattgtattaaaa

SEQ ID NO: 14306 - DNA, 2685 bp, Zea Mays
ctagtctgggcggcgcttctgcctcgttgtgttaagctggtatggtcttcgagattttggaacacgaccctcgatccatggaaacgactcaagatcattgacccatcagactcgggttcatgtaccgaactcccgattcacgtcccatagaggttggaaatgttgatgctttgagctgctattacgctcacggggagcaaaatccaagtttccagagacggtgtttctggatgctggaacctgcatacgaacacattgtgctggtacaatatagagaggttgatgtggttagaaattattcatcacaactgtcaaatggcctcccagaacctctttcatccttgggatatccaaatgccatctgtggaaaccaataccacagctcctcttctggcgctagcgagtgtagtgagtcccatcagagctattctaatttgagttctgtaactgaagtaagttcctattccggtaacaaagagtacaccaaaaatgatggcggtttactgagcataccggaggttggacacacttgtctgcaacaaaatcggactgataatggtaactcgaaaaataaatctgggcttaatattgctttaaagaagatagctgagcagttaagtttgggtgaagatgatgatgactatattttctcaaatcaagctcattctgtgggaggcgacaaccaagtaaaacatattcaacaagaaggaacacagaaaggtttaagtaggaatatagcgccatcatgggaagatgtactgcagtccagttcaggtttaccaatttcatccatataccagcaatcggatgtcgagtatcagaaaaattcagaataccatccaccagaacgcctggacagcagtgatttacgcatacaacttgctgctgctaaaaagtttcttttaggaccagaagccaccgttgactcaccatctttgaactctgtgctgagaaatagagcgaactgtgtaactgatactatttcagcttatgacagtagatttggaagctctctgaacccagattggcaaacaaaaacagcattaacatttcaaagcaattctcagggctctgaaataacggagttgtttgaccatggtcattttgaacactactccagagaagatacaacattttctttaggacagacaaacaagtttaatattcgtgagatctctccagaatgggcattttcatatgagatcaccaaggtcatcattactggagattttctatgtaatccatcgaatttgggttgggctgtgatgtttggtgatagtgaggtacctgctaaagtagtccagccaggtgttcttctctgccacacgccactgcactgcagtggaaatctcagaatctgcattacttcgggaaacagagaagtttgcagtgaattcaaagactttgagttccgctcaaaaccctcttctagtttcacagacatcgcaccatcttctagacatctgaaatccagtgaagagttactaattcttgcaaaatttgctagaatgcttttgtctgggaatggaaaccctgaagttccagatggtgatccccaatctggacagtgtccaaaacttaagatggatgaagggctctgggataggttgattgaagaactcaaagtagggtgtgaaagtccattaagctcggttgattggattttggaggaactgctgaaaagtaaattacaaaagtggttatctgtgaagctcagaggattcaatggaacggattctatatccaagcatgaccagggtattatacacttaatctctgccctaggctatgagtgggcattgtcttcagttctcagtgttggtgttggtctaaattttcgtgattcaaatggatggactgctcttcattgggctgcttattttggaagctgttcattcagaagaaatacaaaggttgcaaaggtcgcaacatttctcaacatgagaagaaatgcagttaaaatacaggctcatgtaagaggccatcaagtgagaaagaaatacagaacaattgtaagcactgtcagtgtgctagagaaagtaatacttaggtggcgccgtaaaggtcatggcctccgtggcttccgagctgagcagcaatcaatggtcgaagcaatagaggaagatgatgaggaggatgatgacttcgatgatgacgaagcagtcaagatctttcgccggcagaaggtcgatcaagctgtaaaggaggctgtgtcaagagtgttgtccatggtagactctacagaagcgaggatgcaataccggcgaatgcttgaggaatttcgccaggcaactaattggaaggatcaaatgaagtaacatcaatatttgacagtgatttagagttattacttattagggatcaacgacttcatgtaaggagcatttatgtctcgagatctgccagcacccatcaatgacataaattaagtatttagggaatgtgttccagttgctactaattggccgtctaattgtacagtgttagcgaaatcgaaagtagattatttctgccacgatgtattttcactttctgtatttaggtatattttgacaatggcagatcaattaagtatattttttatgggttgttggcttcgccagtttggaaaaaatcagtttctcaacaatggcagaacttcataatgctgttaaaaaaaagacagcatgagacattgtattaaaa

SEQ ID NO: 14307 - DNA, 2475 bp, Zea Mays
gactcaagatcattgacccatcagactcgggttcatgtaccgaactcccgattcacgtcccatagaggttggaaatgttgatgctttgagctgctattacgctcacggggagcaaaatccaagtttccagagacggtgtttctggatgctggaacctgcatacgaacacattgtgctggtacaatatagagaggttgatgtggttagaaattattcatcacaactgtcaaatggcctcccagaacctctttcatccttgggatatccaaatgccatctgtggaaaccaataccacagctcctcttctggcgctagcgagtgtagtgagtcccatcagagctattctaatttgagttctgtaactgaagtaagttcctattccggtaacaaagagtacaccaaaaatgatggcggtttactgagcataccggaggttggacacacttgtctgcaacaaaatcggactgataatggtaactcgaaaaataaatctgggcttaatattgctttaaagaagatagctgagcagttaagtttgggtgaagatgatgatgactatattttctcaaatcaagctcattctgtgggagcaatcggatgtcgagtatcagaaaaattcagaataccatccaccagaacgcctggacagcagtgatttacgcatacaacttgctgctgctaaaaagtttcttttaggaccagaagccaccgttgactcaccatctttgaactctgtgctgagaaatagagcgaactgtgtaactgatactatttcagcttatgacagtagatttggaagctctctgaacccagattggcaaacaaaaacagcattaacatttcaaagcaattctcagggctctgaaataacggagttgtttgaccatggtcattttgaacactactccagagaagatacaacattttctttaggacagacaaacaagtttaatattcgtgagatctctccagaatgggcattttcatatgagatcaccaaggtcatcattactggagattttctatgtaatccatcgaatttgggttgggctgtgatgtttggtgatagtgaggtacctgctaaagtagtccagccaggtgttcttctctgccacacgccactgcactgcagtggaaatctcagaatctgcattacttcgggaaacagagaagtttgcagtgaattcaaagactttgagttccgctcaaaaccctcttctagtttcacagacatcgcaccatcttctagacatctgaaatccagtgaagagttactaattcttgcaaaatttgctagaatgcttttgtctgggaatggaaaccctgaagttccagatggtgatccccaatctggacagtgtccaaaacttaagatggatgaagggctctgggataggttgattgaagaactcaaagtagggtgtgaaagtccattaagctcggttgattggattttggaggaactgctgaaaagtaaattacaaaagtggttatctgtgaagctcagaggattcaatggaacggattctatatccaagcatgaccagggtattatacacttaatctctgccctaggctatgagtgggcattgtcttcagttctcagtgttggtgttggtctaaattttcgtgattcaaatggatggactgctcttcattgggctgcttattttggaagctgttcattcagaagaaatacaaaggttgcaaaggtcgcaacatttctcaacatgagaagaaatgcagttaaaatacaggctcatgtaagaggccatcaagtgagaaagaaatacagaacaattgtaagcactgtcagtgtgctagagaaagtaatacttaggtggcgccgtaaaggtcatggcctccgtggcttccgagctgagcagcaatcaatggtcgaagcaatagaggaagatgatgaggaggatgatgacttcgatgatgacgaagcagtcaagatctttcgccggcagaaggtcgatcaagctgtaaaggaggctgtgtcaagagtgttgtccatggtagactctacagaagcgaggatgcaataccggcgaatgcttgaggaatttcgccaggcaactaattggaaggatcaaatgaagtaacatcaatatttgacagtgatttagagttattacttattagggatcaacgacttcatgtaaggagcatttatgtctcgagatctgccagcacccatcaatgacataaattaagtatttagggaatgtgttccagttgctactaattggccgtctaattgtacagtgttagcgaaatcgaaagtagattatttctgccacgatgtattttcactttctgtatttaggtatattttgacaatggcagatcaattaagtatattttttatgggttgttggcttcgccagtttggaaaaaatcagtttctcaacaatggcagaacttcataatgctgttaaaaaaaagacagcatgagacattgtattaaaa

SEQ ID NO: 14308 - DNA, 2410 bp, Zea Mays
aaggaatacttcaataatgctgttaaaactaatacagaccattcatgtcatacggtggctcctaatatgacctttttttatcacgtacttgtaagatattgtttcccaaggcttgtacatagacgacagatcaatcgaagtattcctttcatcattcaagaatctaatataatcattgtatgaagtcattatatgactggcaaaacgcaacttcagactgttaaacgcgcacattgcaatctttcttcctttttcagttaacagaaataatgtgcattgcatgtgagaatccaaatatcattctagattgtttttctcaaggaaacacaagaaaacattacaggactttcgtcacagcgaaaatccacacgtttcaaaaagatacgtgtatctacagtcgtgtccaaaataacattcatgtccaacatattacatccctatctgcattggacagcttcattttcttttcccgtgcagcccagtcatattccatctattgctcccttccaagtggtcagttaaccaacatgcacagtatgcctataccagacgtccaggctacggtctctaacttcgacacttcacactgagcaagggctctgccacattgctatgtcagctattaggtcacggagctgatcaatgaggagttttacttgcttgtttttgctttcaatttcctgcattagatctcaatgttagaaagatatgaatttatctgtcaaatgtgtgttaaattagcttgataaaagaagtgtatatcagaagttgacaaaaatcatgtttctttcgatttctaaatacagcatatgctaccatagatgaaatccaaaactaaattgatagcgacacatagaactatactcttcaaatcacaaaaaaagattgaaaaaatgctggaaaaggatagaaaaacagtatttcctcactctgtacttaactacttatgaatagaacataaaagaacttgccgcctgaagataacaggaagacacggcttggattgcaaatgggcaaatataattcacacagctgtccaaactttgagagtaatataatatagtagactagattaaactaactagagaaattacagggtagcacctttctcaaagcagaagcatgctcttccaatctctcaatctctgcatggtcagcttcagattctgttgatccaatgtcctgacaaattgagtatgcatgaattcttagagaagtcatacgtgggacagtgggaaggataagaaacctagatcaatttcaactagcattgacaaactaattttatcttgaacagtgagcaaaaatcaggcttgaccaattaggaatatgatgggataatattaaccttcttcttttaaggtaaggtaaagtcttctacatataatgtgaaaagcaagttctggttaactaaaatccatgtttgttgctatttactagttggctttgtccttaataattctccctttgcccattttcctagacacctttcgcttctccttttgtccagaagccttaggcatattaattggttctccccaggcacgttttaaaattttggtcgatagtaccccgtgctttgacatgcatgaatgcagcagactcctaagttggtccggtgggaagaggttcatcaaccagtaatttaagcttgactggtaaatgattcattttgattggatcctaggtacatgccttgagatgaaacacactcaaaacgaatggatggagacagtatcaaagtccatgcagtaatcatgtttcttcaaaaaaaaaacagagaatagtcaatcctaggttgccaatgatgttctttttaggaagacaagattgttttctcaaaaatatcggggatgtttgaatgcactagagctaatagttagttggctaaaaaactactagtagaattagctagctatctatcaactaatttgctaaaaatagctaatagctgaactattagctaaagtgtttggatgtcttcagctaattttagcagctaactattagctctagtgcattcaaacactcccgattgtctaacatagcactacatacttctcgagttcacgtcaatatttttatctttataattgtgccagtgccaccaaatatggatctctctatgaaaataaaaaattgccagctttggaaatggaaatttgttggctccctcggtccctccacaccaatggccactaaagcattacaggaatcgttagcattgcaaatatctagcagtctcaagaatttgctttgggctcccctacatgaaaatgccctgcttttttttacagcaagtgctatctttcatcacagaagaatgtgcctaaaacacttttccgcatgagcgccaggagcataagttgcatcaaggtcaaacctgagcgcaggacgacacggcagagat

SEQ ID NO: 14309 - DNA, 2653 bp, Zea Mays
cttgtcgttgcacaccttccttttgcgtggaaatcggttctggccttcaagcctgtaaagctcccccctttctgatccacaccatcgctgctgcgcctgcgcggcctgtttgcatttcatagccagaacccactcttttccttccttgttttgcgctaaagcagtccaattagcatcgctcgctcataagtctgttggaggcagcattgagctatttctgcaaccaagtgtgtattccttgcttcccgcaatccaaagctgcctccttttctcggatccaaatcccgcaacgttttcgtccatttggcaatctcgctggtgcttgtcaagctctaagcctgacacccccccccccccccaaccccaattccagcaccaaaatcccatctttttgcttgctggtgctggtgattccgtggccagtccgatgggggcgcttggggacaggctgcgggccttctccacgaaccggtggctggtgttcgtcgccgcaatgtggctgcagtccatggccggcatcgggtacctcttcggcgccatctcgccggtcatcaaggccgcgctgggctacaaccaacgccaggtggccgcgctcggcgtcgccaaggacctcggcgactgcgtcggcttcctcgccggctcgctctcggccgtgctgccgtcatgggcgatgctgctcatcggctccgctcagaacttcctcggctacggctggctctggctcatcgtcaccaggcaggcgccggcgctgcccctctggatgatgtgtgttcttatctatgttgggaccaacggtgagacattcttcaacacaaccgcacttgttacatgcatacagaacttccccaagagcagaggtcagacagtgggtattatgaaaggatttgcgggccttagcagtgcaatcttgacgcagctgtatgcagtaatgcacacaccagaccatgcaacacttgtcttcatggttgcagttggtccatcgttggttgctcttggcctgatgtttattattaggcctgttggaggtcaccgccagaggctctcctttttgaatcatcaaaaggagagacaagcacttcacaagagaaagaggatcagccagaggtcattttgagtgaggtggaagaggagaagcctaaggacattgattcattacctccatctgaaaggagaaagaggatcgcagagttgcagaccaagttagtgcaagctgcagcaaggggtggggttagaatccggaggaaaccacaccgaggggaaaacttcaccctgatgcaggcattggtgaaggctgatttttggcttatttggtgttcgctcctacttggatcaggatcaggtctgacagtgatcgacaatctgggtcagatgagccaggctgttgggttcaaagatgtacatatttttgtgtcattgacgagcatatggaatttccttggtcgtgttggaggtggctacttctctgagattattatcagggaacacgcatacccaaggcacatagcgctggtaattgctcagatcctgatggctgttggtcatttcctctttgcaatggcttggcctcgaactatgtacatcggaaccttcctggttggactcggatatggagctcattgggctattgtgccagctgctgtctctgaactttttggcgtaaaacactttggtgcaatgtacaacttcctcacagtagcaaaccccacagggtcactcatcttctcaggccttattgctagtaatttgtatgactatgaagctgagaaacaagcacaaggccatcagataacagcattgacatctccaagattgcttcataacatgggttttcttgcagatggaccactgaagtgtgaaggagctgtctgcttttttgttagctcattgattatgtcagcgttctgtgttgttggagctggcttaagcctcatggttgtttacagaaccaaacgggtctatactcaactctatcgttcaaaccgcacatgaaacttccatggataggatatgccatttcctcatgttgttccatgtaccataatttttgcatatatgtgtcgtatacacacaaaattaaagtttgcatgtatattctctaatcatttcagaggctttactgcacgaactgctgtccccaaatagaaatttgcacgcctcatttgtcggatagacaggctgtagctgaagcctgaagcttggaccatgaattctgtaatgaaggctttgtactaagacacacatgtccattcagctccggctctactgtaattttcttttatgtgcatgatagaatcttctatgattctgccaaatctaagagctctagttgttattttgttgtttctcttttgtgatgtatcaacttgttaccagtaattcttgcttcctgcatagacttcctgtatgctttggttctatataaactgtagttgggaacaatgacctgaagagacaagaatcacgattgttacattgagcatcaacttggaccacggagcgcttccactcttgctgaattgtgttatcggagctccagtgcactttgcagtactaggcatatctctgtccttgtacatattgccgttagtagctgctgatgaacatcttggtatttgcagaagtgctacagtaacctcagaaacacccactgctt

SEQ ID NO: 14310 - DNA, 2955 bp, Zea Mays
cacattgctattgtgtattgcaaaattttggaggctttgactaaaaaagcttcgttttttcgagcttgctcctcccccgaaaaaaaaatcggggcccaaaaagttcgcaattctgggggctcccgtggccgcaggtccgcccgaattagcgcgcctctcggagatgatcctgcgccggcaaaggcaatgaagatctctaatctggatgcacacttaatcttgtccagctcttgatcagttgatcttgtgctttgctgctcctgctcaagttaatttgttggccaatcaagttcagaggcgcagatgagtgaggagtacaatatggatgatgccctaaaagccaaaaatgttgctgagaccaagttccatgcccgtgacatcaggggtgctcggaagtacgcactcaaggcccagaatctctgcccgacacttgaaggcatattgcagatggtctcaacgcttgaagttcatcttgcagctgagtccaagattgatggagagagtgactggtatcggatattgtctctaggcgcctttgcagatgaagaggaggtgaagaagcaatacaggaagctagctctgctgctgcaccctgacaagaacaaatcagttggtgctgaggaggccttcaaactgatctctgaggcgtggagtgtgttgtcagatactagcaggaaggtggtttatgatgagaagagaagaaatcattctgttgtcaatgtaaccaatggtatctatacttatgataagaaggcaaacaagagggctcgaaagaatgccgctgctgcagctgctgccgccgccgctgctgcagccgcagctgagactaccactcatcctgttggggttgatacattctggacatcttgcaaccgctgccggatgcagtatgagtacctaagaatttatcttaatcataacctgctgtgcccaaattgccataatgcattcttggcagtggagactgggttcccatgcaacggaagcagttcatcattctcctggtcaaccaagcagcagccacagcagaaccacaattcaaccaagcattcatatggctcaacaagcaggacttctagcatccctgggacagggcatggggggtaccagcaagataatgcttatgattcctacaacaatcaaggcttccagtggaatcagtactccaagacaacacctgcagctggtaccaatgcttatggtacacatgccttggagaaacagagaaagaagcatgatgagagctacagctacaactattctgaaagcggcaacttatatgtccatgagaaagctgcttcaaggcgtggtcgcttctcaaagcggagaaggcataattacgatacttacactactgtggattttggtggcgataacaaagaaacagttgccgcaagcacagaaccaactgctgttttcactgatgtgggacgggtcaacggtacttcagcggaaaggtttagatctgcagtgagtggaagaagagcaaatgttcttggtgagattacccagattgatacacgaagtctacttcttgagaaagccaaggcaactgtccgcaaaaaattgcaggagttaaacattacatcatcttcacgatttgcagagagaagaggatctgaaggaaagctaaatccttgtggcaacaacataaaggtcaatggtgtcctctctgacaaacctggcaagggagtcaagctatgtagctcaagaagcatagaaatccaagtgcctgatactgatgacaagaatccagagcagcgccgtgtacctgtgtcaattgacgtcccagaccccgacttccatgatttcgataaagatcgaacagagaaggcatttgacagtgatcaagtgtgggctacatatgacagcgaagatggcatgcctcgcctatatgtaatggttcagaaagttctttcgatgaggcctttccggatccgcatgagctttctcaactcaaagtcaaatatcgaactggcacctataagctgggttgcctccggtttccagaagacatgtggcgatttcagggttgggagatatcaggtcagcgaaacggtcaacatattttcacacagagtgagctggactaaaggtccccgaggcgtcatcaggattgttccccagaaaggggatacatgggccttgtaccgcaactggtctcctgattggaatgagcttacacccgatgatgtgatatacaagtatgagatagtagaagtcgttgatgatttcaccgaggagcaagggctgaccgtcatcccgttgctgaaggttgccggattcaaagctgtcttccacagacacatggatcccaaggaggtcaggaggataccgaaggaagggctgttccagttctcacatcgagttccttctcgtcttctgaccggtgaagaaggcaacaacgccccgaaaggttgccatgagctggaccccgccgcaactccagtggaccttcttaaggttatcacggagctcaaggaagatgcggtgggcgcagactgctaaataggagaagggggcaactctgaacactgaagataggtagctggatgtctggacgatcagatcccacttggttaatgacacggtgcaagcacatgatggcatttctaacatttgatttcatctctacacgaactgattaaatggccattgggaggagactgcacacggcatcatcggtgaggaggttagtcgacgggaggttgtttacttgtttgtgttgccgctctgtaatgtactgtaggaggcaagtctgagtcgagggacaagagctgcaaggcttggcttgcccgtgtaccccgcatttgtgtaccctgtttttttacttgtgatgttgtatttccttcggttttatagtaattcatcgccatgatgttgaacctgataaattgtagactctgaactctggtaaccatgtcggaaaatctagcggctttatctaaaaaaaat

SEQ ID NO: 14311 - DNA, 2227 bp, Zea Mays
ctacttcccaagagagagtgagagggcggcaagggagggacgtggagagagaggaagagatgccgaacgaaatcatttcattttccgtgcggatcttgcgggcctccgtggctggcggcgcctaccaccagacacccgctaggccgctacataaggcgagccccccatccccacttgctgccccctcaatccctcatagtcagtcatagagcgagaggaagaggcgcgcgtgggtgcagtgcagacgtgcggggcagagcacaacagcagcggatccggggagggagggaagccatgggcgaggaggcggccaagaaggaggaggtggagaagcccaaggaggccgcggcggcagaggagaagaagaaggacgacaagcccaaggaagtaggcggcggcggcggcggcgagaagcccaaggacggggaggaggaggagaagaagaaggaggacgcgcccccgcctccgccaccggaggaggtcgagatgcgggtctacatgcactgcgaggggtgcgcccgcaaggtcaagaagatcctcaggcgcttcgacggtaatgctgatgctgtcctgtcctctgctgcccctacccctctgctgtcctactactatctctacgtgtccatcggttttcttctttgttgttgtagtattaaacacgcgtgattgcacgatgtgattgagatttcagaatattctgtctctctctcactctcactctcactctttttaaaaaaaaaatcaatccagattagggacacttgcttcaaaggagtggaggatgtgatcgccgactccaaggcgcacaaggtgctggtgaaggggaagaaggcggccgccgaccccatgaaggtggtggagcgcgtgcagaagaagaccggccgcaaggtcgagctgctgtcgccgatgccgcccccgccggaggtggaggagaagaaggaagatgaggcggagaagaagaaggacgatgagaagaaggcagagcccgagccgccgaagccggaggagaagaaggagccgccggtgatcgctgtggtgctgaaggtgcacatgcactgcgaggcgtgcgccgaggggatcaagaagaggatcctcaagatgaaaggcgtgcagtccgtagaaccggacctcaaggcgtcggaggtgacggtgaagggcgtgttcgaggagtccaagctggcggagtacgtgtacaagcgcacgggcaagcacgcggccgtcgtcaagtccgagccggccccggcgccggagggcggcggcggcgacaaggcggccaaggaggaggaggagaataagaaggatgcaggcggtgccggaggcgaggagaagaaggacggcaaggaggaggaagagaagaaggatggcggcgagaagaacgaggagaagaaggacggcggcgacggagacggcgacaagaaggacgaggccggcgacaaggacaaggacccggccgccagcctgtacatgcactacccgcggttcccgttcgctggagggtactaccagccgccggcctacccgccacctccggggtacccgtacgcctaccagccggcctacccgccgccgttctacgcgccgccgcaccacctgcaccagcagcagcccatggcgccgcagatcttcagcgacgagaaccccaacgcctgctccgtcatgtagttgtcactcaaatgtcatgtaaaaaaaaagaaccgtaggaccctgtgtttgcgcgggggtcctgcccctgccagagcgagggaccctgtctttgccagaaatgcccctggggcaaccaagctaatggcgactttgtttgaacaaaaagtagcagacttttttgcggggttcgatttctctctctctctctttttcttttgtaattgtaacccttttttcacctttctggactggtataaaagtaagcctggactcgtcagtttatgggtgcatatggaggagtatctttgtgtagaatattctggctggtactgactactgcgcttcggacttgtataaaaaaagaactattattagtttgtttgtttggatttaatccttactagtttctattaattttacggtgttttgtcttctaaactttctatagattagaggaatatttagtttgtagttgactgtgtcacgctttttctaagataccaaatatgctgtacaacttcagcagtccggctatatgtgtagtgtatgtatgatattactgctctgacaagttcagtttacg

SEQ ID NO: 14312 - DNA, 1786 bp, Zea Mays
gcggcgcctaccaccagacacccgctaggccgctacataaggcgagccccccatccccacttgctgccccctcaatccctcatagtcagtcatagagcgagaggaagaggcgcgcgtgggtgcagtgcagacgtgcggggcagagcacaacagcagcggatccggggagggagggaagccatgggcgaggaggcggccaagaaggaggaggaggagaagaagaaggaggacgcgcccccgcctccgccaccggaggaggtcgagatgcgggtctacatgcactgcgaggggtgcgcccgcaaggtcaagaagatcctcaggcgcttcgacggagtggaggatgtgatcgccgactccaaggcgcacaaggtgctggtgaaggggaagaaggcggccgccgaccccatgaaggtggtggagcgcgtgcagaagaagaccggccgcaaggtcgagctgctgtcgccgatgccgcccccgccggaggtggaggagaagaaggaagatgaggcggagaagaagaaggacgatgagaagaaggcagagcccgagccgccgaagccggaggagaagaaggagccgccggtgatcgctgtggtgctgaaggtgcacatgcactgcgaggcgtgcgccgaggggatcaagaagaggatcctcaagatgaaaggcgtgcagtccgtagaaccggacctcaaggcgtcggaggtgacggtgaagggcgtgttcgaggagtccaagctggcggagtacgtgtacaagcgcacgggcaagcacgcggccgtcgtcaagtccgagccggccccggcgccggagggcggcggcggcgacaaggcggccaaggaggaggaggagaataagaaggatgcaggcggtgccggaggcgaggagaagaaggacggcaaggaggaggaagagaagaaggatggcggcgagaagaacgaggagaagaaggacggcggcgacggagacggcgacaagaaggacgaggccggcgacaaggacaaggacccggccgccagcctgtacatgcactacccgcggttcccgttcgctggagggtactaccagccgccggcctacccgccacctccggggtacccgtacgcctaccagccggcctacccgccgccgttctacgcgccgccgcaccacctgcaccagcagcagcccatggcgccgcagatcttcagcgacgagaaccccaacgcctgctccgtcatgtagttgtcactcaaatgtcatgtaaaaaaaaagaaccgtaggaccctgtgtttgcgcgggggtcctgcccctgccagagcgagggaccctgtctttgccagaaatgcccctggggcaaccaagctaatggcgactttgtttgaacaaaaagtagcagacttttttgcggggttcgatttctctctctctctctttttcttttgtaattgtaacccttttttcacctttctggactggtataaaagtaagcctggactcgtcagtttatgggtgcatatggaggagtatctttgtgtagaatattctggctggtactgactactgcgcttcggacttgtataaaaaaagaactattattagtttgtttgtttggatttaatccttactagtttctattaattttacggtgttttgtcttctaaactttctatagattagaggaatatttagtttgtagttgactgtgtcacgctttttctaagataccaaatatgctgtacaacttcagcagtccggctatatgtgtagtgtatgtatgatattactgctctgacaagttcagtttacg

SEQ ID NO: 14313 - DNA, 1236 bp, Zea Mays
cagacactctatggctttatcgtcatcatcaccagtggttgccccgtgcaggttcctgtgcccccgcgccactaccgcctctcgcgacatcctctccttcgcgaccacagcaacaaggaggcggctgctcctctccaccgccaccaccaccattgccgccgccatggccgcttcttcctcctgcaaggtcatcgactcccacctgcacgtctgggccacgccacagcaggccaaggaggagtacccgtacttcccaggccaggaacccacgctgcgtggcgacgccgacttcttactcgagtgtatgagtgaagctggagtggacggggctgttattgttcaacctattaatcatatgtttgatcattcgttggtaactagtgtgttgaagaaatacccatccaagttcgttggttgctgtcttgcgaatcctgcagacgatgggactgggattaaacagcttgaacatctgattgtacaagaaaaataccgtgctgtgaggttcaacccaaacttatggccatctggtcaaaagatgaccaatgaggttggaaggtcattattttcgaaggcaggagaacttggagtaccacttggaataatgacgatgaagggagttggtccatatattcaagaaatagaggaactgtgtagggattatcctgcaactaccgttattcttgaccatatggctttctgcaagccaccaacgaacgatgaagaagagaaggcattctcttcatttctaagcttatccagattcccacagtgctcttttccgcataacaagagaagcatatccatatgaagacactgctcagcttctttccagtgtgatatctcattatggagccagtcgagtaatgtggggaagtgacttcccctatgttgttcctgaatgtggttacaaaggaggaagggaggcgatttctcatgtcgccagcaagataccagtttcccagtcagatttggaatggatcttgggaaaaacagtgagccaattattccaaggtgcatgggttactccatgatcactgtagctggtaggacaatgtattccagagcaactatatcaacgggaatatatgtccttttttccagtgtttacatgtattctctctgtttcaaataatgtctttatctagatacatatatctaggtgtgtagcaaaatctttaacttcagttcttgattatgcgacctacaccataacctcaatatcgaataatctttgac

SEQ ID NO: 14314 - DNA, 2729 bp, Zea Mays
ctatacgtgcgggcgcgtgtgtcgcggcccgacggcctggatggacgcgccgtgtgtgccggccccgacggacacgccgtgtgtcgggcggtccggttccaacagccgcagcctcgtccaagctcatcgccgggaccgcgtgcgcgacgtcggcggtctggcacgacgcctgcttcctccggtactcggtccgcgacaccggccggttccgcgaggacgaacacacggagaccgtgttcaacgcgagccgcgcgctgtcgtcgttgccgccgcatgtcggcgccaacaaagcggcggtgaggcgcctactcgccgccgtcgtcgcggacagcacgaggagcggccacatgtgcagcgacatcggtgtaggcactggtgggacgactgcggcaggcggcggccggatctacgggctcacgcggtgcctcggcggtgcctcggccggatctacggatctacgggctcacgcggtgcctcgccgccgggatctcgtgcgccgactgccgccgctgcctcggcggcgctctcgcggtggtagagcgggagtacaacggcagcgcggggatgcaggtcctgcggctcagctgcatggccaggtacgagagctaccccttctacaacaccaagtccttggcccggcgatcgctggcgtcggcgatgatcgattacttccccttaaatgtatcatcatcctttcctgcgagtgtggggggtgtacaacccacaccagcgcctcctggcggtcgtaacccatcgccttcaccgcctgcacaagcacgagcatcacctgcaccagcagcaccgttgaacatctccgggcctgcaactgcgactccgagagctgcacaacccaccccagcgccccctggcggtcgtactcgtaccccacagcatgcagctgccgcaacgaatgatcaaacggcctccggatcatcagagaacaaaaggaaggaaacttcgaatagaaccaaatggctgatcgcttctattgcaactgggttggtggctgccttcaccagcctcgcactcaccatgtccatatggtaccggcggcgaaaacagcaactgtatcagagaggacatgtcataggtttattattttgaatcgtcaaccagatgccgtgcccgaggatactatgcgtgacctagagaagaatcatttggactccgaagaagaagaagacgaggacggaggaagaacgagctaccagctctacaactacctggttcttgaggctgctacatgtcgcttctcaagtagaaacaagctagggagcggtggatttggaacggtatacaagggcacgcttgagaatgggaaggaagtagcagtgaaaaggctcagggactccaagaggacgatacaagaactagagagggagatctccattgtggctagcttgcgccataagaacatcgtgaggtttttaggctactgcttccaagaggaagggaggttcttcatctacgagtacgtgcctaataacagccttgataagttttggtacaaagcatcttctcaatggcaccagaggctagagtgggctacatggttcaacgtcatcttaggggttgctcgcggccttaagtttctccatgacaaggggattattcaccgggacctcaagccacacaatgtacttctcgaccataacttcaacccaaagatcgccgattttgatctcttgaggatgtatgatcaacagaaaactcatgagagcaccgagaaggccgctggaacattcgggtatatggcaccagagtgcacatccggacgaaaattgctgctttcaatcaagtccgacgtgtacagctacggggtgttggtgctggagatcatcaccggccacaagatctacactttcgaaggccaaaactctgaaggcctcgtcgaatacgtgtggcagcactggacggagaagagagcgagcgacgtcgtggattgcgacttgggcatggaagggcaggagcacgggccatggcaggcgctgcggtgcgtgcacgtcgcgcttctctgtgtgcagtcggatcggtcgaggcggccaactatggggcaggtcatcgccatgcttagcagtggcgatgacgggacggaggagctaccggagccatcccggcctgcctgggtacgtcgtccatccaacgacggtgtcaagttttcagctgtgcttcgggtgcaggtagcaccgcttgatgacgtccctccatcaacaaaatggatgggattcttgcatggcttagatttgatcgattatgaactaaacatatttatatttatgatattaatttaaaattatcagattagctatgaaacatatttttataatagaatgatttagagttatactagtacaatactcacgcattgggacgacacataaattattcgataaaacacaatagttacctaaaaacgaacaacacatatattaccatcgatcttaatatctcacaatttttttttgccaacaaccaatacattgttattgttactctctaattttacatcaactatttagactccatctactaagctaggggcacattgcatttggcacaagcaagtctcaaatggcacatagatccatgtcaagaaaaatcttgtatttatgataactttacatctctatggtatgtttttatagtacttgatgtatacatgatcaaacaatgtttaaactaataatgaggtcaatataatatcttttgtatacacattttgatttttt

SEQ ID NO: 14315 - DNA, 2703 bp, Zea Mays
ctatacgtgcgggcgcgtgtgtcgcggcccgacggcctggatggacgcgccgtgtgtgccggccccgacggacacgccgtgtgtcgggcggtccggttccaacagccgcagcctcgtccaagctcatcgccgggaccgcgtgcgcgacgtcggcggtctggcacgacgcctgcttcctccggtactcggtccgcgacaccggccggttccgcgaggacgaacacacggagaccgtgttcaacgcgagccgcgcgctgtcgtcgttgccgccgcatgtcggcgccaacaaagcggcggtgaggcgcctactcgccgccgtcgtcgcggacagcacgaggagcggccacatgtgcagcgacatcggtgtaggcactggtgggacgactgcggcaggcggcggccggatctacgggctcacgcggtgcctcggcggtgcctcggccggatctacggatctacgggctcacgcggtgcctcgccgccgggatctcgtgcgccgactgccgccgctgcctcggcggcgctctcgcggtggtagagcgggagtacaacggcagcgcggggatgcaggtcctgcggctcagctgcatggccaggtacgagagctaccccttctacaacaccaagtccttggcccggcgatcgctggcgtcggcgatgatcgattacttccccttaaatgtatcatcatcctttcctgcgagtgtggggggtgtacaacccacaccagcgcctcctggcggtcgtaacccatcgccttcaccgcctgcacaagcacgagcatcacctgcaccagcagcaccgttgaacatctccgggcctgcaactgcgactccgagagctgcacaacccaccccagcgccccctggcggtcgtactcgtaccccacagcatgcagctgccgcaacgaatgatcaaacggcctccggatcatcagagaacaaaaggaaggaaacttcgaatagaaccaaatggctgatcgcttctattgcaactgggttggtggctgccttcaccagcctcgcactcaccatgtccatatggtaccggcggcgaaaacagcaactgtatcagagaggacatgtcatagatgccgtgcccgaggatactatgcgtgacctagagaagaatcatttggactccgaagaagaagaagacgaggacggaggaagaacgagctaccagctctacaactacctggttcttgaggctgctacatgtcgcttctcaagtagaaacaagctagggagcggtggatttggaacggtatacaagggcacgcttgagaatgggaaggaagtagcagtgaaaaggctcagggactccaagaggacgatacaagaactagagagggagatctccattgtggctagcttgcgccataagaacatcgtgaggtttttaggctactgcttccaagaggaagggaggttcttcatctacgagtacgtgcctaataacagccttgataagttttggtacaaagcatcttctcaatggcaccagaggctagagtgggctacatggttcaacgtcatcttaggggttgctcgcggccttaagtttctccatgacaaggggattattcaccgggacctcaagccacacaatgtacttctcgaccataacttcaacccaaagatcgccgattttgatctcttgaggatgtatgatcaacagaaaactcatgagagcaccgagaaggccgctggaacattcgggtatatggcaccagagtgcacatccggacgaaaattgctgctttcaatcaagtccgacgtgtacagctacggggtgttggtgctggagatcatcaccggccacaagatctacactttcgaaggccaaaactctgaaggcctcgtcgaatacgtgtggcagcactggacggagaagagagcgagcgacgtcgtggattgcgacttgggcatggaagggcaggagcacgggccatggcaggcgctgcggtgcgtgcacgtcgcgcttctctgtgtgcagtcggatcggtcgaggcggccaactatggggcaggtcatcgccatgcttagcagtggcgatgacgggacggaggagctaccggagccatcccggcctgcctgggtacgtcgtccatccaacgacggtgtcaagttttcagctgtgcttcgggtgcaggtagcaccgcttgatgacgtccctccatcaacaaaatggatgggattcttgcatggcttagatttgatcgattatgaactaaacatatttatatttatgatattaatttaaaattatcagattagctatgaaacatatttttataatagaatgatttagagttatactagtacaatactcacgcattgggacgacacataaattattcgataaaacacaatagttacctaaaaacgaacaacacatatattaccatcgatcttaatatctcacaatttttttttgccaacaaccaatacattgttattgttactctctaattttacatcaactatttagactccatctactaagctaggggcacattgcatttggcacaagcaagtctcaaatggcacatagatccatgtcaagaaaaatcttgtatttatgataactttacatctctatggtatgtttttatagtacttgatgtatacatgatcaaacaatgtttaaactaataatgaggtcaatataatatcttttgtatacacattttgatttttt

SEQ ID NO: 14316 - DNA, 2883 bp, Zea Mays
cccgacggacacgccgtgtgtcgggcggtccggttccaacagccgcagcctcgtccaagctcatcgccgggaccgcgtgcgcgacgtcggcggtctggcacgacgcctgcttcctccggtactcggtccgcgacaccggccggttccgcgaggacgaacacacggagaccgtgttcaacgcgagccgcgcgctgtcgtcgttgccgccgcatgtcggcgccaacaaagcggcggtgaggcgcctactcgccgccgtcgtcgcggacagcacgaggagcggccacatgtgcagcgacatcggtgtaggcactggtgggacgactgcggcaggcggcggccggatctacgggctcacgcggtgcctcggcggtgcctcggccggatctacggatctacgggctcacgcggtgcctcgccgccgggatctcgtgcgccgactgccgccgctgcctcggcggcgctctcgcggtggtagagcgggagtacaacggcagcgcggggatgcaggtcctgcggctcagctgcatggccaggtacgagagctaccccttctacaacaccaagtccttggcccggcgatcgctggcgtcggcgatgatcgattacttccccttaaatgtatcatcatcctttcctgcgagtgtggggggtgtacaacccacaccagcgcctcctggcggtcgtaacccatcgccttcaccgcctgcacaagcacgagcatcacctgcaccagcagcaccgttgaacatctccgggcctgcaactgcgactccgagagctgcacaacccaccccagcgccccctggcggtcgtactcgtaccccacagcatgcagctgccgcaacgaatgatcaaacggcctccggatcatcagagaacaaaaggaaggaaacttcgaatagaaccaaatggctgatcgcttctattgcaactgggttggtggctgccttcaccagcctcgcactcaccatgtccatatggtaccggcggcgaaaacagcaactgtatcagagaggacatgtcataggtgattgaagccgccgtcactgtttttttttcttgtttgatttcttcttctctctttacattctgctttagggtgtgttcgtttgttccggaatcgtgacatagaactaatccaaccaggaatgcttatctaatttgtataggctttgatcacctggaaccattcctggcctcaatcctgaacaaacgaacgcagccttaacgtatcactattctctgtttattattttgaatcgtcaaccagatgccgtgcccgaggatactatgcgtgacctagagaagaatcatttggactccgaagaagaagaagacgaggacggaggaagaacgagctaccagctctacaactacctggttcttgaggctgctacatgtcgcttctcaagtagaaacaagctagggagcggtggatttggaacggtatacaagggcacgcttgagaatgggaaggaagtagcagtgaaaaggctcagggactccaagaggacgatacaagaactagagagggagatctccattgtggctagcttgcgccataagaacatcgtgaggtttttaggctactgcttccaagaggaagggaggttcttcatctacgagtacgtgcctaataacagccttgataagttttggtacaaagcatcttctcaatggcaccagaggctagagtgggctacatggttcaacgtcatcttaggggttgctcgcggccttaagtttctccatgacaaggggattattcaccgggacctcaagccacacaatgtacttctcgaccataacttcaacccaaagatcgccgattttgatctcttgaggatgtatgatcaacagaaaactcatgagagcaccgagaaggccgctggaacattcgggtatatggcaccagagtgcacatccggacgaaaattgctgctttcaatcaagtccgacgtgtacagctacggggtgttggtgctggagatcatcaccggccacaagatctacactttcgaaggccaaaactctgaaggcctcgtcgaatacgtgtggcagcactggacggagaagagagcgagcgacgtcgtggattgcgacttgggcatggaagggcaggagcacgggccatggcaggcgctgcggtgcgtgcacgtcgcgcttctctgtgtgcagtcggatcggtcgaggcggccaactatggggcaggtcatcgccatgcttagcagtggcgatgacgggacggaggagctaccggagccatcccggcctgcctgggtacgtcgtccatccaacgacggtgtcaagttttcagctgtgcttcgggtgcaggtagcaccgcttgatgacgtccctccatcaacaaaatggatgggattcttgcatggcttagatttgatcgattatgaactaaacatatttatatttatgatattaatttaaaattatcagattagctatgaaacatatttttataatagaatgatttagagttatactagtacaatactcacgcattgggacgacacataaattattcgataaaacacaatagttacctaaaaacgaacaacacatatattaccatcgatcttaatatctcacaatttttttttgccaacaaccaatacattgttattgttactctctaattttacatcaactatttagactccatctactaagctaggggcacattgcatttggcacaagcaagtctcaaatggcacatagatccatgtcaagaaaaatcttgtatttatgataactttacatctctatggtatgtttttatagtacttgatgtatacatgatcaaacaatgtttaaactaataatgaggtcaatataatatcttttgtatacacattttgatttttt

SEQ ID NO: 14317 - DNA, 824 bp, Zea Mays
taaaattctagcacatcataattggtggatgccattgagtatcaggtccttatcggctaactccggtacttggtgcatacctagctagacttcaccttcatcgtcgactatgtcagccaattcatggagaactgtaccacctagcacttcaacacggtgaagtggatcatgtgctatatcgcctacatgattgactacctctgttattacaagcttgataggaaggagataaagttgttgggggcacaacgatgccaacataggcgacaacattgatatgaggaagagtatcatcgacatgttgttcttccttggctcctacccttgtcttggcagtactagaagaaaaaggtcatcttgttctcatcctatgaaatagagtacattataggtacaacaatagcctatcagggtatataattggcacaactacgtgatgagatgaagagcgagcaacacacaaccttttagttgaagatggatagccaatcaactatagctctcagtaaaaatcgtgttttctattaccaaagaaaatatataaatatgacatttcattttattcgggaatgtcagcgatggaaagatgaatattaagcatgtctgctccgatccgaggagaagatcactgttattttaactaagcactttgtttttatgaactatgtgtaaagctaggagttgttaagatcagcaaggaactttaggcttaggtgaaatgtgagaagaacatgcaatcctgaatttcggttgattttctttccttatagagatagcgttgagcttggcttggaaagttatcttcccaagtatgtcactgtttg

SEQ ID NO: 14318 - DNA, 206 bp, Zea Mays
gctcaatgaaatttgctcaggctatgatcaaacactgggtccgctaaagtttatagttgatcaaatttaagccttgctaggattacatccattttgttgatggagagaccagagattattacctatgtttgtactggccatggaccgtcgtacgtcatcaagcggcgctacctgcacccaaagcatagctggacacctgacgccgc

SEQ ID NO: 14319 - DNA, 4456 bp, Zea Mays
cctgcgcacacatgcccacggtctatgaccttagcttacaaaccagctctgaattcaattcgattcagggaagggatgccaagggcctaataagaagaagtttttttttgtattactcacgtattcgacgaggccttcagagttttggccttcgaaagtgtagatcttgtggccggtgatgatctccagcactaacaccccgtagctgtacacgtcagacttgatcgaaagtaggaattttcgtccggacgtgcactctggagccatgtacccacttcacaacaaacaacagagaggtccaaaaaaaaaactcttcatcaacttctatatgaacctagtaagagaaggagaatctcaatctcaatcttactaatttatgtatgttaggaagcctccacgttaacaaggttcaagtttaaaagagacataaatactaactttctcacaaaaatcagaaacatccggtagggtgcaatcattgttattattaatatcagtatatttctttgttttctaacaaatatttgcacctggtattatgaaatatctataataataattaaatcctttgatttccatctaaattttagctctatcattataaaaaaaatcacaaaaatatccctaagttctcttttacattaccatgcctggcaactggcgttgcaaaatactctttggtttatatttcaagtatccacctacattgttaaaaaaagctaagatcctttaaatctctgtctaaatgccaatataagttgttctagaaaattatttttttatcgtaaagtataagtacaagatatatgtttataaattgcataattccaccagagtttcattaaaggtaatcacaaatgctatgtaccggcatgtagaccaacgaaaatgtttggtatataataagcacacaagttttaagttaacacacggatacaaaactacaacgacggataagatcaaaagttggaggccaaattatcgatccatgatgtcaagtgacatgaccagaacttatatagactaaccttagttttcaactaaatacttattaaagaaccataaagatgcaaataaaaatatgataacacatgtcctagcattactaacacgaaaccctcaatggaccctccatgctaggctattcttgatggagtttcactcccgttttgaaggatgtcacataaacaattttggtgacatggtaaaatattaaggaagatagagattaaatgaatatcatctagatgaaattgcatagacaatccatggctttcatagaactaaatgcaatgagtgtgtatggaccacaaagaataaaactatagattgcacaatgttatttcaaccatgattcaagtgttatcaactaattatccatgtccactgaaagattctagtttggtcttggtgattgagtgacaatttaatggactaatgtgttatttgttgacttagataggtgtctagtccataagtacattagcgtgagtaacatgagccatggtggagaaatcgtttcaatttattgtgatgctcaactagtgtaacaaaggagctcatttaaaagaaggcacgatatgtgtcatatgtctgggtagagaagatcaaaaacatggcttgtgtatgaaggaccatgtttctaggcataatggtgaagagcaaatgaagtttgatcgatgaatcaataaaaccacgtgataatatgaaatggatcatatcacctacgagatatcaagacattaaatagttgtgttgattacaagtggcttgatgaaggttggacgcttgtgtggcatcatagtggaagagatgcgatgaaatgcacaaagaaaaggcatatttatagggtatttcatttcacatgtcaaaggttcagtaaagaagtgtatgcttgagtttagtatagatggatgtgatattgagagtggtacacttttttgtatatcggttatctaatgtcactctagtgatctgactttgcatgcattgctagaatccaatggtggctgaaaaagagtttgagaaaatctttgtaaaattaattgtgaaaatgctaacatggacctaaggtggtgattgtcatgttgggcaatatttgtagttagttttttcaaaggtttgaaaatggctttgaaatggttgagtttgctagcgaaaaacatgaagaaaagacgacggagaaaggccctacaatgctatcctagagagttgccttagtgagcttgctaccatctaggatggaatttctgaggcccaaagatagtttccgaacaagctcttgtattgggcacacgatcttcaccgtagaaatttcatgttcacggaccaagttctgaacaaacttttttggggtgaaaccttttgcccaaaaatccatgacctaagtcctagaattttctattggggcacacaagggaagtatctggggctatgtccattgactaggcgcatgggagcagtccaatcatattgctagtgcgtgaaggagcccttctttgaatttttcaagttgtaccacttgaaattttcaaagtgggcaggagggaacactaagttcggtcgctaagtgagtgcgcataagaagagtctttgactgcccaatagagaggagcagggactcgaccattggttgtttagaaagaaggctaggattttgggccttctatgctataaattccgttgtgggctagaaaagcctagtagcggctagttttcttgccctctttaaatagaggggtgggtagtcatggtctagttgctgagaccattgggacttggtgtccctaagaagagatttagctctacccttgtcgtatttgcttattgttgagtgccttcaattgtaagagagtgttcttagtgcattgtaccgagagctgtcttgagtgacattaggtgaattgctacaagccagtggtgcttgttactcttaaaggttgccatcttctagatggtttggtcgcttgtggtctctatcaaatcatgtgtggtaatttcttaggactccaaagaatgatttgtgaggggtgttgtactcaaacacgggagatcgtgaagagcaacttgagttaaacaaggtgtgaagagcaccaagtggactgactaaatcaatgtgctaaaacttttatatgagcttttcctttggtggagagagtgatcttgtgtgcttaccactagcaagttaatcagcgagaagcttgggcttgcctcaacatggattaagtcgttggtgttggaacctgccctccaagacaggttgatccaatgggaaagcaaggttagggtttgcaaagcttaacatggaatgccaaaagcttcgttaatctccctgtgcctgggcactgtacgggggtatttataggtactcgagggatcgcctgtccctttcaaagacatttaaaccctcgagtacccggtttatccccagaatattcccacgaggggaggttacagacagtcattacagtaaactttattacagacatgacccttatcacatctgtccgcgtggggcccatctctacgggccgaatcacacatgggcctcccccggtggtgagggaacgggaggtccgtagacttcggcagggccttcgtcttgtcacacaagagcgaagggggtcgaacaggcctccgtccgattggcgccctcggcctgttctggcgggttctgtggatccagcctatgtctgtgcaaggagaggacgaaatcgtagagcgaagggtggcgtgttcgccttcgccccaacagttggcaaaccaccgaaccttgagataaaaatcattgtgtctacttgtcttcccattggtttgcaattttataacacaagattgtatttacttattcatataattgtgcttgctttgttgctcttgtagaaagtttacttttgcagctagcaagttgaatgttgagcttctgtaactaattagtggtagcactcttgcttagcttgtgtagattttctcgtaattagtgctagtgtgtcttagactttgtgcaattttcttaccattatatgtaggagcttctagtgtgcttggagtatagttgcatatgtttgtgtgaccttgctaactagccttttgtaggtgagctctccagttcaacatcttcgttgtttaacgtagaagctttgtaaggtgattttgttacatagaggggtgtagtcctagttagatcgaatagttttatttttttcacttcatattagttagccaacgcaattagttttagaaagaactatccatccctttctagtccgtcatctaaatcctacatcctcaaaagatggattgggaaaggaaccctagaaatttatcatatatggctatcaagttgcttgagtataatcatcatagagtgtaatagtcatttggtgtatgtttcataaaaacattactgaattcttccattatgagaagacttaagtaatccataaatctgcatgta

SEQ ID NO: 14320 - DNA, 1580 bp, Zea Mays
gtgggactgagatttcgtgcatgctggatggtccagaggacactaggcctcctaaggagttatgcacatgtcagaagctacaacagtcaactttcagctttggtttctgctacatctgaatgctcaaatctgccgaggagacaagtttgaggctgttgtgcccttcatgggtgaatctgtaactgatggaactcttgctaacttcttaaagaaacctggagacagagtcgaggctgatgaacctatagcgcagattgaaactgataaggtcactatagatgtcgcaagtcctgaggctggtgttattgaaaagctcattgctagtgaaggcgacacagttactccaggcactaaagttgcaatcatatccaagtctgctcaacctgctgaaacacatgttgctccatcagaggaagcaacttcaaaagaatcatctccaccaaaagttgaagataaaccaaaggtagaggaaaaagccccaaaagtagatcctcccaagatgcaagcaccaaagccaactgcaccatcaaaaacatccccttcagaaccacagctccctccaaaagaacgagagcggcgggtgccaatgccaaggctcaggaagcgtattgcaaaccgtcttaaggattctcagaacacctttgcaatgctgagtacatttaatgaagttgacatgaccaatttgatgaagcttcgttctgattataaagatgaatttgtcacaaagcatggtgtaaaattgggtcttatgtcttgctttgtcaaggctgctgtttctgcacttcaaaaccagccaattgtcaatgctgtcattgatggtgatgacatcatatacagagactacgtagacatcagtgttgctgttggcacttccaagggccttgtggttcctgttatccgagatgctgataccatgaactttgctgacattgagaaagggataaacaaccttgcaaagaaagcaactgagggggcgctctcaattgatgacatggcaggtggaacattcaccatctccaacggtggtgtctatggaagcctcctcagcacacctatcatcaaccctccacaggttgatcgatggcagagaggctgtcttcttcctgcggcgcatcaaggatgttgtcgaggaccccaggaggttgctgcttgacatataaattcatgcaccagcgctgcgctgccctgccggactgttttgtgcaattgtgcttatctggaaataatgccatggaaatttttgactgatgaaaaagaattacttcctcagaaagacgaaatctgagctgaggataccgaggtttttctctatataatcgtagaagagcaaactcaactcaacatgaggtcatgtttaattttcggatctgagatgttccattacgggatgcagttcccacaaacagtcattttatttaatatgcaagagcaatagagctgctgcatttttgtttgttggttcacaatttcgcctccagctggccagcctgcaactcgaggaatctggattgtataatgtgacgttggagcggtgctgcaatcgcacgctctgttgaatggtctcgactttaaactcgtcc

SEQ ID NO: 14321 - DNA, 1743 bp, Zea Mays
ctgagatttcgtgcatgctggatggtccagaggacactaggcctcctaaggagttatgcacatgtcagaagctacaacagtcaactttcagctttggtttctgctacatctgaatgctcaaatctgccgagatgctattacttacctaatccctctccataccaagtttggagtaggtcatttgcttcagacaacggagacaagtttgaggctgttgtgcccttcatgggtgaatctgtaactgatggaactcttgctaacttcttaaagaaacctggagacagagtcgaggctgatgaacctatagcgcagattgaaactgataaggtcactatagatgtcgcaagtcctgaggctggtgttattgaaaagctcattgctagtgaaggcgacacagttactccaggcactaaagttgcaatcatatccaagtctgctcaacctgctgaaacacatgttgctccatcagaggaagcaacttcaaaagaatcatctccaccaaaagttgaagataaaccaaaggtagaggaaaaagccccaaaagtagatcctcccaagatgcaagcaccaaagccaactgcaccatcaaaaacatccccttcagaaccacagctccctccaaaagaacgagagcggcgggtgccaatgccaaggctcaggaagcgtattgcaaaccgtcttaaggattctcagaacacctttgcaatgctgagtacatttaatgaagttgacatgaccaatttgatgaagcttcgttctgattataaagatgaatttgtcacaaagcatggtgtaaaattgggtcttatgtcttgctttgtcaaggctgctgtttctgcacttcaaaaccagccaattgtcaatgctgtcattgatggtgatgacatcatatacagagactacgtagacatcagtgttgctgttggcacttccaagggccttgtggttcctgttatccgagatgctgataccatgaactttgctgacattgagaaagggataaacaaccttgcaaagaaagcaactgagggggcgctctcaattgatgacatggcaggtggaacattcaccatctccaacggtggtgtctatggaagcctcctcagcacacctatcatcaaccctccacagtcgtctattctggggatgcattccattgtgcaacgccctgtggttgtgaatggtgacatccttgcgaggccaatgatgtaccttgcgctgacttacgaccacaggttgatcgatggcagagaggctgtcttcttcctgcggcgcatcaaggatgttgtcgaggaccccaggaggttgctgcttgacatataaattcatgcaccagcgctgcgctgccctgccggactgttttgtgcaattgtgcttatctggaaataatgccatggaaatttttgactgatgaaaaagaattacttcctcagaaagacgaaatctgagctgaggataccgaggtttttctctatataatcgtagaagagcaaactcaactcaacatgaggtcatgtttaattttcggatctgagatgttccattacgggatgcagttcccacaaacagtcattttatttaatatgcaagagcaatagagctgctgcatttttgtttgttggttcacaatttcgcctccagctggccagcctgcaactcgaggaatctggattgtataatgtgacgttggagcggtgctgcaatcgcacgctctgttgaatggtctcgactttaaactcgtcc

SEQ ID NO: 14322 - DNA, 2326 bp, Zea Mays
tcattaatatcagggaaaatgctaaataatcatctgcttgactgtatatgtatatcatcttccaaatgttaatggcctctgataattgttaatacataacaaagcagttcattcggaaggctgtttgttagtatatgacacactgtaatgagaaaggaagaaccataactgagccaaataatgcacatgtaaagttgtaaacagaggtttacctacaataattgctaggaatgaaaactgaagtgggcatctatgggtatctgtggtgtttgactgaaaaacatgattctcaaatgtgactataggaaaagttcttttttactgaagtgcgcatgataacattggaaacaaattcagtagtagtcaaatctactaacttgagtcggcagcaggttgttggttgttattcatggtcgtgggtgtataattcgtcgactgggaaacctcatcaattccgatttctcgttcaagagtgctcctgaactcccttgatacatcctaagtgcatcaaatcatattgcattacgaagcaagatcgtcaaacatattgcaacaacaaataaaggaccaacctgtatctctctaatggttggttggaaagcacgcaaagtcttccccaaattcctggctacctggaaacaatatagcaaatgaggccaagacccatatgtgggcagtgcatctaaaacatgtcttttttaatagcgctagcccaatagcataggtttgtagagaacatatgctgacatggaaatgattgtcaagcacagacgcatagggaagaaaaacgtttaaaagtaaatctgaaaatagttagagaacagaatcattttttaccttggttgttggcagataaaggagtcttcaatttaacttgaggtgaacctttacgcacacatgtggtacaacatatttttcctaaaactatttaaaatggccagttttcgaagaaatgatgctggtgagtcaaagaaggatctcaaagcaaaactctaaaatatagaaatgggatggtgtttgaagtcatggtaacaattccatacttccaatagagttcacgattaaagcctatcagggaggaacttaataccttgctgccttagactagacagtcagctaagtatcacgttaaaaatcagatataaggttaaacatgtaatttcctgcacccaacaaaaaaacagagtgatagggggaattcttttggttagcctgaagcttattctctaaaacttaaggttgattaacaatgacacagttccagagacagatgaaagtgcaaacagctcccagttatgaatggcattggcatgctcacattaataataactgaacaactgacactatcaaatgcaatgtcgttttcaggtgcaactgctctacagagcaaaggaggaatagacgtcagcataacactacggcagctgatggcctgaactgagaattagactaaggaaaaattatgctgctgagatgaatggccaaagggcacaacaatgaagctttttttttgtgggggggggggggggggggttatacctgttgagcaccattttgagcgggcggacggtccggccctgaggctggacggtccgcgatccgaacagtccgcgcctgtgggccggacggtccgcacatgcgcagagcagtttagggttccgagttttgtgctattttgttggctagatttgcggaattaacccggaatccagtcgtgtaaagggtccagcccccctcctctatataaagagaggtctacggccgatttgtaattattaatcgaatcaatacaacttctattcgcatttatttccagtataattaggagtagttctagtctagttctagtttagcctctcaatccccaaattcttcgcctctcttcgactctacgccgattagaggagtctaggtcggccggcccgagcctagacaactcataggatctctcctccccgacggggtccctcccgggagcgagatccaggcgccgccggtgatcttccgccgcccctacgcacgcgcggaccgtccggccgtcaggcaggaaaccctagcccctgcgccaggtcgcggaccgtccggcccccaggccgcggaccgtctgcgcctgaccagagagcaccgccgccgattcttcttaagtatttggcgctccaaaaaagcgtcaacaatacccataggtcaatcttgtttctcaactgctagcaccactcaagaaagctgacagggcttgtagactgagctaatttacctctgctagacccttggggccgaacaccaacaaggcgactactccaatgaccagtgcttcgggagctccaac

SEQ ID NO: 14323 - DNA, 876 bp, Zea Mays
ctccgactcacttagatacatccttgataaacctgatggctatcgcggagagctgtgttgatgcggtggtcatggagatggtggctgtctactgcggtggcctctatgccgccaagccagagcttgctgcccgccgcattgaggccatcggctttcaggttgggcaccagctctctgagagatataccatggagcgtccacgatttagtgatcatcttgaagcaatcaaatttatctgcaaagacttctggtcagagctgttcaagaaacagattgacaatctgaaaacaaatcataggggtacctttgtccttcaagataaccgttttcggtggcttactcgtgtttctctagatccatatacagagaacagagattcaactgaaaatgattctgcagcattgggtgatacagcagcccaaacaactaccatgcttctgtatttcccatgtggattgataagaggtgccttgactaacttaggaattccgtgttctgtctctgctgacatgtcaaaccttccagcatgttcgtttgtggtgcgcataaagacatgaactgtgagaaacgatacaagtacagcatgaagatctgacagtacctgcttctggttcaagcgggttgaacattgaagacagcagtatttgggcatgcattagatgtatcgtggtactgcatttagccccgtttgttttttgttttcttttcctccaggaattacttgttttcactatctcaaaatgactttcccgcaacctcctcatgagagcatgtacaaccccatttaagggctaagtgaaaaaatacaaaatacgggctcttcgcgaagaatccgtcttatcatgactttctatacacgtcttttagctgtattta

SEQ ID NO: 14324 - DNA, 2049 bp, Zea Mays
aaccgaaaccgatcacagctgactcccgaatccgtgaaatccccatcgccgtctccgtcttctcctattgccctctcctcgcccgcacagccgcactgtttcccaatcccaaaccctccgaccccacctggaacccaacacgcgcacccacagagggaaccgagcctagccgaaccttcgagaagtttccggaaagccgtgtcgtcgatggcggccgagggcggcggcggccaagagacgttcgaggcgcgggtgaagcgcctgttcgggtcccgcctcttcgacgccgtcccggactcctccttcccgacggcctcctggtccgtggccgcgggcgacgtcgagcgccaacgctgggcgaagccgtcagaggcccgcgacgcggaggaagaggcagcgggtgaggccggccgcggggacacgccctgcgcctcctcgttctacgactccaacggttgcctccgcagccggaggcgcaggtccaggcaggaggagttcgagggggacctggacgacctagatgaagacgaggaggaggatggggagagagggagggcgacggagcaggacgaggacgagggggttagggttaacatcggcctcgaccccactctggatcgggaggaagaggaggacaagtatgacagagaggcctttggtagagaggaggctgctgaccgcgtgtacatgcacgatataatggatgacggtataaacatgagcatcaacagtatagtccctgacctccttgatgattccattgaaggggtgtaccgttttaagaaggatcctcgggcagatatgagggcagcatctgcaagactcagagaagacgatgggtctgctaaagatggtgactctcactatgccactgaagcgaaggacttcctgaatgtgggaattcagacaaagaaagctgtggaggaagtaaatgtaaaacctatactgaagaggaaggaggagcaagcggatttgaaaccaaggaaacgtgtccggtttgatgctaatgttaaggatcgcgagtcggatatgtttgaacgtgatgaagattctccaatggttcctcaatccatggaagtagtcacagggaaggagagcacgcctactttgtctgtgtctcctggtgtccctgactatgtaaggaacccttcaaagtacacccgttacaccctggatgtaccagagtctaatgatgactcgaacaggacggctcttgctgacctgcatgatctgttagggagatcagaccaaaacaggatacattctgagactgctgttgagattcctagctcagtcacattcatccctcgcaaaaagtcagtggatgccatggcagtggatgacggtcccagagctattgattccaactcatctgtaattggattggtagcaggtgcctctgatgaacctgatcaatgcgagatggatgaagatgacagtaatttatcgtcaacgccacagatgcatacaaactcgaaggcaaactctcggcgttacaggtcaagtagaactgatgatgatgagtaaaattgagggccccagggtacctagtctgatgtttgtttaagaagtttttaagtttcggaatacttatgtaaatcaggatatatgtgtgctcttgtgctttgatcttgtgatctgagctaaccaactatgtttaagtacgtttcccccatatgctttgttctataatttcttatattgggatttgagcgccacatagtatgtcaatattagaaattttcagaaacttcactgatatgcacttcctttcctatgtagaaacgagtgtcagcagaataaacagttttggggacataggggcatacaaatacaatatcccatgggttacaaaatagggcatcccatttcaggtttgtgaccaaatttcagaaccaaaatccacaatatcaatctgtacattcttgcagcgtttatctactgtgctcaagacacgtagtggcggcggctacagctcatcagcaattctgtagagggcatcagccaccttgccaagcacaccaagcaggctgctcacttggtccttcc

SEQ ID NO: 14325 - DNA, 3922 bp, Zea Mays
cgccctgctgtttcgcgtttccgatttcgccaaatatttataatactagtgctattatagtattccgtgctttctttgaaaactgttttttgcgcttcgtaatcgtctctgcttcgcttctccgctccgcctgtcgccaccaccaccaccaactcgccggagaactgtcccgacgactgcgcgcgcggagagctgtgggggcgcgggagagggaggtagtactgggaatggaggaggagtcgaggcttagcggcgctttctcgctccatctctagggtttggttgctagtctgccccggctgggggcgtgcgcgccggcctggagctggactggaggtagcagccagcgtccggctccccgttgcaagcattaagctgcgcggctggagtgccccccccctttggccccgcctccgcgtctttcaactctggtgaaggtgctgctgttgtggcctgcgccatggaaccgtttccccagcttgcggctgcgtccacaggttgcgtgcacgcgtcgggctccggactgtgacgccgacgaggggatctcaggcgcccaactggtccggggtgaggcgcagcgcccgcaggatgccaaccgagcagaggcgctacatgcccccggcccattttcttccggcggagtcggaatcgtcctccttccctgacgagcttcgcttgcgtcctgagaggcaagttggacttttgaagcagggttgctttcctgagcatgctggcagatttgcttgttctcccctgcaaaagctcaagtgtattggcgcaacagtagtggatcagctagatattatgcagccacacaagctaatggaccagaaagtgccatttagccttgatgacaagttgttggatgttaagctgccaccatcttcctggagagaggatcaggatccagcaaaccaactcgattcttttcccaagccattggtttcacctctagaaggtagaaggggaagtgtaaatgggacccaatatgaaagtggacttttctctagctcccttccagaattttttgacaagaaaataagattaactccaaagaacagagttgttggtcatctggttggaaaagttaaccatgctgatgatgaaccatttgagttgacaaaggaaatcgaggcccaaataattgggcaacctgctccctgatgacgacgacttattgtcaagtgtttgtggtgatattgggtataataccaatgcgaataatcaggatgagattgatgatgatattttttgtactggaggtggaatggaattggaagcagatggaaatagcaaattgttaaactttaatggtggagccagtcagactaggtcaattgtccaactcaatggtgagcgatcctcgagaatcctttttgtcggaaacattgatagcaacgtcgaggattctgaattgaaattcatgtttgagcaatatggagacatgcagacacttaatgcttcttgcaaacatcatggttttgtgatggtatcttactatgatataagatcggcagaaaatgctatgagggcccttcaaagcaagccactcagatgtaggaaacttgacatacgttactcgagtccaaaggactatcctttggataaagatatcaacctgtccatggtaatagttaatcttgaagcttcgataactaatgatgacctgcaccagatatttggtgtctttggtgaaatcaaggagctgaagctgcacaatatgccttaaacaggagtgaaatttcaggaaataaaaacaaattggagcctagctgtctgggtggtactgaacgtttgatgcagcagatgtctcgtgcattggaacatgaacagtttggtgcatgtaaactcggaagcccaaacagtccttcaacatgctttggttctgtcaatatggcacccatcagatccactagcacagaaagtggaactgttcaggttttatgttctagagttcagacaccgataaaccaattccgagagggaaggaattttctggatcttccctcaactaccataagtagatcctctcctgttggaattacacctgcaggattacaaagcggccaccacgctcttgatgagcacatccattcacttggaaagatgaatgtacagaacaagggacgaatggattgtggatttcaagagagtactgctttccatcctcattctctccctgacttcaatgacagactaagaaatggtatctcctataactgctcaatacctcccatcggtgttaagagcaatgctagagctgctgaagcaatggatgtcaggcacatttacaaaggaggttgtgggcatctcagcaatcaatcttctgctcatactgaagcacttgggttttcaagaactggtagctgccctctctatggtcaccaactagcatggagtaattctaataacctacaccagcagccttcttctcccatgatatggcctagcatgggcccatttaccaataatatgccatctcgccagttgatgcaagtgcatggaatttcaagagcaccattgcgcatgcttgaaaataatatccctatgaatcaccaacatgtgggatctgccccagctgtcaatccatcaatttgggatagacgacatggatatgcaggggagatgatggaaacaccaggattccacccagggagtgctggaagcatgggtttccctggcagcacacatctgcatcagttggagaccaatggtatgtttcctcacaatggagggactttcatggacccagctatgtctcctgtgcacatgagtgctcgctctcctcagcagagggggcatattttccatcgaaggagcaatgtggctcctattccatcctctttcgattctgctggtgaacggatgcggagccgaagaaatgactcgaatgtaaatcaatctgacaacaaaaggctgtttgagcttgacattgagcgtatagtccggggcgaggactcccggactacactgatgataaagaatatcccaaacaagtacacatcaaagatgcttctggcagctattgatgaaagtcaccggggaacttatgattttatctacctgccaattgactttaagaataagtgcaatgttggttatgcattcatcaacatgatcaatcctgacaatattgttccattttataagacatttcatgggaaaaggtgggagaaattcaacagtgagaaagtggcctcacttgcttatgctagaatccaaggaaaatcagctctagttgctcatttccagaactcaagtttgatgaatgaggataaacgctgccgccctatactcttccactctgatggtccgaatgcaggagatcaagaaccattccctgtgggatcaaatgtccgttccaggcctggaaggtccaggattttgagttgggaacaaaaccaccaggacattgtgtctgatcataccaaaggtggaactccgagcagggctggtggcactccaggttacatcgccacggatactgatcatacggctgttgattgacgaacttgcgacaacacccgacattctgacaattgcaatccagttttttttttttttgaaattgcatcctctcctacctcttttttccttttgttatgttgtatctatatctacttccgcgtgatattttggcaccggaggctctagacggctgcagatttggtcgctgacaagtagcgaggagatggatgttgtgccgtcagtttctccttactttggcacagacccctcagcgggattttgttggacagtttgaccccctttcaccaggaaagatatccatatttgggggagtttccctattgctgtttggcagtgctgtcatgaacattttcctaatgctgtggatgtgaaatttcagaatgatcaaatcgaatgacggatgaatgagagccaataatatttttttacgctc

SEQ ID NO: 14326 - DNA, 3907 bp, Zea Mays
ctgctgtttcgcgtttccgatttcgccaaatatttataatactagtgctattatagtattccgtgctttctttgaaaactgttttttgcgcttcgtaatcgtctctgcttcgcttctccgctccgcctgtcgccaccaccaccaccaactcgccggagaactgtcccgacgactgcgcgcgcggagagctgtgggggcgcgggagagggaggtagtactgggaatggaggaggagtcgaggcttagcggcgctttctcgctccatctctagggtttggttgctagtctgccccggctgggggcgtgcgcgccggcctggagctggactggaggtagcagccagcgtccggctccccgttgcaagcattaagctgcgcggctggagtgccccccccctttggccccgcctccgcgtctttcaactctggtgaaggtgctgctgttgtggcctgcgccatggaaccgtttccccagcttgcggctgcgtccacaggttgcgtgcacgcgtcgggctccggactgtgacgccgacgaggggatctcaggcgcccaactggtccggggtgaggcgcagcgcccgcaggatgccaaccgagcagaggcgctacatgcccccggcccattttcttccggcggagtcggaatcgtcctccttccctgacgagcttcgcttgcgtcctgagaggcaagttggacttttgaagcagggttgctttcctgagcatgctggcagatttgcttgttctcccctgcaaaagctcaagtgtattggcgcaacagtagtggatcagctagatattatgcagccacacaagctaatggaccagaaagtgccatttagccttgatgacaagttgttggatgttaagctgccaccatcttcctggagagaggatcaggatccagcaaaccaactcgattcttttcccaagccattggtttcacctctagaaggtagaaggggaagtgtaaatgggacccaatatgaaagtggacttttctctagctcccttccagaattttttgacaagaaaataagattaactccaaagaacagagttgttggtcatctggttggaaaagttaaccatgctgatgatgaaccatttgagttgacaaaggaaatcgaggcccaaataattgggcaacctgctccctgatgacgacgacttattgtcaagtgtttgtggtgatattgggtataataccaatgcgaataatcaggatgagattgatgatgatattttttgtactggaggtggaatggaattggaagcagatggaaatagcaaattgttaaactttaatggtggagccagtcagactaggtcaattgtccaactcaatggtgagcgatcctcgagaatcctttttgtcggaaacattgatagcaacgtcgaggattctgaattgaaattcatgtttgagcaatatggagacatgcagacacttaatgcttcttgcaaacatcatggttttgtgatggtatcttactatgatataagatcggcagaaaatgctatgagggcccttcaaagcaagccactcagatgtaggaaacttgacatacgttactcgagtccaaaggactatcctttggataaagatatcaacctgtccatggtaatagttaatcttgaagcttcgataactaatgatgacctgcaccagatatttggtgtctttggtgaaatcaaggagattcaccctacttcagataatgaccattacaaatcgatagaattttttgatgtcagagcagctgaagctgcacaatatgccttaaacaggagtgaaatttcaggaaataaaaacaaattggagcctagctgtctgggtggtactgaacgtttgatgcagcagatgtctcgtgcattggaacatgaacagtttggtgcatgtaaactcggaagcccaaacagtccttcaacatgctttggattacaaagcggccaccacgctcttgatgagcacatccattcacttggaaagatgaatgtacagaacaagggacgaatggattgtggatttcaagagagtactgctttccatcctcattctctccctgacttcaatgacagactaagaaatggtatctcctataactgctcaatacctcccatcggtgttaagagcaatgctagagctgctgaagcaatggatgtcaggcacatttacaaaggaggttgtgggcatctcagcaatcaatcttctgctcatactgaagcacttgggttttcaagaactggtagctgccctctctatggtcaccaactagcatggagtaattctaataacctacaccagcagccttcttctcccatgatatggcctagcatgggcccatttaccaataatatgccatctcgccagttgatgcaagtgcatggaatttcaagagcaccattgcgcatgcttgaaaataatatccctatgaatcaccaacatgtgggatctgccccagctgtcaatccatcaatttgggatagacgacatggatatgcaggggagatgatggaaacaccaggattccacccagggagtgctggaagcatgggtttccctggcagcacacatctgcatcagttggagaccaatggtatgtttcctcacaatggagggactttcatggacccagctatgtctcctgtgcacatgagtgctcgctctcctcagcagagggggcatattttccatcgaaggagcaatgtggctcctattccatcctctttcgattctgctggtgaacggatgcggagccgaagaaatgactcgaatgtaaatcaatctgacaacaaaaggctgtttgagcttgacattgagcgtatagtccggggcgaggactcccggactacactgatgataaagaatatcccaaacaagtatatatcagagatttattctagttttctgtgaaggatcttctatgttttaagtcatacaaattttgatgtttcccataatcctttgtggtgatgtaggtacacatcaaagatgcttctggcagctattgatgaaagtcaccggggaacttatgattttatctacctgccaattgactttaagaataagtgcaatgttggttatgcattcatcaacatgatcaatcctgacaatattgttccattttataagacatttcatgggaaaaggtgggagaaattcaacagtgagaaagtggcctcacttgcttatgctagaatccaaggaaaatcagctctagttgctcatttccagaactcaagtttgatgaatgaggataaacgctgccgccctatactcttccactctgatggtccgaatgcaggagatcaagaaccattccctgtgggatcaaatgtccgttccaggcctggaaggtccaggattttgagttgggaacaaaaccaccaggacattgtgtctgatcataccaaaggtggaactccgagcagggctggtggcactccaggttacatcgccacggatactgatcatacggctgttgattgacgaacttgcgacaacacccgacattctgacaattgcaatccagttttttttttttttgaaattgcatcctctcctacctcttttttccttttgttatgttgtatctatatctacttccgcgtgatattttggcaccggaggctctagacggctgcagatttggtcgctgacaagtagcgaggagatggatgttgtgccgtcagtttctccttactttggcacagacccctcagcgggattttgttggacagtttgaccccctttcaccaggaaagatatccatatttgggggagtttccctattgctgtttggcagtgctgtcatgaacattttcctaatgctgtggatgtgaaatttcagaatgatcaaatcgaatgacggatgaatgagagccaataatatttttttacgctc

SEQ ID NO: 14327 - DNA, 3878 bp, Zea Mays
gtttccgatttcgccaaatatttataatactagtgctattatagtattccgtgctttctttgaaaactgttttttgcgcttcgtaatcgtctctgcttcgcttctccgctccgcctgtcgccaccaccaccaccaactcgccggagaactgtcccgacgactgcgcgcgcggagagctgtgggggcgcgggagagggaggtagtactgggaatggaggaggagtcgaggcttagcggcgctttctcgctccatctctagggtttggttgctagtctgccccggctgggggcgtgcgcgccggcctggagctggactggaggtagcagccagcgtccggctccccgttgcaagcattaagctgcgcggctggagtgccccccccctttggccccgcctccgcgtctttcaactctggtgaaggtgctgctgttgtggcctgcgccatggaaccgtttccccagcttgcggctgcgtccacaggttgcgtgcacgcgtcgggctccggactgtgacgccgacgaggggatctcaggcgcccaactggtccggggtgaggcgcagcgcccgcaggatgccaaccgagcagaggcgctacatgcccccggcccattttcttccggcggagtcggaatcgtcctccttccctgacgagcttcgcttgcgtcctgagaggcaagttggacttttgaagcagggttgctttcctgagcatgctggcagatttgcttgttctcccctgcaaaagctcaagtgtattggcgcaacagtagtggatcagctagatattatgcagccacacaagctaatggaccagaaagtgccatttagccttgatgacaagttgttggatgttaagctgccaccatcttcctggagagaggatcaggatccagcaaaccaactcgattcttttcccaagccattggtttcacctctagaaggtagaaggggaagtgtaaatgggacccaatatgaaagtggacttttctctagctcccttccagaattttttgacaagaaaataagattaactccaaagaacagagttgttggtcatctggttggaaaagttaaccatgctgatgatgaaccatttgagttgacaaaggaaatcgaggcccaaataattgggcaacctgctccctgatgacgacgacttattgtcaagtgtttgtggtgatattgggtataataccaatgcgaataatcaggatgagattgatgatgatattttttgtactggaggtggaatggaattggaagcagatggaaatagcaaattgttaaactttaatggtggagccagtcagactaggtcaattgtccaactcaatggtgagcgatcctcgagaatcctttttgtcggaaacattgatagcaacgtcgaggattctgaattgaaattcatgtttgagcaatatggagacatgcagacacttaatgcttcttgcaaacatcatggttttgtgatggtatcttactatgatataagatcggcagaaaatgctatgagggcccttcaaagcaagccactcagatgtaggaaacttgacatacgttactcgagtccaaaggactatcctttggataaagatatcaacctgtccatggtaatagttaatcttgaagcttcgataactaatgatgacctgcaccagatatttggtgtctttggtgaaatcaaggaggagtgaaatttcaggaaataaaaacaaattggagcctagctgtctgggtggtactgaacgtttgatgcagcagatgtctcgtgcattggaacatgaacagtttggtgcatgtaaactcggaagcccaaacagtccttcaacatgctttggttctgtcaatatggcacccatcagatccactagcacagaaagtggaactgttcaggttttatgttctagagttcagacaccgataaaccaattccgagagggaaggaattttctggatcttccctcaactaccataagtagatcctctcctgttggaattacacctgcaggattacaaagcggccaccacgctcttgatgagcacatccattcacttggaaagatgaatgtacagaacaagggacgaatggattgtggatttcaagagagtactgctttccatcctcattctctccctgacttcaatgacagactaagaaatggtatctcctataactgctcaatacctcccatcggtgttaagagcaatgctagagctgctgaagcaatggatgtcaggcacatttacaaaggaggttgtgggcatctcagcaatcaatcttctgctcatactgaagcacttgggttttcaagaactggtagctgccctctctatggtcaccaactagcatggagtaattctaataacctacaccagcagccttcttctcccatgatatggcctagcatgggcccatttaccaataatatgccatctcgccagttgatgcaagtgcatggaatttcaagagcaccattgcgcatgcttgaaaataatatccctatgaatcaccaacatgtgggatctgccccagctgtcaatccatcaatttgggatagacgacatggatatgcaggggagatgatggaaacaccaggattccacccagggagtgctggaagcatgggtttccctggcagcacacatctgcatcagttggagaccaatggtatgtttcctcacaatggagggactttcatggacccagctatgtctcctgtgcacatgagtgctcgctctcctcagcagagggggcatattttccatcgaaggagcaatgtggctcctattccatcctctttcgattctgctggtgaacggatgcggagccgaagaaatgactcgaatgtaaatcaatctgacaacaaaaggctgtttgagcttgacattgagcgtatagtccggggcgaggactcccggactacactgatgataaagaatatcccaaacaagtacacatcaaagatgcttctggcagctattgatgaaagtcaccggggaacttatgattttatctacctgccaattgactttaagaataagtgcaatgttggttatgcattcatcaacatgatcaatcctgacaatattgttccattttataagacatttcatgggaaaaggtgggagaaattcaacagtgagaaagtggcctcacttgcttatgctagaatccaaggaaaatcagctctagttgctcatttccagaactcaagtttgatgaatgaggataaacgctgccgccctatactcttccactctgatggtccgaatgcaggagatcaagaaccattccctgtgggatcaaatgtccgttccaggcctggaaggtccaggattttgagttgggaacaaaaccaccaggacattgtgtctgatcataccaaaggtggaactccgagcagggctggtggcactccaggttacatcgccacggatactgatcatacggctgttgattgacgaacttgcgacaacacccgacattctgacaattgcaatccagttttttttttttttgaaattgcatcctctcctacctcttttttccttttgttatgttgtatctatatctacttccgcgtgatattttggcaccggaggctctagacggctgcagatttggtcgctgacaagtagcgaggagatggatgttgtgccgtcagtttctccttactttggcacagacccctcagcgggattttgttggacagtttgaccccctttcaccaggaaagatatccatatttgggggagtttccctattgctgtttggcagtgctgtcatgaacattttcctaatgctgtggatgtgaaatttcagaatgatcaaatcgaatgacggatgaatgagagccaataatatttttttacgctc

SEQ ID NO: 14328 - DNA, 2784 bp, Zea Mays
gtttccgatttcgccaaatatttataatactagtgctattatagtattccgtgctttctttgaaaactgttttttgcgcttcgtaatcgtctctgcttcgcttctccgctccgcctgtcgccaccaccaccaccaactcgccggagaactgtcccgacgactgcgcgcgcggagagctgtgggggcgcgggagagggaggtagtactgggaatggaggaggagtcgaggcttagcggcgctttctcgctccatctctagggtttggttgctagtctgccccggctgggggcgtgcgcgccggcctggagctggactggaggtagcagccagcgtccggctccccgttgcaagcattaagctgcgcggctggagtgccccccccctttggccccgcctccgcgtctttcaactctggtgaaggtgctgctgttgtggcctgcgccatggaaccgtttccccagcttgcggctgcgtccacaggttgcgtgcacgcgtcgggctccggactgtgacgccgacgaggggatctcaggcgcccaactggtccggggtgaggcgcagcgcccgcaggatgccaaccgagcagaggcgctacatgcccccggcccattttcttccggcggagtcggaatcgtcctccttccctgacgagcttcgcttgcgtcctgagaggcaagttggacttttgaagcagggttgctttcctgagcatgctggcagatttgcttgttctcccctgcaaaagctcaagtgtattggcgcaacagtagtggatcagctagatattatgcagccacacaagctaatggaccagaaagtgccatttagccttgatgacaagttgttggatgttaagctgccaccatcttcctggagagaggatcaggatccagcaaaccaactcgattcttttcccaagccattggtttcacctctagaaggtagaaggggaagtgtaaatgggacccaatatgaaagtggacttttctctagctcccttccagaattttttgacaagaaaataagattaactccaaagaacagagttgttggtcatctggttggaaaagttaaccatgctgatgatgaaccatttgagttgacaaaggaaatcgaggcccaaataattgggcaacctgctccctgatgacgacgacttattgtcaagtgtttgtggtgatattgggtataataccaatgcgaataatcaggatgagattgatgatgatattttttgtactggaggtggaatggaattggaagcagatggaaatagcaaattgttaaactttaatggtggagccagtcagactaggtcaattgtccaactcaatggtgagcgatcctcgagaatcctttttgtcggaaacattgatagcaacgtcgaggattctgaattgaaattcatgtttgagcaatatggagacatgcagacacttaatgcttcttgcaaacatcatggttttgtgatggtatcttactatgatataagatcggcagaaaatgctatgagggcccttcaaagcaagccactcagatgtaggaaacttgacatacgttactcgagtccaaaggactatcctttggataaagatatcaacctgtccatggtaatagttaatcttgaagcttcgataactaatgatgacctgcaccagatatttggtgtctttggtgaaatcaaggagattcaccctacttcagataatgaccattacaaatcgatagaattttttgatgtcagagcagctgaagctgcacaatatgccttaaacaggagtgaaatttcaggaaataaaaacaaattggagcctagctgtctgggtggtactgaacgtttgatgcagcagatgtctcgtgcattggaacatgaacagtttggtgcatgtaaactcggaagcccaaacagtccttcaacatgctttggtacacatcaaagatgcttctggcagctattgatgaaagtcaccggggaacttatgattttatctacctgccaattgactttaagacatttcatgggaaaaggtgggagaaattcaacagtgagaaagtggcctcacttgcttatgctagaatccaaggaaaatcagctctagttgctcatttccagaactcaagtttgatgaatgaggataaacgctgccgccctatactcttccactctgatggtccgaatgcaggagatcaagaaccattccctgtgggatcaaatgtccgttccaggcctggaaggtccaggattttgagttgggaacaaaaccaccaggacattgtgtctgatcataccaaaggtggaactccgagcagggctggtggcactccaggttacatcgccacggatactgatcatacggctgttgattgacgaacttgcgacaacacccgacattctgacaattgcaatccagttttttttttttttgaaattgcatcctctcctacctcttttttccttttgttatgttgtatctatatctacttccgcgtgatattttggcaccggaggctctagacggctgcagatttggtcgctgacaagtagcgaggagatggatgttgtgccgtcagtttctccttactttggcacagacccctcagcgggattttgttggacagtttgaccccctttcaccaggaaagatatccatatttgggggagtttccctattgctgtttggcagtgctgtcatgaacattttcctaatgctgtggatgtgaaatttcagaatgatcaaatcgaatgacggatgaatgagagccaataatatttttttacgctc

SEQ ID NO: 14329 - DNA, 3882 bp, Zea Mays
gtttccgatttcgccaaatatttataatactagtgctattatagtattccgtgctttctttgaaaactgttttttgcgcttcgtaatcgtctctgcttcgcttctccgctccgcctgtcgccaccaccaccaccaactcgccggagaactgtcccgacgactgcgcgcgcggagagctgtgggggcgcgggagagggaggtagtactgggaatggaggaggagtcgaggcttagcggcgctttctcgctccatctctagggtttggttgctagtctgccccggctgggggcgtgcgcgccggcctggagctggactggaggtagcagccagcgtccggctccccgttgcaagcattaagctgcgcggctggagtgccccccccctttggccccgcctccgcgtctttcaactctggtgaaggtgctgctgttgtggcctgcgccatggaaccgtttccccagcttgcggctgcgtccacaggttgcgtgcacgcgtcgggctccggactgtgacgccgacgaggggatctcaggcgcccaactggtccggggtgaggcgcagcgcccgcaggatgccaaccgagcagaggcgctacatgcccccggcccattttcttccggcggagtcggaatcgtcctccttccctgacgagcttcgcttgcgtcctgagaggcaagttggacttttgaagcagggttgctttcctgagcatgctggcagatttgcttgttctcccctgcaaaagctcaagtgtattggcgcaacagtagtggatcagctagatattatgcagccacacaagctaatggaccagaaagtgccatttagccttgatgacaagttgttggatgttaagctgccaccatcttcctggagagaggatcaggatccagcaaaccaactcgattcttttcccaagccattggtttcacctctagaaggtagaaggggaagtgtaaatgggacccaatatgaaagtggacttttctctagctcccttccagaattttttgacaagaaaataagattaactccaaagaacagagttgttggtcatctggttggaaaagttaaccatgctgatgatgaaccatttgagttgacaaaggaaatcgaggcccaaataattgggcaacctgctccctgatgacgacgacttattgtcaagtgtttgtggtgatattgggtataataccaatgcgaataatcaggatgagattgatgatgatattttttgtactggaggtggaatggaattggaagcagatggaaatagcaaattgttaaactttaatggtggagccagtcagactaggtcaattgtccaactcaatggtgagcgatcctcgagaatcctttttgtcggaaacattgatagcaacgtcgaggattctgaattgaaattcatgtttgagcaatatggagacatgcagacacttaatgcttcttgcaaacatcatggttttgtgatggtatcttactatgatataagatcggcagaaaatgctatgagggcccttcaaagcaagccactcagatgtaggaaacttgacatacgttactcgagtccaaaggactatcctttggataaagatatcaacctgtccatggtaatagttaatcttgaagcttcgataactaatgatgacctgcaccagatatttggtgtctttggtgaaatcaaggaggagtgaaatttcaggaaataaaaacaaattggagcctagctgtctgggtggtactgaacgtttgatgcagcagatgtctcgtgcattggaacatgaacagtttggtgcatgtaaactcggaagcccaaacagtccttcaacatgctttggtatgcatttttatttctaatattgaaatgtcttttctctgttctattttctgactgtaaggcataatgcaaggttctgtcaatatggcacccatcagatccactagcacagaaagtggaactgttcaggttttatgttctagagttcagacaccgataaaccaattccgagagggaaggaattttctggatcttccctcaactaccataagtagatcctctcctgttggaattacacctgcaggattacaaagcggccaccacgctcttgatgagcacatccattcacttggaaagatgaatgtacagaacaagggacgaatggattgtggatttcaagagagtactgctttccatcctcattctctccctgacttcaatgacagactaagaaatggtatctcctataactgctcaatacctcccatcggtgttaagagcaatgctagagctgctgaagcaatggatgtcaggcacatttacaaaggaggttgtgggcatctcagcaatcaatcttctgctcatactgaagcacttgggttttcaagaactggtagctgccctctctatggtcaccaactagcatggagtaattctaataacctacaccagcagccttcttctcccatgatatggcctagcatgggcccatttaccaataatatgccatctcgccagttgatgcaagtgcatggaatttcaagagcaccattgcgcatgcttgaaaataatatccctatgaatcaccaacatgtgggatctgccccagctgtcaatccatcaatttgggatagacgacatggatatgcaggggagatgatggaaacaccaggattccacccagggagtgctggaagcatgggtttccctggcagcacacatctgcatcagttggagaccaatggtatgtttcctcacaatggagggactttcatggacccagctatgtctcctgtgcacatgagtgctcgctctcctcagcagagggggcatattttccatcgaaggagcaatgtggctcctattccatcctctttcgattctgctggtgaacggatgcggagccgaagaaatgactcgaatgtaaatcaatctgacaacaaaaggctgtttgagcttgacattgagcgtatagtccggggcgaggactcccggactacactgatgataaagaatatcccaaacaagtacacatcaaagatgcttctggcagctattgatgaaagtcaccggggaacttatgattttatctacctgccaattgactttaagacatttcatgggaaaaggtgggagaaattcaacagtgagaaagtggcctcacttgcttatgctagaatccaaggaaaatcagctctagttgctcatttccagaactcaagtttgatgaatgaggataaacgctgccgccctatactcttccactctgatggtccgaatgcaggagatcaagaaccattccctgtgggatcaaatgtccgttccaggcctggaaggtccaggattttgagttgggaacaaaaccaccaggacattgtgtctgatcataccaaaggtggaactccgagcagggctggtggcactccaggttacatcgccacggatactgatcatacggctgttgattgacgaacttgcgacaacacccgacattctgacaattgcaatccagttttttttttttttgaaattgcatcctctcctacctcttttttccttttgttatgttgtatctatatctacttccgcgtgatattttggcaccggaggctctagacggctgcagatttggtcgctgacaagtagcgaggagatggatgttgtgccgtcagtttctccttactttggcacagacccctcagcgggattttgttggacagtttgaccccctttcaccaggaaagatatccatatttgggggagtttccctattgctgtttggcagtgctgtcatgaacattttcctaatgctgtggatgtgaaatttcagaatgatcaaatcgaatgacggatgaatgagagccaataatatttttttacgctc

SEQ ID NO: 14330 - DNA, 3967 bp, Zea Mays
gtttccgatttcgccaaatatttataatactagtgctattatagtattccgtgctttctttgaaaactgttttttgcgcttcgtaatcgtctctgcttcgcttctccgctccgcctgtcgccaccaccaccaccaactcgccggagaactgtcccgacgactgcgcgcgcggagagctgtgggggcgcgggagagggaggtagtactgggaatggaggaggagtcgaggcttagcggcgctttctcgctccatctctagggtttggttgctagtctgccccggctgggggcgtgcgcgccggcctggagctggactggaggtagcagccagcgtccggctccccgttgcaagcattaagctgcgcggctggagtgccccccccctttggccccgcctccgcgtctttcaactctggtgaaggtgctgctgttgtggcctgcgccatggaaccgtttccccagcttgcggctgcgtccacaggttgcgtgcacgcgtcgggctccggactgtgacgccgacgaggggatctcaggcgcccaactggtccggggtgaggcgcagcgcccgcaggatgccaaccgagcagaggcgctacatgcccccggcccattttcttccggcggagtcggaatcgtcctccttccctgacgagcttcgcttgcgtcctgagttggacttttgaagcagggttgctttcctgagcatgctggcagatttgcttgttctcccctgcaaaagctcaagtgtattggcgcaacagtagtggatcagctagatattatgcagccacacaagctaatggaccagaaagtgccatttagccttgatgacaagttgttggatgttaagctgccaccatcttcctggagagaggatcaggatccagcaaaccaactcgattcttttcccaagccattggtttcacctctagaaggtagaaggggaagtgtaaatgggacccaatatgaaagtggacttttctctagctcccttccagaattttttgacaagaaaataagattaactccaaagaacagagttgttggtcatctggttggaaaagttaaccatgctgatgatgaaccatttgagttgacaaaggaaatcgaggcccaaataattgggcaacctgctccctgatgacgacgacttattgtcaagtgtttgtggtgatattgggtataataccaatgcgaataatcaggatgagattgatgatgatattttttgtactggaggtggaatggaattggaagcagatggaaatagcaaattgttaaactttaatggtggagccagtcagactaggtcaattgtccaactcaatggtgagcgatcctcgagaatcctttttgtcggaaacattgatagcaacgtcgaggattctgaattgaaattcatgtttgagcaatatggagacatgcagacacttaatgcttcttgcaaacatcatggttttgtgatggtatcttactatgatataagatcggcagaaaatgctatgagggcccttcaaagcaagccactcagatgtaggaaacttgacatacgttactcgagtccaaaggactatcctttggataaagatatcaacctgtccatggtaatagttaatcttgaagcttcgataactaatgatgacctgcaccagatatttggtgtctttggtgaaatcaaggaggtatgatatcatgatatagcacataatcttacattatttagctcttatttcaggtgaaacattactaaataactttctttcagattcaccctacttcagataatgaccattacaaatcgatagaattttttgatgtcagagcagctgaagctgcacaatatgccttaaacaggagtgaaatttcaggaaataaaaacaaattggagcctagctgtctgggtggtactgaacgtttgatgcagcagatgtctcgtgcattggaacatgaacagtttggtgcatgtaaactcggaagcccaaacagtccttcaacatgctttggttctgtcaatatggcacccatcagatccactagcacagaaagtggaactgttcaggttttatgttctagagttcagacaccgataaaccaattccgagagggaaggaattttctggatcttccctcaactaccataagtagatcctctcctgttggaattacacctgcaggattacaaagcggccaccacgctcttgatgagcacatccattcacttggaaagatgaatgtacagaacaagggacgaatggattgtggatttcaagagagtactgctttccatcctcattctctccctgacttcaatgacagactaagaaatggcacatttacaaaggaggttgtgggcatctcagcaatcaatcttctgctcatactgaagcacttgggttttcaagaactggtagctgccctctctatggtcaccaactagcatggagtaattctaataacctacaccagcagccttcttctcccatgatatggcctagcatgggcccatttaccaataatatgccatctcgccagttgatgcaagtgcatggaatttcaagagcaccattgcgcatgcttgaaaataatatccctatgaatcaccaacatgtgggatctgccccagctgtcaatccatcaatttgggatagacgacatggatatgcaggggagatgatggaaacaccaggattccacccagggagtgctggaagcatgggtttccctggcagcacacatctgcatcagttggagaccaatggtatgtttcctcacaatggagggactttcatggacccagctatgtctcctgtgcacatgagtgctcgctctcctcagcagagggggcatattttccatcgaaggagcaatgtggctcctattccatcctctttcgattctgctggtgaacggatgcggagccgaagaaatgactcgaatgtaaatcaatctgacaacaaaaggctgtttgagcttgacattgagcgtatagtccggggcgaggactcccggactacactgatgataaagaatatcccaaacaagtacacatcaaagatgcttctggcagctattgatgaaagtcaccggggaacttatgattttatctacctgccaattgactttaagaataagtgcaatgttggttatgcattcatcaacatgatcaatcctgacaatattgttccattttataagacatttcatgggaaaaggtgggagaaattcaacagtgagaaagtggcctcacttgcttatgctagaatccaaggaaaatcagctctagttgctcatttccagaactcaagtttgatgaatgaggataaacgctgccgccctatactcttccactctgatggtccgaatgcaggagatcaagaaccattccctgtgggatcaaatgtccgttccaggcctggaaggtccaggattttgagttgggaacaaaaccaccaggacattgtgtctgatcataccaaaggtggaactccgagcagggctggtggcactccaggttacatcgccacggatactgatcatacggctgttgattgacgaacttgcgacaacacccgacattctgacaattgcaatccagttttttttttttttgaaattgcatcctctcctacctcttttttccttttgttatgttgtatctatatctacttccgcgtgatattttggcaccggaggctctagacggctgcagatttggtcgctgacaagtagcgaggagatggatgttgtgccgtcagtttctccttactttggcacagacccctcagcgggattttgttggacagtttgaccccctttcaccaggaaagatatccatatttgggggagtttccctattgctgtttggcagtgctgtcatgaacattttcctaatgctgtggatgtgaaatttcagaatgatcaaatcgaatgacggatgaatgagagccaataatatttttttacgctc

SEQ ID NO: 14331 - DNA, 3387 bp, Zea Mays
attctgtacactgtttttttaattaatcggtaaaagcgagcgcttctggcccggaattctgaaccccgaagctgtagatttctgccaagtgttccatggccccggttttgttcgggacccaaatttccgcgcacttcgtcaaggtccggggtgaggcgcagcgcccgcaggatgccaaccgagcagaggcgctacatgcccccggcccattttcttccggcggagtcggaatcgtcctccttccctgacgagcttcgcttgcgtcctgagaggcaagttggacttttgaagcagggttgctttcctgagcatgctggcagatttgcttgttctcccctgcaaaagctcaagtgtattggcgcaacagtagtggatcagctagatattatgcagccacacaagctaatggaccagaaagtgccatttagccttgatgacaagttgttggatgttaagctgccaccatcttcctggagagaggatcaggatccagcaaaccaactcgattcttttcccaagccattggtttcacctctagaaggtagaaggggaagtgtaaatgggacccaatatgaaagtggacttttctctagctcccttccagaattttttgacaagaaaataagattaactccaaagaacagagttgttggtcatctggttggaaaagttaaccatgctgatgatgaaccatttgagttgacaaaggaaatcgaggcccaaataattgggcaacctgctccctgatgacgacgacttattgtcaagtgtttgtggtgatattgggtataataccaatgcgaataatcaggatgagattgatgatgatattttttgtactggaggtggaatggaattggaagcagatggaaatagcaaattgttaaactttaatggtggagccagtcagactaggtcaattgtccaactcaatggtgagcgatcctcgagaatcctttttgtcggaaacattgatagcaacgtcgaggattctgaattgaaattcatgtttgagcaatatggagacatgcagacacttaatgcttcttgcaaacatcatggttttgtgatggtatcttactatgatataagatcggcagaaaatgctatgagggcccttcaaagcaagccactcagatgtaggaaacttgacatacgttactcgagtccaaaggactatcctttggataaagatatcaacctgtccatggtaatagttaatcttgaagcttcgataactaatgatgacctgcaccagatatttggtgtctttggtgaaatcaaggaggaaataaaaacaaattggagcctagctgtctgggtggtactgaacgtttgatgcagcagatgtctcgtgcattggaacatgaacagtttggtgcatgtaaactcggaagcccaaacagtccttcaacatgctttggttctgtcaatatggcacccatcagatccactagcacagaaagtggaactgttcaggttttatgttctagagttcagacaccgataaaccaattccgagagggaaggaattttctggatcttccctcaactaccataagtagatcctctcctgttggaattacacctgcaggattacaaagcggccaccacgctcttgatgagcacatccattcacttggaaagatgaatgtacagaacaagggacgaatggattgtggatttcaagagagtactgctttccatcctcattctctccctgacttcaatgacagactaagaaatggcacatttacaaaggaggttgtgggcatctcagcaatcaatcttctgctcatactgaagcacttgggttttcaagaactggtagctgccctctctatggtcaccaactagcatggagtaattctaataacctacaccagcagccttcttctcccatgatatggcctagcatgggcccatttaccaataatatgccatctcgccagttgatgcaagtgcatggaatttcaagagcaccattgcgcatgcttgaaaataatatccctatgaatcaccaacatgtgggatctgccccagctgtcaatccatcaatttgggatagacgacatggatatgcaggggagatgatggaaacaccaggattccacccagggagtgctggaagcatgggtttccctggcagcacacatctgcatcagttggagaccaatggtatgtttcctcacaatggagggactttcatggacccagctatgtctcctgtgcacatgagtgctcgctctcctcagcagagggggcatattttccatcgaaggagcaatgtggctcctattccatcctctttcgattctgctggtgaacggatgcggagccgaagaaatgactcgaatgtaaatcaatctgacaacaaaaggctgtttgagcttgacattgagcgtatagtccggggcgaggactcccggactacactgatgataaagaatatcccaaacaagtacacatcaaagatgcttctggcagctattgatgaaagtcaccggggaacttatgattttatctacctgccaattgactttaagaataagtgcaatgttggttatgcattcatcaacatgatcaatcctgacaatattgttccattttataagacatttcatgggaaaaggtgggagaaattcaacagtgagaaagtggcctcacttgcttatgctagaatccaaggaaaatcagctctagttgctcatttccagaactcaagtttgatgaatgaggataaacgctgccgccctatactcttccactctgatggtccgaatgcaggagatcaagaaccattccctgtgggatcaaatgtccgttccaggcctggaaggtccaggattttgagttgggaacaaaaccaccaggacattgtgtctgatcataccaaaggtggaactccgagcagggctggtggcactccaggttacatcgccacggatactgatcatacggctgttgattgacgaacttgcgacaacacccgacattctgacaattgcaatccagttttttttttttttgaaattgcatcctctcctacctcttttttccttttgttatgttgtatctatatctacttccgcgtgatattttggcaccggaggctctagacggctgcagatttggtcgctgacaagtagcgaggagatggatgttgtgccgtcagtttctccttactttggcacagacccctcagcgggattttgttggacagtttgaccccctttcaccaggaaagatatccatatttgggggagtttccctattgctgtttggcagtgctgtcatgaacattttcctaatgctgtggatgtgaaatttcagaatgatcaaatcgaatgacggatgaatgagagccaataatatttttttacgctc

SEQ ID NO: 14332 - DNA, 3361 bp, Zea Mays
gaaccccgaagctgtagatttctgccaagtgttccatggccccggttttgttcgggacccaaatttccgcgcacttcgtcaaggtccggggtgaggcgcagcgcccgcaggatgccaaccgagcagaggcgctacatgcccccggcccattttcttccggcggagtcggaatcgtcctccttccctgacgagcttcgcttgcgtcctgagaggcaagttggacttttgaagcagggttgctttcctgagcatgctggcagatttgcttgttctcccctgcaaaagctcaagtgtattggcgcaacagtagtggatcagctagatattatgcagccacacaagctaatggaccagaaagtgccatttagccttgatgacaagttgttggatgttaagctgccaccatcttcctggagagaggatcaggatccagcaaaccaactcgattcttttcccaagccattggtttcacctctagaaggtagaaggggaagtgtaaatgggacccaatatgaaagtggacttttctctagctcccttccagaattttttgacaagaaaataagattaactccaaagaacagagttgttggtcatctggttggaaaagttaaccatgctgatgatgaaccatttgagttgacaaaggaaatcgaggcccaaataattgggcaacctgctccctgatgacgacgacttattgtcaagtgtttgtggtgatattgggtataataccaatgcgaataatcaggatgagattgatgatgatattttttgtactggaggtggaatggaattggaagcagatggaaatagcaaattgttaaactttaatggtggagccagtcagactaggtcaattgtccaactcaatggtgagcgatcctcgagaatcctttttgtcggaaacattgatagcaacgtcgaggattctgaattgaaattcatgtttgagcaatatggagacatgcagacacttaatgcttcttgcaaacatcatggttttgtgatggtatcttactatgatataagatcggcagaaaatgctatgagggcccttcaaagcaagccactcagatgtaggaaacttgacatacgttactcgagtccaaaggactatcctttggataaagatatcaacctgtccatggtaatagttaatcttgaagcttcgataactaatgatgacctgcaccagatatttggtgtctttggtgaaatcaaggagattcaccctacttcagataatgaccattacaaatcgatagaattttttgatgtcagagcagctgaagctgcacaatatgccttaaacaggagtgaaatttcaggaaataaaaacaaattggagcctagctgtctgggtggtactgaacgtttgatgcagcagatgtctcgtgcattggaacatgaacagtttggtgcatgtaaactcggaagcccaaacagtccttcaacatgctttggttctgtcaatatggcacccatcagatccactagcacagaaagtggaactgttcaggttttatgttctagagttcagacaccgataaaccaattccgagagggaaggaattttctggatcttccctcaactaccataagtagatcctctcctgttggaattacacctgcaggattacaaagcggccaccacgctcttgatgagcacatccattcacttggaaagatgaatgtacagaacaagggacgaatggattgtggatttcaagagagtactgctttccatcctcattctctccctgacttcaatgacagactaagaaatggcacatttacaaaggaggttgtgggcatctcagcaatcaatcttctgctcatactgaagcacttgggttttcaagaactggtagctgccctctctatggtcaccaactagcatggagtaattctaataacctacaccagcagccttcttctcccatgatatggcctagcatgggcccatttaccaataatatgccatctcgccagttgatgcaagtgcatggaatttcaagagcaccattgcgcatgcttgaaaataatatccctatgaatcaccaacatgtgggatctgccccagctgtcaatccatcaatttgggatagacgacatggatatgcaggggagatgatggaaacaccaggattccacccagggagtgctggaagcatgggtttccctggcagcacacatctgcatcagttggagaccaatggtatgtttcctcacaatggagggactttcatggacccagctatgtctcctgtgcacatgagtgctcgctctcctcagcagagggggcatattttccatcgaaggagcaatgtggctcctattccatcctctttcgattctgctggtgaacggatgcggagccgaagaaatgactcgaatgtaaatcaatctgacaacaaaaggctgtttgagcttgacattgagcgtatagtccggggcgaggactcccggactacactgatgataaagaatatcccaaacaagtacacatcaaagatgcttctggcagctattgatgaaagtcaccggggaacttatgattttatctacctgccaattgactttaagacatttcatgggaaaaggtgggagaaattcaacagtgagaaagtggcctcacttgcttatgctagaatccaaggaaaatcagctctagttgctcatttccagaactcaagtttgatgaatgaggataaacgctgccgccctatactcttccactctgatggtccgaatgcaggagatcaagaaccattccctgtgggatcaaatgtccgttccaggcctggaaggtccaggattttgagttgggaacaaaaccaccaggacattgtgtctgatcataccaaaggtggaactccgagcagggctggtggcactccaggttacatcgccacggatactgatcatacggctgttgattgacgaacttgcgacaacacccgacattctgacaattgcaatccagttttttttttttttgaaattgcatcctctcctacctcttttttccttttgttatgttgtatctatatctacttccgcgtgatattttggcaccggaggctctagacggctgcagatttggtcgctgacaagtagcgaggagatggatgttgtgccgtcagtttctccttactttggcacagacccctcagcgggattttgttggacagtttgaccccctttcaccaggaaagatatccatatttgggggagtttccctattgctgtttggcagtgctgtcatgaacattttcctaatgctgtggatgtgaaatttcagaatgatcaaatcgaatgacggatgaatgagagccaataatatttttttacgctc

SEQ ID NO: 14333 - DNA, 3408 bp, Zea Mays
tgccaagtgttccatggccccggttttgttcgggacccaaatttccgcgcacttcgtcaaggtccggggtgaggcgcagcgcccgcaggatgccaaccgagcagaggcgctacatgcccccggcccattttcttccggcggagtcggaatcgtcctccttccctgacgagcttcgcttgcgtcctgagaggcaagttggacttttgaagcagggttgctttcctgagcatgctggcagatttgcttgttctcccctgcaaaagctcaagtgtattggcgcaacagtagtggatcagctagatattatgcagccacacaagctaatggaccagaaagtgccatttagccttgatgacaagttgttggatgttaagctgccaccatcttcctggagagaggatcaggatccagcaaaccaactcgattcttttcccaagccattggtttcacctctagaaggtagaaggggaagtgtaaatgggacccaatatgaaagtggacttttctctagctcccttccagaattttttgacaagaaaataagattaactccaaagaacagagttgttggtcatctggttggaaaagttaaccatgctgatgatgaaccatttgagttgacaaaggaaatcgaggcccaaataattgggcaacctgctccctgatgacgacgacttattgtcaagtgtttgtggtgatattgggtataataccaatgcgaataatcaggatgagattgatgatgatattttttgtactggaggtggaatggaattggaagcagatggaaatagcaaattgttaaactttaatggtggagccagtcagactaggtcaattgtccaactcaatggtgagcgatcctcgagaatcctttttgtcggaaacattgatagcaacgtcgaggattctgaattgaaattcatgtttgagcaatatggagacatgcagacacttaatgcttcttgcaaacatcatggttttgtgatggtatcttactatgatataagatcggcagaaaatgctatgagggcccttcaaagcaagccactcagatgtaggaaacttgacatacgttactcgagtccaaaggactatcctttggataaagatatcaacctgtccatggtaatagttaatcttgaagcttcgataactaatgatgacctgcaccagatatttggtgtctttggtgaaatcaaggagattcaccctacttcagataatgaccattacaaatcgatagaattttttgatgtcagagcagctgaagctgcacaatatgccttaaacaggagtgaaatttcaggaaataaaaacaaattggagcctagctgtctgggtggtactgaacgtttgatgcagcagatgtctcgtgcattggaacatgaacagtttggtgcatgtaaactcggaagcccaaacagtccttcaacatgctttggttctgtcaatatggcacccatcagatccactagcacagaaagtggaactgttcaggttttatgttctagagttcagacaccgataaaccaattccgagagggaaggaattttctggatcttccctcaactaccataagtagatcctctcctgttggaattacacctgcaggattacaaagcggccaccacgctcttgatgagcacatccattcacttggaaagatgaatgtacagaacaagggacgaatggattgtggatttcaagagagtactgctttccatcctcattctctccctgacttcaatgacagactaagaaatggcacatttacaaaggaggttgtgggcatctcagcaatcaatcttctgctcatactgaagcacttgggttttcaagaactggtagctgccctctctatggtcaccaactagcatggagtaattctaataacctacaccagcagccttcttctcccatgatatggcctagcatgggcccatttaccaataatatgccatctcgccagttgatgcaagtgcatggaatttcaagagcaccattgcgcatgcttgaaaataatatccctatgaatcaccaacatgtgggatctgccccagctgtcaatccatcaatttgggatagacgacatggatatgcaggggagatgatggaaacaccaggattccacccagggagtgctggaagcatgggtttccctggcagcacacatctgcatcagttggagaccaatggtatgtttcctcacaatggagggactttcatggacccagctatgtctcctgtgcacatgagtgctcgctctcctcagcagagggggcatattttccatcgaaggagcaatgtggctcctattccatcctctttcgattctgctggtgaacggatgcggagccgaagaaatgactcgaatgtaaatcaatctgacaacaaaaggctgtttgagcttgacattgagcgtatagtccggggcgaggactcccggactacactgatgataaagaatatcccaaacaagtacacatcaaagatgcttctggcagctattgatgaaagtcaccggggaacttatgattttatctacctgccaattgactttaagaataagtgcaatgttggttatgcattcatcaacatgatcaatcctgacaatattgttccattttataagacatttcatgggaaaaggtgggagaaattcaacagtgagaaagtggcctcacttgcttatgctagaatccaaggaaaatcagctctagttgctcatttccagaactcaagtttgatgaatgaggataaacgctgccgccctatactcttccactctgatggtccgaatgcaggagatcaagaaccattccctgtgggatcaaatgtccgttccaggcctggaaggtccaggattttgagttgggaacaaaaccaccaggacattgtgtctgatcataccaaaggtggaactccgagcagggctggtggcactccaggttacatcgccacggatactgatcatacggctgttgattgacgaacttgcgacaacacccgacattctgacaattgcaatccagttttttttttttttgaaattgcatcctctcctacctcttttttccttttgttatgttgtatctatatctacttccgcgtgatattttggcaccggaggctctagacggctgcagatttggtcgctgacaagtagcgaggagatggatgttgtgccgtcagtttctccttactttggcacagacccctcagcgggattttgttggacagtttgaccccctttcaccaggaaagatatccatatttgggggagtttccctattgctgtttggcagtgctgtcatgaacattttcctaatgctgtggatgtgaaatttcagaatgatcaaatcgaatgacggatgaatgagagccaataatatttttttacgctc

SEQ ID NO: 14334 - DNA, 3214 bp, Zea Mays
cgggacccaaatttccgcgcacttcgtcaaggtccggggtgaggcgcagcgcccgcaggatgccaaccgagcagaggcgctacatgcccccggcccattttcttccggcggagtcggaatcgtcctccttccctgacgagcttcgcttgcgtcctgagaggcaagttggacttttgaagcagggttgctttcctgagcatgctggcagatttgcttgttctcccctgcaaaagctcaagtgtattggcgcaacagtagtggatcagctagatattatgcagccacacaagctaatggaccagaaagtgccatttagccttgatgacaagttgttggatgttaagctgccaccatcttcctggagagaggatcaggatccagcaaaccaactcgattcttttcccaagccattggtttcacctctagaaggtagaaggggaagtgtaaatgggacccaatatgaaagtggacttttctctagctcccttccagaattttttgacaagaaaataagattaactccaaagaacagagttgttggtcatctggttggaaaagttaaccatgctgatgatgaaccatttgagttgacaaaggaaatcgaggcccaaataattgggcaacctgctccctgatgacgacgacttattgtcaagtgtttgtggtgatattgggtataataccaatgcgaataatcaggatgagattgatgatgatattttttgtactggaggtggaatggaattggaagcagatggaaatagcaaattgttaaactttaatggtggagccagtcagactaggtcaattgtccaactcaatggtgagcgatcctcgagaatcctttttgtcggaaacattgatagcaacgtcgaggattctgaattgaaattcatgtttgagcaatatggagacatgcagacacttaatgcttcttgcaaacatcatggttttgtgatggtatcttactatgatataagatcggcagaaaatgctatgagggcccttcaaagcaagccactcagatgtaggaaacttgacatacgttactcgagtccaaaggactatcctttggataaagatatcaacctgtccatggtaatagttaatcttgaagcttcgataactaatgatgacctgcaccagatatttggtgtctttggtgaaatcaaggagattcaccctacttcagataatgaccattacaaatcgatagaattttttgatgtcagagcagctgaagctgcacaatatgccttaaacaggagtgaaatttcaggaaataaaaacaaattggagcctagctgtctgggtggtactgaacgtttgatgcagcagatgtctcgtgcattggaacatgaacagtttggtgcatgtaaactcggaagcccaaacagtccttcaacatgctttggattacaaagcggccaccacgctcttgatgagcacatccattcacttggaaagatgaatgtacagaacaagggacgaatggattgtggatttcaagagagtactgctttccatcctcattctctccctgacttcaatgacagactaagaaatggtatctcctataactgctcaatacctcccatcggtgttaagagcaatgctagagctgctgaagcaatggatgtcaggcacatttacaaaggaggttgtgggcatctcagcaatcaatcttctgctcatactgaagcacttgggttttcaagaactggtagctgccctctctatggtcaccaactagcatggagtaattctaataacctacaccagcagccttcttctcccatgatatggcctagcatgggcccatttaccaataatatgccatctcgccagttgatgcaagtgcatggaatttcaagagcaccattgcgcatgcttgaaaataatatccctatgaatcaccaacatgtgggatctgccccagctgtcaatccatcaatttgggatagacgacatggatatgcaggggagatgatggaaacaccaggattccacccagggagtgctggaagcatgggtttccctggcagcacacatctgcatcagttggagaccaatggtatgtttcctcacaatggagggactttcatggacccagctatgtctcctgtgcacatgagtgctcgctctcctcagcagagggggcatattttccatcgaaggagcaatgtggctcctattccatcctctttcgattctgctggtgaacggatgcggagccgaagaaatgactcgaatgtaaatcaatctgacaacaaaaggctgtttgagcttgacattgagcgtatagtccggggcgaggactcccggactacactgatgataaagaatatcccaaacaagtacacatcaaagatgcttctggcagctattgatgaaagtcaccggggaacttatgattttatctacctgccaattgactttaagacatttcatgggaaaaggtgggagaaattcaacagtgagaaagtggcctcacttgcttatgctagaatccaaggaaaatcagctctagttgctcatttccagaactcaagtttgatgaatgaggataaacgctgccgccctatactcttccactctgatggtccgaatgcaggagatcaagaaccattccctgtgggatcaaatgtccgttccaggcctggaaggtccaggattttgagttgggaacaaaaccaccaggacattgtgtctgatcataccaaaggtggaactccgagcagggctggtggcactccaggttacatcgccacggatactgatcatacggctgttgattgacgaacttgcgacaacacccgacattctgacaattgcaatccagttttttttttttttgaaattgcatcctctcctacctcttttttccttttgttatgttgtatctatatctacttccgcgtgatattttggcaccggaggctctagacggctgcagatttggtcgctgacaagtagcgaggagatggatgttgtgccgtcagtttctccttactttggcacagacccctcagcgggattttgttggacagtttgaccccctttcaccaggaaagatatccatatttgggggagtttccctattgctgtttggcagtgctgtcatgaacattttcctaatgctgtggatgtgaaatttcagaatgatcaaatcgaatgacggatgaatgagagccaataatatttttttacgctc

SEQ ID NO: 14335 - DNA, 3294 bp, Zea Mays
tttgaatccgttcttcaacttagaggtttcctccgcaaagatctattcccactagttgaaacctgaaatcatagaggcaagttggacttttgaagcagggttgctttcctgagcatgctggcagatttgcttgttctcccctgcaaaagctcaagtgtattggcgcaacagtagtggatcagctagatattatgcagccacacaagctaatggaccagaaagtgccatttagccttgatgacaagttgttggatgttaagctgccaccatcttcctggagagaggatcaggatccagcaaaccaactcgattcttttcccaagccattggtttcacctctagaaggtagaaggggaagtgtaaatgggacccaatatgaaagtggacttttctctagctcccttccagaattttttgacaagaaaataagattaactccaaagaacagagttgttggtcatctggttggaaaagttaaccatgctgatgatgaaccatttgagttgacaaaggaaatcgaggcccaaataattgggcaacctgctccctgatgacgacgacttattgtcaagtgtttgtggtgatattgggtataataccaatgcgaataatcaggatgagattgatgatgatattttttgtactggaggtggaatggaattggaagcagatggaaatagcaaattgttaaactttaatggtggagccagtcagactaggtcaattgtccaactcaatggtgagcgatcctcgagaatcctttttgtcggaaacattgatagcaacgtcgaggattctgaattgaaattcatgtttgagcaatatggagacatgcagacacttaatgcttcttgcaaacatcatggttttgtgatggtatcttactatgatataagatcggcagaaaatgctatgagggcccttcaaagcaagccactcagatgtaggaaacttgacatacgttactcgagtccaaaggactatcctttggataaagatatcaacctgtccatggtaatagttaatcttgaagcttcgataactaatgatgacctgcaccagatatttggtgtctttggtgaaatcaaggagattcaccctacttcagataatgaccattacaaatcgatagaattttttgatgtcagagcagctgaagctgcacaatatgccttaaacaggagtgaaatttcaggaaataaaaacaaattggagcctagctgtctgggtggtactgaacgtttgatgcagcagatgtctcgtgcattggaacatgaacagtttggtgcatgtaaactcggaagcccaaacagtccttcaacatgctttggttctgtcaatatggcacccatcagatccactagcacagaaagtggaactgttcaggttttatgttctagagttcagacaccgataaaccaattccgagagggaaggaattttctggatcttccctcaactaccataagtagatcctctcctgttggaattacacctgcaggattacaaagcggccaccacgctcttgatgagcacatccattcacttggaaagatgaatgtacagaacaagggacgaatggattgtggatttcaagagagtactgctttccatcctcattctctccctgacttcaatgacagactaagaaatggcacatttacaaaggaggttgtgggcatctcagcaatcaatcttctgctcatactgaagcacttgggttttcaagaactggtagctgccctctctatggtcaccaactagcatggagtaattctaataacctacaccagcagccttcttctcccatgatatggcctagcatgggcccatttaccaataatatgccatctcgccagttgatgcaagtgcatggaatttcaagagcaccattgcgcatgcttgaaaataatatccctatgaatcaccaacatgtgggatctgccccagctgtcaatccatcaatttgggatagacgacatggatatgcaggggagatgatggaaacaccaggattccacccagggagtgctggaagcatgggtttccctggcagcacacatctgcatcagttggagaccaatggtatgtttcctcacaatggagggactttcatggacccagctatgtctcctgtgcacatgagtgctcgctctcctcagcagagggggcatattttccatcgaaggagcaatgtggctcctattccatcctctttcgattctgctggtgaacggatgcggagccgaagaaatgactcgaatgtaaatcaatctgacaacaaaaggctgtttgagcttgacattgagcgtatagtccggggcgaggactcccggactacactgatgataaagaatatcccaaacaagtacacatcaaagatgcttctggcagctattgatgaaagtcaccggggaacttatgattttatctacctgccaattgactttaagaataagtgcaatgttggttatgcattcatcaacatgatcaatcctgacaatattgttccattttataagacatttcatgggaaaaggtgggagaaattcaacagtgagaaagtggcctcacttgcttatgctagaatccaaggaaaatcagctctagttgctcatttccagaactcaagtttgatgaatgaggataaacgctgccgccctatactcttccactctgatggtccgaatgcaggagatcaagaaccattccctgtgggatcaaatgtccgttccaggcctggaaggtccaggattttgagttgggaacaaaaccaccaggacattgtgtctgatcataccaaaggtggaactccgagcagggctggtggcactccaggttacatcgccacggatactgatcatacggctgttgattgacgaacttgcgacaacacccgacattctgacaattgcaatccagttttttttttttttgaaattgcatcctctcctacctcttttttccttttgttatgttgtatctatatctacttccgcgtgatattttggcaccggaggctctagacggctgcagatttggtcgctgacaagtagcgaggagatggatgttgtgccgtcagtttctccttactttggcacagacccctcagcgggattttgttggacagtttgaccccctttcaccaggaaagatatccatatttgggggagtttccctattgctgtttggcagtgctgtcatgaacattttcctaatgctgtggatgtgaaatttcagaatgatcaaatcgaatgacggatgaatgagagccaataatatttttttacgctc

SEQ ID NO: 14336 - DNA, 3291 bp, Zea Mays
caacttagaggtttcctccgcaaagatctattcccactagttgaaacctgaaatcatagaggcaagttggacttttgaagcagggttgctttcctgagcatgctggcagatttgcttgttctcccctgcaaaagctcaagtgtattggcgcaacagtagtggatcagctagatattatgcagccacacaagctaatggaccagaaagtgccatttagccttgatgacaagttgttggatgttaagctgccaccatcttcctggagagaggatcaggatccagcaaaccaactcgattcttttcccaagccattggtttcacctctagaaggtagaaggggaagtgtaaatgggacccaatatgaaagtggacttttctctagctcccttccagaattttttgacaagaaaataagattaactccaaagaacagagttgttggtcatctggttggaaaagttaaccatgctgatgatgaaccatttgagttgacaaaggaaatcgaggcccaaataattgggcaacctgctccctgatgacgacgacttattgtcaagtgtttgtggtgatattgggtataataccaatgcgaataatcaggatgagattgatgatgatattttttgtactggaggtggaatggaattggaagcagatggaaatagcaaattgttaaactttaatggtggagccagtcagactaggtcaattgtccaactcaatggtgagcgatcctcgagaatcctttttgtcggaaacattgatagcaacgtcgaggattctgaattgaaattcatgtttgagcaatatggagacatgcagacacttaatgcttcttgcaaacatcatggttttgtgatggtatcttactatgatataagatcggcagaaaatgctatgagggcccttcaaagcaagccactcagatgtaggaaacttgacatacgttactcgagtccaaaggactatcctttggataaagatatcaacctgtccatggtaatagttaatcttgaagcttcgataactaatgatgacctgcaccagatatttggtgtctttggtgaaatcaaggagctgaagctgcacaatatgccttaaacaggagtgaaatttcaggaaataaaaacaaattggagcctagctgtctgggtggtactgaacgtttgatgcagcagatgtctcgtgcattggaacatgaacagtttggtgcatgtaaactcggaagcccaaacagtccttcaacatgctttggtatgcatttttatttctaatattgaaatgtcttttctctgttctattttctgactgtaaggcataatgcaaggttctgtcaatatggcacccatcagatccactagcacagaaagtggaactgttcaggttttatgttctagagttcagacaccgataaaccaattccgagagggaaggaattttctggatcttccctcaactaccataagtagatcctctcctgttggaattacacctgcaggattacaaagcggccaccacgctcttgatgagcacatccattcacttggaaagatgaatgtacagaacaagggacgaatggattgtggatttcaagagagtactgctttccatcctcattctctccctgacttcaatgacagactaagaaatggcacatttacaaaggaggttgtgggcatctcagcaatcaatcttctgctcatactgaagcacttgggttttcaagaactggtagctgccctctctatggtcaccaactagcatggagtaattctaataacctacaccagcagccttcttctcccatgatatggcctagcatgggcccatttaccaataatatgccatctcgccagttgatgcaagtgcatggaatttcaagagcaccattgcgcatgcttgaaaataatatccctatgaatcaccaacatgtgggatctgccccagctgtcaatccatcaatttgggatagacgacatggatatgcaggggagatgatggaaacaccaggattccacccagggagtgctggaagcatgggtttccctggcagcacacatctgcatcagttggagaccaatggtatgtttcctcacaatggagggactttcatggacccagctatgtctcctgtgcacatgagtgctcgctctcctcagcagagggggcatattttccatcgaaggagcaatgtggctcctattccatcctctttcgattctgctggtgaacggatgcggagccgaagaaatgactcgaatgtaaatcaatctgacaacaaaaggctgtttgagcttgacattgagcgtatagtccggggcgaggactcccggactacactgatgataaagaatatcccaaacaagtacacatcaaagatgcttctggcagctattgatgaaagtcaccggggaacttatgattttatctacctgccaattgactttaagaataagtgcaatgttggttatgcattcatcaacatgatcaatcctgacaatattgttccattttataagacatttcatgggaaaaggtgggagaaattcaacagtgagaaagtggcctcacttgcttatgctagaatccaaggaaaatcagctctagttgctcatttccagaactcaagtttgatgaatgaggataaacgctgccgccctatactcttccactctgatggtccgaatgcaggagatcaagaaccattccctgtgggatcaaatgtccgttccaggcctggaaggtccaggattttgagttgggaacaaaaccaccaggacattgtgtctgatcataccaaaggtggaactccgagcagggctggtggcactccaggttacatcgccacggatactgatcatacggctgttgattgacgaacttgcgacaacacccgacattctgacaattgcaatccagttttttttttttttgaaattgcatcctctcctacctcttttttccttttgttatgttgtatctatatctacttccgcgtgatattttggcaccggaggctctagacggctgcagatttggtcgctgacaagtagcgaggagatggatgttgtgccgtcagtttctccttactttggcacagacccctcagcgggattttgttggacagtttgaccccctttcaccaggaaagatatccatatttgggggagtttccctattgctgtttggcagtgctgtcatgaacattttcctaatgctgtggatgtgaaatttcagaatgatcaaatcgaatgacggatgaatgagagccaataatatttttttacgctc

SEQ ID NO: 14337 - DNA, 3122 bp, Zea Mays
cttagaggtttcctccgcaaagatctattcccactagttgaaacctgaaatcatagaggcaagttggacttttgaagcagggttgctttcctgagcatgctggcagatttgcttgttctcccctgcaaaagctcaagtgtattggcgcaacagtagtggatcagctagatattatgcagccacacaagctaatggaccagaaagtgccatttagccttgatgacaagttgttggatgttaagctgccaccatcttcctggagagaggatcaggatccagcaaaccaactcgattcttttcccaagccattggtttcacctctagaaggtagaaggggaagtgtaaatgggacccaatatgaaagtggacttttctctagctcccttccagaattttttgacaagaaaataagattaactccaaagaacagagttgttggtcatctggttggaaaagttaaccatgctgatgatgaaccatttgagttgacaaaggaaatcgaggcccaaataattgggcaacctgctccctgatgacgacgacttattgtcaagtgtttgtggtgatattgggtataataccaatgcgaataatcaggatgagattgatgatgatattttttgtactggaggtggaatggaattggaagcagatggaaatagcaaattgttaaactttaatggtggagccagtcagactaggtcaattgtccaactcaatggtgagcgatcctcgagaatcctttttgtcggaaacattgatagcaacgtcgaggattctgaattgaaattcatgtttgagcaatatggagacatgcagacacttaatgcttcttgcaaacatcatggttttgtgatggtatcttactatgatataagatcggcagaaaatgctatgagggcccttcaaagcaagccactcagatgtaggaaacttgacatacgttactcgagtccaaaggactatcctttggataaagatatcaacctgtccatggtaatagttaatcttgaagcttcgataactaatgatgacctgcaccagatatttggtgtctttggtgaaatcaaggaggtatgatatcatgatatagcacataatcttacattatttagctcttatttcaggtgaaacattactaaataactttctttcagattcaccctacttcagataatgaccattacaaatcgatagaattttttgatgtcagagcagctgaagctgcacaatatgccttaaacaggagtgaaatttcaggaaataaaaacaaattggagcctagctgtctgggtggtactgaacgtttgatgcagcagatgtctcgtgcattggaacatgaacagtttggtgcatgtaaactcggaagcccaaacagtccttcaacatgctttgactaagaaatggtatctcctataactgctcaatacctcccatcggtgttaagagcaatgctagagctgctgaagcaatggatgtcaggcacatttacaaaggaggttgtgggcatctcagcaatcaatcttctgctcatactgaagcacttgggttttcaagaactggtagctgccctctctatggtcaccaactagcatggagtaattctaataacctacaccagcagccttcttctcccatgatatggcctagcatgggcccatttaccaataatatgccatctcgccagttgatgcaagtgcatggaatttcaagagcaccattgcgcatgcttgaaaataatatccctatgaatcaccaacatgtgggatctgccccagctgtcaatccatcaatttgggatagacgacatggatatgcaggggagatgatggaaacaccaggattccacccagggagtgctggaagcatgggtttccctggcagcacacatctgcatcagttggagaccaatggtatgtttcctcacaatggagggactttcatggacccagctatgtctcctgtgcacatgagtgctcgctctcctcagcagagggggcatattttccatcgaaggagcaatgtggctcctattccatcctctttcgattctgctggtgaacggatgcggagccgaagaaatgactcgaatgtaaatcaatctgacaacaaaaggctgtttgagcttgacattgagcgtatagtccggggcgaggactcccggactacactgatgataaagaatatcccaaacaagtacacatcaaagatgcttctggcagctattgatgaaagtcaccggggaacttatgattttatctacctgccaattgactttaagaataagtgcaatgttggttatgcattcatcaacatgatcaatcctgacaatattgttccattttataagacatttcatgggaaaaggtgggagaaattcaacagtgagaaagtggcctcacttgcttatgctagaatccaaggaaaatcagctctagttgctcatttccagaactcaagtttgatgaatgaggataaacgctgccgccctatactcttccactctgatggtccgaatgcaggagatcaagaaccattccctgtgggatcaaatgtccgttccaggcctggaaggtccaggattttgagttgggaacaaaaccaccaggacattgtgtctgatcataccaaaggtggaactccgagcagggctggtggcactccaggttacatcgccacggatactgatcatacggctgttgattgacgaacttgcgacaacacccgacattctgacaattgcaatccagttttttttttttttgaaattgcatcctctcctacctcttttttccttttgttatgttgtatctatatctacttccgcgtgatattttggcaccggaggctctagacggctgcagatttggtcgctgacaagtagcgaggagatggatgttgtgccgtcagtttctccttactttggcacagacccctcagcgggattttgttggacagtttgaccccctttcaccaggaaagatatccatatttgggggagtttccctattgctgtttggcagtgctgtcatgaacattttcctaatgctgtggatgtgaaatttcagaatgatcaaatcgaatgacggatgaatgagagccaataatatttttttacgctc

SEQ ID NO: 14338 - DNA, 3251 bp, Zea Mays
cttagaggtttcctccgcaaagatctattcccactagttgaaacctgaaatcatagaggcaagttggacttttgaagcagggttgctttcctgagcatgctggcagatttgcttgttctcccctgcaaaagctcaagtgtattggcgcaacagtagtggatcagctagatattatgcagccacacaagctaatggaccagaaagtgccatttagccttgatgacaagttgttggatgttaagctgccaccatcttcctggagagaggatcaggatccagcaaaccaactcgattcttttcccaagccattggtttcacctctagaaggtagaaggggaagtgtaaatgggacccaatatgaaagtggacttttctctagctcccttccagaattttttgacaagaaaataagattaactccaaagaacagagttgttggtcatctggttggaaaagttaaccatgctgatgatgaaccatttgagttgacaaaggaaatcgaggcccaaataattgggcaacctgctccctgatgacgacgacttattgtcaagtgtttgtggtgatattgggtataataccaatgcgaataatcaggatgagattgatgatgatattttttgtactggaggtggaatggaattggaagcagatggaaatagcaaattgttaaactttaatggtggagccagtcagactaggtcaattgtccaactcaatggtgagcgatcctcgagaatcctttttgtcggaaacattgatagcaacgtcgaggattctgaattgaaattcatgtttgagcaatatggagacatgcagacacttaatgcttcttgcaaacatcatggttttgtgatggtatcttactatgatataagatcggcagaaaatgctatgagggcccttcaaagcaagccactcagatgtaggaaacttgacatacgttactcgagtccaaaggactatcctttggataaagatatcaacctgtccatggtaatagttaatcttgaagcttcgataactaatgatgacctgcaccagatatttggtgtctttggtgaaatcaaggagattcaccctacttcagataatgaccattacaaatcgatagaattttttgatgtcagagcagctgaagctgcacaatatgccttaaacaggagtgaaatttcaggaaataaaaacaaattggagcctagctgtctgggtggtactgaacgtttgatgcagcagatgtctcgtgcattggaacatgaacagtttggtgcatgtaaactcggaagcccaaacagtccttcaacatgctttgatccactagcacagaaagtggaactgttcaggttttatgttctagagttcagacaccgataaaccaattccgagagggaaggaattttctggatcttccctcaactaccataagtagatcctctcctgttggaattacacctgcaggattacaaagcggccaccacgctcttgatgagcacatccattcacttggaaagatgaatgtacagaacaagggacgaatggattgtggatttcaagagagtactgctttccatcctcattctctccctgacttcaatgacagactaagaaatggcacatttacaaaggaggttgtgggcatctcagcaatcaatcttctgctcatactgaagcacttgggttttcaagaactggtagctgccctctctatggtcaccaactagcatggagtaattctaataacctacaccagcagccttcttctcccatgatatggcctagcatgggcccatttaccaataatatgccatctcgccagttgatgcaagtgcatggaatttcaagagcaccattgcgcatgcttgaaaataatatccctatgaatcaccaacatgtgggatctgccccagctgtcaatccatcaatttgggatagacgacatggatatgcaggggagatgatggaaacaccaggattccacccagggagtgctggaagcatgggtttccctggcagcacacatctgcatcagttggagaccaatggtatgtttcctcacaatggagggactttcatggacccagctatgtctcctgtgcacatgagtgctcgctctcctcagcagagggggcatattttccatcgaaggagcaatgtggctcctattccatcctctttcgattctgctggtgaacggatgcggagccgaagaaatgactcgaatgtaaatcaatctgacaacaaaaggctgtttgagcttgacattgagcgtatagtccggggcgaggactcccggactacactgatgataaagaatatcccaaacaagtacacatcaaagatgcttctggcagctattgatgaaagtcaccggggaacttatgattttatctacctgccaattgactttaagaataagtgcaatgttggttatgcattcatcaacatgatcaatcctgacaatattgttccattttataagacatttcatgggaaaaggtgggagaaattcaacagtgagaaagtggcctcacttgcttatgctagaatccaaggaaaatcagctctagttgctcatttccagaactcaagtttgatgaatgaggataaacgctgccgccctatactcttccactctgatggtccgaatgcaggagatcaagaaccattccctgtgggatcaaatgtccgttccaggcctggaaggtccaggattttgagttgggaacaaaaccaccaggacattgtgtctgatcataccaaaggtggaactccgagcagggctggtggcactccaggttacatcgccacggatactgatcatacggctgttgattgacgaacttgcgacaacacccgacattctgacaattgcaatccagttttttttttttttgaaattgcatcctctcctacctcttttttccttttgttatgttgtatctatatctacttccgcgtgatattttggcaccggaggctctagacggctgcagatttggtcgctgacaagtagcgaggagatggatgttgtgccgtcagtttctccttactttggcacagacccctcagcgggattttgttggacagtttgaccccctttcaccaggaaagatatccatatttgggggagtttccctattgctgtttggcagtgctgtcatgaacattttcctaatgctgtggatgtgaaatttcagaatgatcaaatcgaatgacggatgaatgagagccaataatatttttttacgctc

SEQ ID NO: 14339 - DNA, 3122 bp, Zea Mays
gaagcatctggatgttcacatgagaatgatgcagatttgcttgttctcccctgcaaaagctcaagtgtattggcgcaacagtagtggatcagctagatattatgcagccacacaagctaatggaccagaaagtgccatttagccttgatgacaagttgttggatgttaagctgccaccatcttcctggagagaggatcaggatccagcaaaccaactcgattcttttcccaagccattggtttcacctctagaaggtagaaggggaagtgtaaatgggacccaatatgaaagtggacttttctctagctcccttccagaattttttgacaagaaaataagattaactccaaagaacagagttgttggtcatctggttggaaaagttaaccatgctgatgatgaaccatttgagttgacaaaggaaatcgaggcccaaataattgggcaacctgctccctgatgacgacgacttattgtcaagtgtttgtggtgatattgggtataataccaatgcgaataatcaggatgagattgatgatgatattttttgtactggaggtggaatggaattggaagcagatggaaatagcaaattgttaaactttaatggtggagccagtcagactaggtcaattgtccaactcaatggtgagcgatcctcgagaatcctttttgtcggaaacattgatagcaacgtcgaggattctgaattgaaattcatgtttgagcaatatggagacatgcagacacttaatgcttcttgcaaacatcatggttttgtgatggtatcttactatgatataagatcggcagaaaatgctatgagggcccttcaaagcaagccactcagatgtaggaaacttgacatacgttactcgagtccaaaggactatcctttggataaagatatcaacctgtccatggtaatagttaatcttgaagcttcgataactaatgatgacctgcaccagatatttggtgtctttggtgaaatcaaggaggagtgaaatttcaggaaataaaaacaaattggagcctagctgtctgggtggtactgaacgtttgatgcagcagatgtctcgtgcattggaacatgaacagtttggtgcatgtaaactcggaagcccaaacagtccttcaacatgctttggttctgtcaatatggcacccatcagatccactagcacagaaagtggaactgttcaggttttatgttctagagttcagacaccgataaaccaattccgagagggaaggaattttctggatcttccctcaactaccataagtagatcctctcctgttggaattacacctgcaggattacaaagcggccaccacgctcttgatgagcacatccattcacttggaaagatgaatgtacagaacaagggacgaatggattgtggatttcaagagagtactgctttccatcctcattctctccctgacttcaatgacagactaagaaatggtatctcctataactgctcaatacctcccatcggtgttaagagcaatgctagagctgctgaagcaatggatgtcaggcacatttacaaaggaggttgtgggcatctcagcaatcaatcttctgctcatactgaagcacttgggttttcaagaactggtagctgccctctctatggtcaccaactagcatggagtaattctaataacctacaccagcagccttcttctcccatgatatggcctagcatgggcccatttaccaataatatgccatctcgccagttgatgcaagtgcatggaatttcaagagcaccattgcgcatgcttgaaaataatatccctatgaatcaccaacatgtgggatctgccccagctgtcaatccatcaatttgggatagacgacatggatatgcaggggagatgatggaaacaccaggattccacccagggagtgctggaagcatgggtttccctggcagcacacatctgcatcagttggagaccaatggtatgtttcctcacaatggagggactttcatggacccagctatgtctcctgtgcacatgagtgctcgctctcctcagcagagggggcatattttccatcgaaggagcaatgtggctcctattccatcctctttcgattctgctggtgaacggatgcggagccgaagaaatgactcgaatgtaaatcaatctgacaacaaaaggctgtttgagcttgacattgagcgtatagtccggggcgaggactcccggactacactgatgataaagaatatcccaaacaagtacacatcaaagatgcttctggcagctattgatgaaagtcaccggggaacttatgattttatctacctgccaattgactttaagacatttcatgggaaaaggtgggagaaattcaacagtgagaaagtggcctcacttgcttatgctagaatccaaggaaaatcagctctagttgctcatttccagaactcaagtttgatgaatgaggataaacgctgccgccctatactcttccactctgatggtccgaatgcaggagatcaagaaccattccctgtgggatcaaatgtccgttccaggcctggaaggtccaggattttgagttgggaacaaaaccaccaggacattgtgtctgatcataccaaaggtggaactccgagcagggctggtggcactccaggttacatcgccacggatactgatcatacggctgttgattgacgaacttgcgacaacacccgacattctgacaattgcaatccagttttttttttttttgaaattgcatcctctcctacctcttttttccttttgttatgttgtatctatatctacttccgcgtgatattttggcaccggaggctctagacggctgcagatttggtcgctgacaagtagcgaggagatggatgttgtgccgtcagtttctccttactttggcacagacccctcagcgggattttgttggacagtttgaccccctttcaccaggaaagatatccatatttgggggagtttccctattgctgtttggcagtgctgtcatgaacattttcctaatgctgtggatgtgaaatttcagaatgatcaaatcgaatgacggatgaatgagagccaataatatttttttacgctc

SEQ ID NO: 14340 - DNA, 2142 bp, Zea Mays
atggagcgcgtgaagtattgtgattgtactgtgtgcagtgtgcagcggtcattgtgttctacccgccggaggaggaggaggaggaggcagatcgaccggcagctgactaaggtggatccacggaggaggcatggcaagaggcccctacccgccgccgaggtggaagaggaggaggaggaggaggcgctgcccccgggcccgccgcccgcaaagcacgagcagctggaggagcctcaccacgccgccgtctcgcagctgcaaggagccacctttagcggcggcggagggtcgtcgtcgtcttccgtgatcggtggcccgtcgccgccgcaggcgtacgcgcagtactactactcggcgcgcgccgacaacgacgcctccgccgtggcctccgcgcttgcccacgtcatccgggcctcgcctgaccagcttccgccgcagcaggcgccggccttgtacggcgccggcgtcccgggcagccttcggctgggagaccacccgcaagcgtctgcgcaccactatcccggtcccggcggccacgtcgccgccgccgaggaggagcaaggtacgcgcacctagcctagccatccggccgtctcatcgatcggtgcaggcaaggtagcattactccttgtcgtcgattgcgatagcatggcacgcgcacggccttccgccttccgctcgattgcccgatttggaagcttcggtccgtccaaatcagtgacacgtccatcatcgatttcgatccagcctgtaaattaccggcagctcaacgtactttactctttcctagctactaaaccgtgggttaatgaactctcgagaaagcacacgaactgggatcaattatcttgccaaagaatattttatgcgagccaagcgacgttagctgtgacgtagcgtactctgacgacgatttgataaaaacctgtgtccagaacaagcagtagttaattgagcatggccatgtgttttgcgattgcggattatagtaaactataagcatgcccacagcaggtcggaggcggcactaccggggggtgaggcagcggccgtggggcaagtgggcggcagagatccgggaccccaagaaggcggcgcgggtgtggctcggcaccttcgacacggcggaggacgccgccatcgcctacgacgaggcggcgctgcggttcaagggcaccaaggccaagctcaacttcccggagcgcgtgcagggccgaaccgacctcggcttcctcgtcacccgcggcatcccggaccaccggcacccgtcggcggcggtgaccctggcagcaatgccgccgccgcaccaccagcacggccaccagaccgtcgtgccgtaccccgacctcatgcagtacgcgcagctgctgcagggcggccggggcggcggcggccacgccgaggcggcggtccagcaggcgcaccgtcagcagcagcagcagcagctcatgacgatgatgggcggtcggccgggagtcaacctgccctccacgttctcgccgtcgtcgtccgcatcggcgccgcagatactggacttctccacgcagcagctcatccggcccggcccgccgtcgccgtcgccgccgcgggccgcggcaatgccgtcctcgtcggccgctgcggcgccgtccacgccgtcgtccacgaccacagcgtcgtcgcccagcggcggtgcatggccgtacggcggggagcgccacaggaataaaaaagacgcgtgatcgagagctggcgcctggccggacggggatcagatcaagtagctgtgtggaggaatatgcatgcaatatgggcgcgggcggggtaagtggcagcgacggtttttggtgcagacatgggcatttctcggcctttttaatttccacgcacgtcggtttctttttactacttcttttttttttgtcacgagatgatcgttcttttgttcatttcttggaggatcttcttttcatcacttgattagagagagatagctagctagatgctaggagattgctaccttcttccttgtctgatggtctgatctgctgctcatcatagctttaatttgttcaagtgtcaactgattaattacctgtgcaaactaatccaaattaagcaaggagagaggaatcttatatatgcagggcatgctctctcttc

SEQ ID NO: 14341 - DNA, 414 bp, Zea Mays
ctcctccaccatgggttgttgtcgtaactgaatcgcgcgtatcccaggggattcgacgtctcttctcccaatccaattcgtcccccttcatagtatatatatgcgacctcaatccttcccctcatgccatcgaagtttagtcacctcacgggtcgccaccaccatcgccgatgagagggagggaacgagagatctctgccgcatgcggatacttcgattcactatcgccgagctgtcggagcctggccgaggaggttcaccggtgggcaacgaaagcttttgtggcacgattgggcgtgaaggacgatcgtggcaagtggaattcctcatcgacgactgggaatcgccatcgtccacagccaaccatggatgggagtccatgttgcaaggatactgagaacgatccggttgaag

SEQ ID NO: 14342 - DNA, 2403 bp, Zea Mays
caaaatccagtcttagaatcgataaaatgaaaaaagttgggaaagaaacccagaaccctttccccccaacctagccggcacccaccaatggcgaggccgccgcctgcggcgcccgccccggtgaggcttcgtctgcttttcgaaaacagtcgcctcctccagcgtgtacagagggatgaaggccttcggcgctgctggcttctccttagcccggagctcgacaccgtcgccgaccttgccgctcatgtcgcagcccgtttccgcctccgccgcacctgcccgcgcggcgttgtgctctcgatggacgggtttaccttgccaccattcgagtcaacctgcatcttcagggataacgatattataagggttaaacaaaaatcctgcaggaagcaggatcaaagggatggccgtaaacaccaagaagaagaggcacatgatgatcaccagcttgaagaaaatgtcactgctagccatagcatagaaaacaatggtacaagctctaagaggaagtggaacgatggggttgcagaaatacctgagagctcaaagggaaaaaggccgaaggtgaaaaattctggaaaacatatagattgcagcaaggaagaacagcgtggatctaaaaagttgaagttgtcagttattgatattgaagataagaaagcaactctaaatcatgaaactaccactaccttggtggatcagcaaaaagcagaggggaacaataaaaccgaattgaaatgtgaggcaaatgtggcagactacaatgctcaaagtgatacaaaaaagttggagagtagaagtgctcgtcgcaagaaaaattaaaaggctgatgagacagagaggaaaattacaaacagataagaatgtgcatgaagattcactaatagctcctgattttccatcatcaagcaatcaagatggcttgcctgtcccatcaagcaatcaaaatggatcacatgttcatttttcaagcatcaaagcagatgaggaagaatctgatacatcggatgagattgtcccagttgtggttcggcctggtcacattcgctttgaaccagcaggtggagaacccgacaaatcgccagcacaggagttacagggcacgttccaatggagtgcaacaatgagcaaaaagaagggccagaagtggggaatgaatagctcaaacaagaaaaatgctgatatcggctatcatgcaggaatagctggatgcagcacagaagttaacaatcatgtcatggacattaaggttactgaaaatggcttttgtgctgtcaataatcgaaggaacaatgaaggcagtaacattgagatgtccagtgtgcaaaatattgctaatgaagaaaagtctagcgaacctttcaattttgagagcttgtaccccctaacacgacttccaaaggagggagatctgattgcctaccgattggttgagctgtcttccatgttgtgtccggagctctcttcgtaccgtgtgggaaaagttctggtatatgatcccgtatcattgcgtatcattctcgtacccgttcaagagtatccaatcaccaccgaggaaaaagaaaacaaggacgagtcagatatgcttgtggatttgtcaccgtacaaggaagatggctccttggagatcgagtactcttcacttgttgatgtaaggctactgaagggtatcgaaacatgcaacgaagttggatcagcaccggccggaaggccagttaccttgcacaaaaacgaaggcaatattgagagccagaaatcacccttggtgtcaaacaacactaaaggcgaagaacgcgcactaggaaagtcagaaagtacggtctgggaaaaaaatggtgagcccagtgataaggttgatcttctgcaaaatggctgggcaacatggaaacaaaatgctagtacgtcagcttggtcttacagagccctcaggagcagcgcccttggcccgacgatggcaattctacgagggaagaacagccagagtaaaccacccaatcgaaagaactccaagtgatgcctaagtatttaataacttcagtgatacctatgtaatccaaagttgatccgatcctttggagaaggtcaagcaagtcgatgtagttggtcttatatatgtaactgcaattactgccctgcctattttgaaaattccaaagtggtgactgatgcaaagggaactttttagaccagtcaagactcgttactatgcaatgtcagcttatttaatgttgatgaaaattcactaaaattgatctttattgtacatcactcagatcttcagctttggaattgcttgatttattacaggagggtcaatagaacgttatcatttgcttgaaccattgggcttggatttgcatgtcacttgatcggacttgagttgaacttcaacttaaatttaag

SEQ ID NO: 14343 - DNA, 2349 bp, Zea Mays
aatcgataaaatgaaaaaagttgggaaagaaacccagaaccctttccccccaacctagccggcacccaccaatggcgaggccgccgcctgcggcgcccgccccggtgaggcttcgtctgcttttcgaaaacagtcgcctcctccagcgtgtacagagggatgaaggccttcggcgctgctggcttctccttagcccggagctcgacaccgtcgccgaccttgccgctcatgtcgcagcccgtttccgcctccgccgcacctgcccgcgcggcgttgtgctctcgatggacgggtttaccttgccaccattcgagtcaacctgcatcttcagggataacgatattataagggttaaacaaaaatcctgcaggaagcaggatcaaagggatggccgtaaacaccaagaagaagaggcacatgatgatcaccagcttgaagaaaatgtcactgctagccatagcatagaaaacaatggtacaagctctaagaggaagtggaacgatggggttgcagaaatacctgagagctcaaagggaaaaaggccgaaggtgaaaaattctggaaaacatatagattgcagcaaggaagaacagcgtggatctaaaaagttgaagttgtcagttattgatattgaagataagaaagcaactctaaatcatgaaactaccactaccttggtggatcagcaaaaagcagaggggaacaataaaaccgaattgaaatgtgaggcaaatgtggcagactacaatgctcaaagtgatacaaaaaagttggagagtagaagtgctcgtcgcaagaaaaattaaaaggctgatgagacagagaggaaaattacaaacagataagaatgtgcatgaagattcactaatagctcctgattttccatcatcaagcaatcaagatggcttgcctgtcccatcaagcaatcaaaatggatcacatgttcatttttcaagcatcaaagcagatgaggaagaatctgatacatcggatgagattgtcccagttgtggttcggcctggtcacattcgctttgaaccagcagggcacgttccaatggagtgcaacaatgagcaaaaagaagggccagaagtggggaatgaatagctcaaacaagaaaaatgctgatatcggctatcatgcaggaatagctggatgcagcacagaagttaacaatcatgtcatggacattaaggttactgaaaatggcttttgtgctgtcaataatcgaaggaacaatgaaggcagtaacattgagatgtccagtgtgcaaaatattgctaatgaagaaaagtctagcgaacctttcaattttgagagcttgtaccccctaacacgacttccaaaggagggagatctgattgcctaccgattggttgagctgtcttccatgttgtgtccggagctctcttcgtaccgtgtgggaaaagttctggtatatgatcccgtatcattgcgtatcattctcgtacccgttcaagagtatccaatcaccaccgaggaaaaagaaaacaaggacgagtcagatatgcttgtggatttgtcaccgtacaaggaagatggctccttggagatcgagtactcttcacttgttgatgtaaggctactgaagggtatcgaaacatgcaacgaagttggatcagcaccggccggaaggccagttaccttgcacaaaaacgaaggcaatattgagagccagaaatcacccttggtgtcaaacaacactaaaggcgaagaacgcgcactaggaaagtcagaaagtacggtctgggaaaaaaatggtgagcccagtgataaggttgatcttctgcaaaatggctgggcaacatggaaacaaaatgctagtacgtcagcttggtcttacagagccctcaggagcagcgcccttggcccgacgatggcaattctacgagggaagaacagccagagtaaaccacccaatcgaaagaactccaagtgatgcctaagtatttaataacttcagtgatacctatgtaatccaaagttgatccgatcctttggagaaggtcaagcaagtcgatgtagttggtcttatatatgtaactgcaattactgccctgcctattttgaaaattccaaagtggtgactgatgcaaagggaactttttagaccagtcaagactcgttactatgcaatgtcagcttatttaatgttgatgaaaattcactaaaattgatctttattgtacatcactcagatcttcagctttggaattgcttgatttattacaggagggtcaatagaacgttatcatttgcttgaaccattgggcttggatttgcatgtcacttgatcggacttgagttgaacttcaacttaaatttaag

SEQ ID NO: 14344 - DNA, 2242 bp, Zea Mays
gataaaatgaaaaaagttgggaaagaaacccagaaccctttccccccaacctagccggcacccaccaatggcgaggccgccgcctgcggcgcccgccccggtgaggcttcgtctgcttttcgaaaacagtcgcctcctccagcgtgtacagagggatgaaggccttcggcgctgctggcttctccttagcccggagctcgacaccgtcgccgaccttgccgctcatgtcgcagcccgtttccgcctccgccgcacctgcccgcgcggcgttgtgctctcgatggacgggtttaccttgccaccattcgagtcaacctgcatcttcagggataacgatattataagggttaaacaaaaatcctgcaggaagcaggtagggcacatgatgatcaccagcttgaagaaaatgtcactgctagccatagcatagaaaacaatggtacaagctctaagaggaagtggaacgatggggttgcagaaatacctgagagctcaaagggaaaaaggccgaaggtgaaaaattctggaaaacatatagattgcagcaaggaagaacagcgtggatctaaaaagttgaagttgtcagttattgatattgaagataagaaagcaactctaaatcatgaaactaccactaccttggtggatcagcaaaaagcagaggggaacaataaaaccgaattgaaatgtgaggcaaatgtggcagactacaatgctcaaagtgatacaaaaaagttggagagtagaagtgctcgtcgcaagaaaaattaaaaggctgatgagacagagaggaaaattacaaacagataagaatgtgcatgaagattcactaatagctcctgattttccatcatcaagcaatcaagatggcttgcctgtcccatcaagcaatcaaaatggatcacatgttcatttttcaagcatcaaagcagatgaggaagaatctgatacatcggatgagattgtcccagttgtggttcggcctggtcacattcgctttgaaccagcagggcacgttccaatggagtgcaacaatgagcaaaaagaagggccagaagtggggaatgaatagctcaaacaagaaaaatgctgatatcggctatcatgcaggaatagctggatgcagcacagaagttaacaatcatgtcatggacattaaggttactgaaaatggcttttgtgctgtcaataatcgaaggaacaatgaaggcagtaacattgagatgtccagtgtgcaaaatattgctaatgaagaaaagtctagcgaacctttcaattttgagagcttgtaccccctaacacgacttccaaaggtgggaaaagttctggtatatgatcccgtatcattgcgtatcattctcgtacccgttcaagagtatccaatcaccaccgaggaaaaagaaaacaaggacgagtcagatatgcttgtggatttgtcaccgtacaaggaagatggctccttggagatcgagtactcttcacttgttgatgtaaggctactgaagggtatcgaaacatgcaacgaagttggatcagcaccggccggaaggccagttaccttgcacaaaaacgaaggcaatattgagagccagaaatcacccttggtgtcaaacaacactaaaggcgaagaacgcgcactaggaaagtcagaaagtacggtctgggaaaaaaatggtgagcccagtgataaggttgatcttctgcaaaatggctgggcaacatggaaacaaaatgctagtacgtcagcttggtcttacagagccctcaggagcagcgcccttggcccgacgatggcaattctacgagggaagaacagccagagtaaaccacccaatcgaaagaactccaagtgatgcctaagtatttaataacttcagtgatacctatgtaatccaaagttgatccgatcctttggagaaggtcaagcaagtcgatgtagttggtcttatatatgtaactgcaattactgccctgcctattttgaaaattccaaagtggtgactgatgcaaagggaactttttagaccagtcaagactcgttactatgcaatgtcagcttatttaatgttgatgaaaattcactaaaattgatctttattgtacatcactcagatcttcagctttggaattgcttgatttattacaggagggtcaatagaacgttatcatttgcttgaaccattgggcttggatttgcatgtcacttgatcggacttgagttgaacttcaacttaaatttaag

SEQ ID NO: 14345 - DNA, 2276 bp, Zea Mays
gataaaatgaaaaaagttgggaaagaaacccagaaccctttccccccaacctagccggcacccaccaatggcgaggccgccgcctgcggcgcccgccccggtgaggcttcgtctgcttttcgaaaacagtcgcctcctccagcgtgtacagagggatgaaggccttcggcgctgctggcttctccttagcccggagctcgacaccgtcgccgaccttgccgctcatgtcgcagcccgtttccgcctccgccgcacctgcccgcgcggcgttgtgctctcgatggacgggtttaccttgccaccattcgagtcaacctgcatcttcagggataacgatattataagggttaaacaaaaatcctgcaggaagcaggtagggcacatgatgatcaccagcttgaagaaaatgtcactgctagccatagcatagaaaacaatggtacaagctctaagaggaagtggaacgatggggttgcagaaatacctgagagctcaaagggaaaaaggccgaaggtgaaaaattctggaaaacatatagattgcagcaaggaagaacagcgtggatctaaaaagttgaagttgtcagttattgatattgaagataagaaagcaactctaaatcatgaaactaccactaccttggtggatcagcaaaaagcagaggggaacaataaaaccgaattgaaatgtgaggcaaatgtggcagactacaatgctcaaagtgatacaaaaaagaatgtgcatgaagattcactaatagctcctgattttccatcatcaagcaatcaagatggcttgcctgtcccatcaagcaatcaaaatggatcacatgttcatttttcaagcatcaaagcagatgaggaagaatctgatacatcggatgagattgtcccagttgtggttcggcctggtcacattcgctttgaaccagcaggtggagaacccgacaaatcgccagcacaggagttacagggcacgttccaatggagtgcaacaatgagcaaaaagaagggccagaagtggggaatgaatagctcaaacaagaaaaatgctgatatcggctatcatgcaggaatagctggatgcagcacagaagttaacaatcatgtcatggacattaaggttactgaaaatggcttttgtgctgtcaataatcgaaggaacaatgaaggcagtaacattgagatgtccagtgtgcaaaatattgctaatgaagaaaagtctagcgaacctttcaattttgagagcttgtaccccctaacacgacttccaaaggagggagatctgattgcctaccgattggttgagctgtcttccatgttgtgtccggagctctcttcgtaccgtgtgggaaaagttctggtatatgatcccgtatcattgcgtatcattctcgtacccgttcaagagtatccaatcaccaccgaggaaaaagaaaacaaggacgagtcagatatgcttgtggatttgtcaccgtacaaggaagatggctccttggagatcgagtactcttcacttgttgatgtaaggctactgaagggtatcgaaacatgcaacgaagttggatcagcaccggccggaaggccagttaccttgcacaaaaacgaaggcaatattgagagccagaaatcacccttggtgtcaaacaacactaaaggcgaagaacgcgcactaggaaagtcagaaagtacggtctgggaaaaaaatggtgagcccagtgataaggttgatcttctgcaaaatggctgggcaacatggaaacaaaatgctagtacgtcagcttggtcttacagagccctcaggagcagcgcccttggcccgacgatggcaattctacgagggaagaacagccagagtaaaccacccaatcgaaagaactccaagtgatgcctaagtatttaataacttcagtgatacctatgtaatccaaagttgatccgatcctttggagaaggtcaagcaagtcgatgtagttggtcttatatatgtaactgcaattactgccctgcctattttgaaaattccaaagtggtgactgatgcaaagggaactttttagaccagtcaagactcgttactatgcaatgtcagcttatttaatgttgatgaaaattcactaaaattgatctttattgtacatcactcagatcttcagctttggaattgcttgatttattacaggagggtcaatagaacgttatcatttgcttgaaccattgggcttggatttgcatgtcacttgatcggacttgagttgaacttcaacttaaatttaag

SEQ ID NO: 14346 - DNA, 2140 bp, Zea Mays
caaaatcgatggtttcgtaccacaatgtttgatggttatggacgggtttaccttgccaccattcgagtcaacctgcatcttcagggataacgatattataagggttaaacaaaaatcctgcaggaagcaggatcaaagggatggccgtaaacaccaagaagaagaggcacatgatgatcaccagcttgaagaaaatgtcactgctagccatagcatagaaaacaatggtacaagctctaagaggaagtggaacgatggggttgcagaaatacctgagagctcaaagggaaaaaggccgaaggtgaaaaattctggaaaacatatagattgcagcaaggaagaacagcgtggatctaaaaagttgaagttgtcagttattgatattgaagataagaaagcaactctaaatcatgaaactaccactaccttggtggatcagcaaaaagcagaggggaacaataaaaccgaattgaaatgtgaggcaaatgtggcagactacaatgctcaaagtgatacaaaaaagttggagagtagaagtgctcgtcgcaagaaaaattaaaaggctgatgagacagagaggaaaattacaaacagataagaatgtgcatgaagattcactaatagctcctgattttccatcatcaagcaatcaagatggcttgcctgtcccatcaagcaatcaaaatggatcacatgttcatttttcaagcatcaaagcagatgaggaagaatctgatacatcggatgagattgtcccagttgtggttcggcctggtcacattcgctttgaaccagcaggtggagaacccgacaaatcgccagcacaggagttacagggcacgttccaatggagtgcaacaatgagcaaaaagaagggccagaagtggggaatgaatagctcaaacaagaaaaatgctgatatcggctatcatgcaggaatagctggatgcagcacagaagttaacaatcatgtcatggacattaaggttactgaaaatggcttttgtgctgtcaataatcgaaggaacaatgaaggcagtaacattgagatgtccagtgtgcaaaatattgctaatgaagaaaagtctagcgaacctttcaattttgagagcttgtaccccctaacacgacttccaaaggagggagatctgattgcctaccgattggttgagctgtcttccatgttgtgtccggagctctcttcgtaccgtgtgggaaaagttctggtatatgatcccgtatcattgcgtatcattctcgtacccgttcaagagtatccaatcaccaccgaggaaaaagaaaacaaggacgagtcagatatgcttgtggatttgtcaccgtacaaggaagatggctccttggagatcgagtactcttcacttgttgatgtaaggctactgaagggtatcgaaacatgcaacgaagttggatcagcaccggccggaaggccagttaccttgcacaaaaacgaaggcaatattgagagccagaaatcacccttggtgtcaaacaacactaaaggcgaagaacgcgcactaggaaagtcagaaagtacggtctgggaaaaaaatggtgagcccagtgataaggttgatcttctgcaaaatggctgggcaacatggaaacaaaatgctagtacgtcagcttggtcttacagagccctcaggagcagcgcccttggcccgacgatggcaattctacgagggaagaacagccagagtaaaccacccaatcgaaagaactccaagtgatgcctaagtatttaataacttcagtgatacctatgtaatccaaagttgatccgatcctttggagaaggtcaagcaagtcgatgtagttggtcttatatatgtaactgcaattactgccctgcctattttgaaaattccaaagtggtgactgatgcaaagggaactttttagaccagtcaagactcgttactatgcaatgtcagcttatttaatgttgatgaaaattcactaaaattgatctttattgtacatcactcagatcttcagctttggaattgcttgatttattacaggagggtcaatagaacgttatcatttgcttgaaccattgggcttggatttgcatgtcacttgatcggacttgagttgaacttcaacttaaatttaag

SEQ ID NO: 14347 - DNA, 1714 bp, Zea Mays
ctcccaccatcctttgcatctagcaaggaacaataaaaccgaattgaaatgtgaggcaaatgtggcagactacaatgctcaaagtgatacaaaaaagttggagagtagaagtgctcgtcgcaagaaaaattaaaaggctgatgagacagagaggaaaattacaaacagataagaatgtgcatgaagattcactaatagctcctgattttccatcatcaagcaatcaagatggcttgcctgtcccatcaagcaatcaaaatggatcacatgttcatttttcaagcatcaaagcagatgaggaagaatctgatacatcggatgagattgtcccagttgtggttcggcctggtcacattcgctttgaaccagcaggtggagaacccgacaaatcgccagcacaggagttacagggcacgttccaatggagtgcaacaatgagcaaaaagaagggccagaagtggggaatgaatagctcaaacaagaaaaatgctgatatcggctatcatgcaggaatagctggatgcagcacagaagttaacaatcatgtcatggacattaaggttactgaaaatggcttttgtgctgtcaataatcgaaggaacaatgaaggcagtaacattgagatgtccagtgtgcaaaatattgctaatgaagaaaagtctagcgaacctttcaattttgagagcttgtaccccctaacacgacttccaaaggagggagatctgattgcctaccgattggttgagctgtcttccatgttgtgtccggagctctcttcgtaccgtgtgggaaaagttctggtatatgatcccgtatcattgcgtatcattctcgtacccgttcaagagtatccaatcaccaccgaggaaaaagaaaacaaggacgagtcagatatgcttgtggatttgtcaccgtacaaggaagatggctccttggagatcgagtactcttcacttgttgatgtaaggctactgaagggtatcgaaacatgcaacgaagttggatcagcaccggccggaaggccagttaccttgcacaaaaacgaaggcaatattgagagccagaaatcacccttggtgtcaaacaacactaaaggcgaagaacgcgcactaggaaagtcagaaagtacggtctgggaaaaaaatggtgagcccagtgataaggttgatcttctgcaaaatggctgggcaacatggaaacaaaatgctagtacgtcagcttggtcttacagagccctcaggagcagcgcccttggcccgacgatggcaattctacgagggaagaacagccagagtaaaccacccaatcgaaagaactccaagtgatgcctaagtatttaataacttcagtgatacctatgtaatccaaagttgatccgatcctttggagaaggtcaagcaagtcgatgtagttggtcttatatatgtaactgcaattactgccctgcctattttgaaaattccaaagtggtgactgatgcaaagggaactttttagaccagtcaagactcgttactatgcaatgtcagcttatttaatgttgatgaaaattcactaaaattgatctttattgtacatcactcagatcttcagctttggaattgcttgatttattacaggagggtcaatagaacgttatcatttgcttgaaccattgggcttggatttgcatgtcacttgatcggacttgagttgaacttcaacttaaatttaag

SEQ ID NO: 14348 - DNA, 1411 bp, Zea Mays
ctcccaccatcctttgcatctagcaaggaacaataaaaccgaattgaaatgtgaggcaaatgtggcagactacaatgctcaaagtgatacaaaaaagttggagagtagaagtgctcgtcgcaagaaaaattaaaaggctgatgagacagagaggaaaattacaaacagataagaatgtgcatgaagattcactaatagctcctgattttccatcatcaagcaatcaagatggcttgcctgtcccatcaagcaatcaaaatggatcacatgttcatttttcaagcatcaaagcagatgaggaagaatctgatacatcggatgagattgtcccagttgtggttcggcctggtcacattcgctttgaaccagcaggtggagaacccgacaaatcgccagcacaggagttacaggagggagatctgattgcctaccgattggttgagctgtcttccatgttgtgtccggagctctcttcgtaccgtgtgggaaaagttctggtatatgatcccgtatcattgcgtatcattctcgtacccgttcaagagtatccaatcaccaccgaggaaaaagaaaacaaggacgagtcagatatgcttgtggatttgtcaccgtacaaggaagatggctccttggagatcgagtactcttcacttgttgatgtaaggctactgaagggtatcgaaacatgcaacgaagttggatcagcaccggccggaaggccagttaccttgcacaaaaacgaaggcaatattgagagccagaaatcacccttggtgtcaaacaacactaaaggcgaagaacgcgcactaggaaagtcagaaagtacggtctgggaaaaaaatggtgagcccagtgataaggttgatcttctgcaaaatggctgggcaacatggaaacaaaatgctagtacgtcagcttggtcttacagagccctcaggagcagcgcccttggcccgacgatggcaattctacgagggaagaacagccagagtaaaccacccaatcgaaagaactccaagtgatgcctaagtatttaataacttcagtgatacctatgtaatccaaagttgatccgatcctttggagaaggtcaagcaagtcgatgtagttggtcttatatatgtaactgcaattactgccctgcctattttgaaaattccaaagtggtgactgatgcaaagggaactttttagaccagtcaagactcgttactatgcaatgtcagcttatttaatgttgatgaaaattcactaaaattgatctttattgtacatcactcagatcttcagctttggaattgcttgatttattacaggagggtcaatagaacgttatcatttgcttgaaccattgggcttggatttgcatgtcacttgatcggacttgagttgaacttcaacttaaatttaag

SEQ ID NO: 14349 - DNA, 1665 bp, Zea Mays
ctttgcatctagcaaggaacaataaaaccgaattgaaatgtgaggcaaatgtggcagactacaatgctcaaagtgatacaaaaaagttggagagtagaagtgctcgtcgcaagaaaaattaaaaggctgatgagacagagaggaaaattacaaacagataagaatgtgcatgaagattcactaatagctcctgattttccatcatcaagcaatcaagatggcttgcctgtcccatcaagcaatcaaaatggatcacatgttcatttttcaagcatcaaagcagatgaggaagaatctgatacatcggatgagattgtcccagttgtggttcggcctggtcacattcgctttgaaccagcagggcacgttccaatggagtgcaacaatgagcaaaaagaagggccagaagtggggaatgaatagctcaaacaagaaaaatgctgatatcggctatcatgcaggaatagctggatgcagcacagaagttaacaatcatgtcatggacattaaggttactgaaaatggcttttgtgctgtcaataatcgaaggaacaatgaaggcagtaacattgagatgtccagtgtgcaaaatattgctaatgaagaaaagtctagcgaacctttcaattttgagagcttgtaccccctaacacgacttccaaaggagggagatctgattgcctaccgattggttgagctgtcttccatgttgtgtccggagctctcttcgtaccgtgtgggaaaagttctggtatatgatcccgtatcattgcgtatcattctcgtacccgttcaagagtatccaatcaccaccgaggaaaaagaaaacaaggacgagtcagatatgcttgtggatttgtcaccgtacaaggaagatggctccttggagatcgagtactcttcacttgttgatgtaaggctactgaagggtatcgaaacatgcaacgaagttggatcagcaccggccggaaggccagttaccttgcacaaaaacgaaggcaatattgagagccagaaatcacccttggtgtcaaacaacactaaaggcgaagaacgcgcactaggaaagtcagaaagtacggtctgggaaaaaaatggtgagcccagtgataaggttgatcttctgcaaaatggctgggcaacatggaaacaaaatgctagtacgtcagcttggtcttacagagccctcaggagcagcgcccttggcccgacgatggcaattctacgagggaagaacagccagagtaaaccacccaatcgaaagaactccaagtgatgcctaagtatttaataacttcagtgatacctatgtaatccaaagttgatccgatcctttggagaaggtcaagcaagtcgatgtagttggtcttatatatgtaactgcaattactgccctgcctattttgaaaattccaaagtggtgactgatgcaaagggaactttttagaccagtcaagactcgttactatgcaatgtcagcttatttaatgttgatgaaaattcactaaaattgatctttattgtacatcactcagatcttcagctttggaattgcttgatttattacaggagggtcaatagaacgttatcatttgcttgaaccattgggcttggatttgcatgtcacttgatcggacttgagttgaacttcaacttaaatttaag

SEQ ID NO: 14350 - DNA, 1358 bp, Zea Mays
agaagttgagctcaatggtaggcgcacatgcatgtgtggtcgacaatgggcttgggcacgttccaatggagtgcaacaatgagcaaaaagaagggccagaagtggggaatgaatagctcaaacaagaaaaatgctgatatcggctatcatgcaggaatagctggatgcagcacagaagttaacaatcatgtcatggacattaaggttactgaaaatggcttttgtgctgtcaataatcgaaggaacaatgaaggcagtaacattgagatgtccagtgtgcaaaatattgctaatgaagaaaagtctagcgaacctttcaattttgagagcttgtaccccctaacacgacttccaaaggagggagatctgattgcctaccgattggttgagctgtcttccatgttgtgtccggagctctcttcgtaccgtgtgggaaaagttctggtatatgatcccgtatcattgcgtatcattctcgtacccgttcaagagtatccaatcaccaccgaggaaaaagaaaacaaggacgagtcagatatgcttgtggatttgtcaccgtacaaggaagatggctccttggagatcgagtactcttcacttgttgatgtaaggctactgaagggtatcgaaacatgcaacgaagttggatcagcaccggccggaaggccagttaccttgcacaaaaacgaaggcaatattgagagccagaaatcacccttggtgtcaaacaacactaaaggcgaagaacgcgcactaggaaagtcagaaagtacggtctgggaaaaaaatggtgagcccagtgataaggttgatcttctgcaaaatggctgggcaacatggaaacaaaatgctagtacgtcagcttggtcttacagagccctcaggagcagcgcccttggcccgacgatggcaattctacgagggaagaacagccagagtaaaccacccaatcgaaagaactccaagtgatgcctaagtatttaataacttcagtgatacctatgtaatccaaagttgatccgatcctttggagaaggtcaagcaagtcgatgtagttggtcttatatatgtaactgcaattactgccctgcctattttgaaaattccaaagtggtgactgatgcaaagggaactttttagaccagtcaagactcgttactatgcaatgtcagcttatttaatgttgatgaaaattcactaaaattgatctttattgtacatcactcagatcttcagctttggaattgcttgatttattacaggagggtcaatagaacgttatcatttgcttgaaccattgggcttggatttgcatgtcacttgatcggacttgagttgaacttcaacttaaatttaag

SEQ ID NO: 14351 - DNA, 1382 bp, Zea Mays
cacgtaagtacttggctatgaccttgtcgtcatcgactggatcattggggacctcaattggtggacaatcctacagagggcacgttccaatggagtgcaacaatgagcaaaaagaagggccagaagtggggaatgaatagctcaaacaagaaaaatgctgatatcggctatcatgcaggaatagctggatgcagcacagaagttaacaatcatgtcatggacattaaggttactgaaaatggcttttgtgctgtcaataatcgaaggaacaatgaaggcagtaacattgagatgtccagtgtgcaaaatattgctaatgaagaaaagtctagcgaacctttcaattttgagagcttgtaccccctaacacgacttccaaaggagggagatctgattgcctaccgattggttgagctgtcttccatgttgtgtccggagctctcttcgtaccgtgtgggaaaagttctggtatatgatcccgtatcattgcgtatcattctcgtacccgttcaagagtatccaatcaccaccgaggaaaaagaaaacaaggacgagtcagatatgcttgtggatttgtcaccgtacaaggaagatggctccttggagatcgagtactcttcacttgttgatgtaaggctactgaagggtatcgaaacatgcaacgaagttggatcagcaccggccggaaggccagttaccttgcacaaaaacgaaggcaatattgagagccagaaatcacccttggtgtcaaacaacactaaaggcgaagaacgcgcactaggaaagtcagaaagtacggtctgggaaaaaaatggtgagcccagtgataaggttgatcttctgcaaaatggctgggcaacatggaaacaaaatgctagtacgtcagcttggtcttacagagccctcaggagcagcgcccttggcccgacgatggcaattctacgagggaagaacagccagagtaaaccacccaatcgaaagaactccaagtgatgcctaagtatttaataacttcagtgatacctatgtaatccaaagttgatccgatcctttggagaaggtcaagcaagtcgatgtagttggtcttatatatgtaactgcaattactgccctgcctattttgaaaattccaaagtggtgactgatgcaaagggaactttttagaccagtcaagactcgttactatgcaatgtcagcttatttaatgttgatgaaaattcactaaaattgatctttattgtacatcactcagatcttcagctttggaattgcttgatttattacaggagggtcaatagaacgttatcatttgcttgaaccattgggcttggatttgcatgtcacttgatcggacttgagttgaacttcaacttaaatttaag

SEQ ID NO: 14352 - DNA, 1039 bp, Zea Mays
ggaaggttggtttggggttgatgcagttcgtatcaaaggagggagatctgattgcctaccgattggttgagctgtcttccatgttgtgtccggagctctcttcgtaccgtgtgggaaaagttctggtatatgatcccgtatcattgcgtatcattctcgtacccgttcaagagtatccaatcaccaccgaggaaaaagaaaacaaggacgagtcagatatgcttgtggatttgtcaccgtacaaggaagatggctccttggagatcgagtactcttcacttgttgatgtaaggctactgaagggtatcgaaacatgcaacgaagttggatcagcaccggccggaaggccagttaccttgcacaaaaacgaaggcaatattgagagccagaaatcacccttggtgtcaaacaacactaaaggcgaagaacgcgcactaggaaagtcagaaagtacggtctgggaaaaaaatggtgagcccagtgataaggttgatcttctgcaaaatggctgggcaacatggaaacaaaatgctagtacgtcagcttggtcttacagagccctcaggagcagcgcccttggcccgacgatggcaattctacgagggaagaacagccagagtaaaccacccaatcgaaagaactccaagtgatgcctaagtatttaataacttcagtgatacctatgtaatccaaagttgatccgatcctttggagaaggtcaagcaagtcgatgtagttggtcttatatatgtaactgcaattactgccctgcctattttgaaaattccaaagtggtgactgatgcaaagggaactttttagaccagtcaagactcgttactatgcaatgtcagcttatttaatgttgatgaaaattcactaaaattgatctttattgtacatcactcagatcttcagctttggaattgcttgatttattacaggagggtcaatagaacgttatcatttgcttgaaccattgggcttggatttgcatgtcacttgatcggacttgagttgaacttcaacttaaatttaag

SEQ ID NO: 14353 - DNA, 740 bp, Zea Mays
ccccaatcagctacctcctcccggattccagtctttaggccggctcgaggtgccgcgcatttcaacgggtctcgcatggggcgaagtgcgctcgggatgtgggtgttcaggagcaagagcagtccggtgagcagcgacagcccccggggcgcctgcaagggctacatcttcgcgctggaggtggcggaggagctggagcagtggccggagcaggacacccacggcaggcagtgggtctccccggcggacgcgtaccgcctctgccgctacgactggatgcgcgaggcgctgtcggcactgctcgaccgcctcacggaggagcccgagccccccaagtcccccgccgcggacggcctcggcgagcacgcaggcgtgtgcatgatggtcaaggcgaccacagccgctgcggatcgagcggtggcgctctgctagtggcatcattctgaacatgtgcaaatcctcatcatctgggtcgtcaggctcggctgttcgttcgaacttggtgtggttggtcggtgaatgcagtgtatggaaacttgtctcgtcaatccagggcttgtaaatgatgtcggttacgccacgtgttaaatcaaatggctacaactgtccgtagtgcgtagctgagagtttccttgtcaaatctattgaggtttccactgtttgatcctcgcttcgtgtgctaaccttctcgacttctttcaactgtccccccctatatacaatatcttagttttgttttt

SEQ ID NO: 14354 - DNA, 965 bp, Zea Mays
gagtaactgattctaaaggatagggcaagaaggctcatttctaagcctatcaagtttttcaatgaaatgcaagagttgtttattaacagcagtgctgatggctctctagccatggaagctacaacttgtatgaatgaaactcatcctggagatgacagtgacttcaatgatgatgtgtgcagtgacttctccaactatcctcagcctgtgcatgatctaggtgatgattctgacactttaccatctcccaatcatcatccatctcaaaacgttgatcatagctcgtcaagttctggactgaagcgcccacaaggagagggagtaccagcgaaaaggaatgtgaaaccaaagagtcgcacaacaaaggtagtagatgaactcagtgctactttggtagaacttcgaaatgatcttaagaagccaccacctccagtgcctatgccttttggtaaccctgatgcaatattgtggcaaaggcttgagaatatgacaattactactgatcaaaagttaatggtaggaacgtatctagcacacaaagatcaaaagggtatgcgtggtttcttatctgctgcatcagacataacatttgagtcatgggtactaaagcatctgagtgatttggacctatgaatcgactaggatgatccatgtaggagatgaatggtgtgatagttgggttttttgcatttcttctaggttgatggatgtcaattgatggagatatttggtggttgtgactgctgttacattgctctttttgttgatttttaactttgagggtaccaatgagcatagtgcatagcaccagtaccttttacaattatggaatctctgcaaagcaaggaaggcattggactgtaataaattttgctccaatttcgcattgcaaatgttctagtagtgtcagatttttctctaatgcttctagtgaaaaatgagaccttttggagacagtttctaaa

SEQ ID NO: 14355 - DNA, 3986 bp, Zea Mays
cggaacagtggatccctcccctcgttcaccccacacgtgtctggctccagagccgtggttacgaaacgctccactccgctccgctttcccagttccggccaccgagcatggcaccaccccttccctccgtctcccgtggttcgcgggcgctcgtccaagcatccaaccccagctccgtgcgtcgcggcgcgaccaccggacctataagtacggaacgctcatgtccgcctcttgctttcctacctctccgcccccgttgcctcccaccgccgagacgacgcggacttcgtaccctctcaccgacgtgtgcgccgctgtcttccccggcactcactgctgctggttcggctcccgaaccttcgtcgactccgcatttctgaacaggatttttcatacattccaataacctcctaattgtccgaaggtgtcatatgtgacgagagagcacagatgtctctagaagttgagaagccaccagaaacgaccaagcagctcaagcgacaggattcactctatggtgatgcagaaaaggtctccggcttcaagcaccatggctctgagggaggctggccgcggttgctgcagcttgcatttcagagcattggcatcatctatggggacgtcgggacatcaccactctatgcgatatccagcaccttccctgatggcatcaaggaccaggatgacctacttggcgtcctctccctcatcctctacaccctaatcctgataccaatggtcaagtacgtcttcattgtgctttatgcagatgacaatggagatggtggcacgttcgccctctactcacttatatcgcggcactccaaggtaaggctgataccaaatcagcaggctgaggatgccatggtgtcaaattatggcatcgaagcgcccagtccggaactgagggtggcacagtggctgaagcagaagctcgagtctagcaaggcggcaaagattagcctctttatcattacaatccttggcacatcaatggtgatgggggatggaaccttgacaccatcaatttctgtgctctctgcagtgagtgggatcagggagaaggtgccaagcttaactgaaacgcaggtagtctggatctcagtgccgattttgttcgcgctcttctcggtccagcgctatggtacagacaaggtcgggtattcctttgctccgatcatcacactatggttttttcttattgctggcattggaatgtataacctcattgtgcacgagatcggtgttctccgagccttcaatccaatgtacatagtggattacttcagaaggaatgggaaggatggatgggtttcactgggtggcgttatcttgtgtgtcacaggcacagaaggaatgtatgcagacctaagccatttcaatatcaaggccattcagatcagctttagcactgtcttgctcccctccgtggcactgtgttacatcggacagacagcttacctgaggaaattcccagagagtgtcgcagacactttctttagatccatcccagagctaatgttctggccaaccttcattatcgccatcctttcggctatcatcgcaagccaagccatgctgtcaggcgcattcgccatcctctccaaggctttgtctcttggctgtttccccagtgtccaggtgattcatacatccaagagctacgagggccaggtttacattcctgaagtgaactttttgatgggattagcaagcatcatcgtcacgatcaccttcagaaccaccaccgaaatcggcaacgcttatgggatctgtgtggtaaccgtgttctcgatcaccacccacctgacgaccattgtgatgttactcgtgtggaggaagaatttcatcatcgtcttgcttttctacgtggtgttcagctccatagagctggtctacctctcatccatactgaccaagttcatccaaggcgggtacctgccgttctgcttctcgcttgtcctcatggccttgatgatcacatggcactacgtccacgtgatgaagtactggtacgagctggaccacgtcgtgccagccaacgaagtgacaacgctgcttgagaagcatgaggtgcggcggatccccggggtgggcctcctttactcggacctggtccaaggcatcacccccgtgtttccacgtctggtgcagaggataccctccgtgcacgcggtcttcctgttcatgtccatcaagcacctgccgatcccacacgtggcccctgtggagcggttcctcttccggcaggtcggcccgagggagcaccggatgttccggtgtgtggcgaggtatgggtactgtgacaagctagaggagtcggggctgttcaaagggttcctcatggagagcctaaagacgttcatccaagatgaggctgcgtttaagacgaactctacagctggagataccaaggagctgaccgatcccaaggtgtctggccatgatttggctcgttgggtcgaaaaggaaaagcaaatgattgacaaggagatggagcgaggggtggtctaccttatgggggaagccaatgtcattgcaggaccagaatcatctgccgcaaagaagatagtggtagactatgtctacgcattcttgaggaagaacttgacggagggggagaaggtgctctccattccgaaagaccaactactcaaagtagggataacatacgagatatagggattatgctgggcctcaagttacaatcctatgtatcaacttggcctgaagtcatataaagtttatgtatatcgagagattcaagattcaatgtaaattattcaattttattccttccacatggtatctatgaaatcgatctcagcaggggctatgtccttgttaagccaatagatcctattcagttgtcgcatttgctggggggcaactcccttattggtggtacatcatgagttcaagttttaatatttgagttacaatattagaagtctgtcacagcggtgcgcactgcacagtgaaacctgcagctttgatatttgtacacgtgctgtattgactggattcacgacggtttgcacgaatgctacaacagaaaattcccgatcccctgtctgaacgtttgcatcatcgtcatcgcgcatccactaaattcttctatcgtcgtcctcccttaatcagccgattgtgtttgatccacctagcccacgtgaatttcatcagcgagtagatcaagctatcgattgtgttttacctttagcatcgccccctacaatgggagcagatcaagctatccatcccatacatgtatgtgagctaacatcactgcaacagagaacagcagagaagggagaaaggaccagtgaacatttatatatccccattacatttatatatctgtttaatgctaaagatcaagtctgacaaatattctggaggcaaaggatataccgaaggtagtactggcatggagactgccaaataacgccaatgatcagacacgtgcatacaaatccaccatgggctactgcatgagacctagtacagtaccgaggtatggaaggtttaacatggttcctgttgatcagcaacagcaaggcattttgaggatacttagatgtgggactaaccaaatattttctaggcttagcaggctatggtaatatttagatttttttagataatgatggtaatatttagatgattgcccataactatgatggtaatgcaatagcattaagcttattcttgtgagcagcggaaatctcacccaacatatgcactatttaccattcgtcatttcatgactctaccaccttgtagaaaaatcatttgggatgaataagagcaaatagtttaatcgttacagtagccgaaatttgtgcttatgttgccaatagaagctgtgacactagcagcccagcaggtgttaggctatagaccttatcgtctaattagaattcagaagctgggtcgtgtaccactttcttccacatatttctgaaggcagcataccgactcccaat

SEQ ID NO: 14356 - DNA, 3879 bp, Zea Mays
ggctccagagccgtggttacgaaacgctccactccgctccgctttcccagttccggccaccgagcatggcaccaccccttccctccgtctcccgtggttcgcgggcgctcgtccaagcatccaaccccagctccgtgcgtcgcggcgcgaccaccggacctataagtacggaacgctcatgtccgcctcttgctttcctacctctccgcccccgttgcctcccaccgccgagacgacgcggacttcgtaccctctcaccgacgtgtgcgccgctgtcttccccggcactcactgctgctggttcggctcccgaaccttcgtcgactccgcatttctgaacaggatgtctctagaagttgagaagccaccagaaacgaccaagcagctcaagcgacaggattcactctatggtgatgcagaaaaggtctccggcttcaagcaccatggctctgagggaggctggccgcggttgctgcagcttgcatttcagagcattggcatcatctatggggacgtcgggacatcaccactctatgcgatatccagcaccttccctgatggcatcaaggaccaggatgacctacttggcgtcctctccctcatcctctacaccctaatcctgataccaatggtcaagtacgtcttcattgtgctttatgcagatgacaatggagatggtggcacgttcgccctctactcacttatatcgcggcactccaaggtaaggctgataccaaatcagcaggctgaggatgccatggtgtcaaattatggcatcgaagcgcccagtccggaactgagggtggcacagtggctgaagcagaagctcgagtctagcaaggcggcaaagattagcctctttatcattacaatccttggcacatcaatggtgatgggggatggaaccttgacaccatcaatttctgtgctctctgcagtgagtgggatcagggagaaggtgccaagcttaactgaaacgcaggtagtctggatctcagtgccgattttgttcgcgctcttctcggtccagcgctatggtacagacaaggtcgggtattcctttgctccgatcatcacactatggttttttcttattgctggcattggaatgtataacctcattgtgcacgagatcggtgttctccgagccttcaatccaatgtacatagtggattacttcagaaggaatgggaaggatggatgggtttcactgggtggcgttatcttgtgtgtcacaggcacagaaggaatgtatgcagacctaagccatttcaatatcaaggccattcagatcagctttagcactgtcttgctcccctccgtggcactgtgttacatcggacagacagcttacctgaggaaattcccagagagtgtcgcagacactttctttagatccatcccagagctaatgttctggccaaccttcattatcgccatcctttcggctatcatcgcaagccaagccatgctgtcaggcgcattcgccatcctctccaaggctttgtctcttggctgtttccccagtgtccaggtgattcatacatccaagagctacgagggccaggtttacattcctgaagtgaactttttgatgggattagcaagcatcatcgtcacgatcaccttcagaaccaccaccgaaatcggcaacgcttatgggatctgtgtggtaaccgtgttctcgatcaccacccacctgacgaccattgtgatgttactcgtgtggaggaagaatttcatcatcgtcttgcttttctacgtggtgttcagctccatagagctggtctacctctcatccatactgaccaagttcatccaaggcgggtacctgccgttctgcttctcgcttgtcctcatggccttgatgatcacatggcactacgtccacgtgatgaagtactggtacgagctggaccacgtcgtgccagccaacgaagtgacaacgctgcttgagaagcatgaggtgcggcggatccccggggtgggcctcctttactcggacctggtccaaggcatcacccccgtgtttccacgtctggtgcagaggataccctccgtgcacgcggtcttcctgttcatgtccatcaagcacctgccgatcccacacgtggcccctgtggagcggttcctcttccggcaggtcggcccgagggagcaccggatgttccggtgtgtggcgaggtatgggtactgtgacaagctagaggagtcggggctgttcaaagggttcctcatggagagcctaaagacgttcatccaagatgaggctgcgtttaagacgaactctacagctggagataccaaggagctgaccgatcccaaggtgtctggccatgatttggctcgttgggtcgaaaaggaaaagcaaatgattgacaaggagatggagcgaggggtggtctaccttatgggggaagccaatgtcattgcaggaccagaatcatctgccgcaaagaagatagtggtagactatgtctacgcattcttgaggaagaacttgacggagggggagaaggtgctctccattccgaaagaccaactactcaaagtagggataacatacgagatatagggattatgctgggcctcaagttacaatcctatgtatcaacttggcctgaagtcatataaagtttatgtatatcgagagattcaagattcaatgtaaattattcaattttattccttccacatggtatctatgaaatcgatctcagcaggggctatgtccttgttaagccaatagatcctattcagttgtcgcatttgctggggggcaactcccttattggtggtacatcatgagttcaagttttaatatttgagttacaatattagaagtctgtcacagcggtgcgcactgcacagtgaaacctgcagctttgatatttgtacacgtgctgtattgactggattcacgacggtttgcacgaatgctacaacagaaaattcccgatcccctgtctgaacgtttgcatcatcgtcatcgcgcatccactaaattcttctatcgtcgtcctcccttaatcagccgattgtgtttgatccacctagcccacgtgaatttcatcagcgagtagatcaagctatcgattgtgttttacctttagcatcgccccctacaatgggagcagatcaagctatccatcccatacatgtatgtgagctaacatcactgcaacagagaacagcagagaagggagaaaggaccagtgaacatttatatatccccattacatttatatatctgtttaatgctaaagatcaagtctgacaaatattctggaggcaaaggatataccgaaggtagtactggcatggagactgccaaataacgccaatgatcagacacgtgcatacaaatccaccatgggctactgcatgagacctagtacagtaccgaggtatggaaggtttaacatggttcctgttgatcagcaacagcaaggcattttgaggatacttagatgtgggactaaccaaatattttctaggcttagcaggctatggtaatatttagatttttttagataatgatggtaatatttagatgattgcccataactatgatggtaatgcaatagcattaagcttattcttgtgagcagcggaaatctcacccaacatatgcactatttaccattcgtcatttcatgactctaccaccttgtagaaaaatcatttgggatgaataagagcaaatagtttaatcgttacagtagccgaaatttgtgcttatgttgccaatagaagctgtgacactagcagcccagcaggtgttaggctatagaccttatcgtctaattagaattcagaagctgggtcgtgtaccactttcttccacatatttctgaaggcagcataccgactcccaat

SEQ ID NO: 14357 - DNA, 4378 bp, Zea Mays
ggctccagagccgtggttacgaaacgctccactccgctccgctttcccagttccggccaccgagcatggcaccaccccttccctccgtctcccgtggttcgcgggcgctcgtccaagcatccaaccccagctccgtgcgtcgcggcgcgaccaccggacctataagtacggaacgctcatgtccgcctcttgctttcctacctctccgcccccgttgcctcccaccgccgagacgacgcggacttcgtaccctctcaccgacgtgtgcgccgctgtcttccccggcactcactgctgctggttcggctcccgaaccttcgtcgactccgcatttctgaacaggatttttcatacattccaataacctcctaattgtccgaaggtgtcatatgtgacgagagagcacagatgtctctagaagttgagaagccaccagaaacgaccaagcagctcaagcgacaggattcactctatggtgatgcagaaaaggtctccggcttcaagcaccatggctctgagggaggctggccgcggttgctgcagcttgcatttcagagcattggcatcatctatggggacgtcgggacatcaccactctatgcgatatccagcaccttccctgatggcatcaaggaccaggatgacctacttggcgtcctctccctcatcctctacaccctaatcctgataccaatggtcaagtacgtcttcattgtgctttatgcagatgacaatggagatggtggcacgttcgccctctactcacttatatcgcggcactccaaggtaaggctgataccaaatcagcaggctgaggatgccatggtgtcaaattatggcatcgaagcgcccagtccggaactgagggtggcacagtggctgaagcagaagctcgagtctagcaaggcggcaaagattagcctctttatcattacaatccttggcacatcaatggtgatgggggatggaaccttgacaccatcaatttctgtgctctctgcagtgagtgggatcagggagaaggtgccaagcttaactgaaacgcaggtagtctggatctcagtgccgattttgttcgcgctcttctcggtccagcgctatggtacagacaaggtcgggtattcctttgctccgatcatcacactatggttttttcttattgctggcattggaatgtataacctcattgtgcacgagatcggtgttctccgagccttcaatccaatgtacatagtggattacttcagaaggaatgggaaggatggatgggtttcactgggtggcgttatcttgtgtgtcacaggtaaactttacatcgaaaagtgcaattgcgatggtagttattagtctacaatctcaatgggctgttgtcatatgcaataggcacagaaggaatgtatgcagacctaagccatttcaatatcaaggccattcaggtaacaaggacattcacacccatgctcttcgcttcaccatgttgattctcccaactctacctccaattttagtttagttagaagcatccattttgcttttaaactatgccactgtaaagttttcaaatacacccattttacttttaaactggttccattctgttccttcaaaataaagcatccgattttacaggaatcaaattccaagcttgccaaacagaaatagctcacaacattcgctgtgttttcacctacagatcagctttagcactgtcttgctcccctccgtggcactgtgttacatcggacagacagcttacctgaggaaattcccagagagtgtcgcagacactttctttagatccatcccagagctaatgttctggccaaccttcattatcgccatcctttcggctatcatcgcaagccaagccatgctgtcaggcgcattcgccatcctctccaaggctttgtctcttggctgtttccccagtgtccaggtgattcatacatccaagagctacgagggccaggtttacattcctgaagtgaactttttgatgggattagcaagcatcatcgtcacgatcaccttcagaaccaccaccgaaatcggcaacgcttatggtaagcaactagaaggtccagaatttgtttttggcaacccagaacagacagacagaagttatacatttcatgtcatttgattctgggtggtgtgcagggatctgtgtggtaaccgtgttctcgatcaccacccacctgacgaccattgtgatgttactcgtgtggaggaagaatttcatcatcgtcttgcttttctacgtggtgttcagctccatagagctggtctacctctcatccatactgaccaagttcatccaaggcgggtacctgccgttctgcttctcgcttgtcctcatggccttgatgatcacatggcactacgtccacgtgatgaagtactggtacgagctggaccacgtcgtgccagccaacgaagtgacaacgctgcttgagaagcatgaggtgcggcggatccccggggtgggcctcctttactcggacctggtccaaggcatcacccccgtgtttccacgtctggtgcagaggataccctccgtgcacgcggtcttcctgttcatgtccatcaagcacctgccgatcccacacgtggcccctgtggagcggttcctcttccggcaggtcggcccgagggagcaccggatgttccggtgtgtggcgaggtatgggtactgtgacaagctagaggagtcggggctgttcaaagggttcctcatggagagcctaaagacgttcatccaagatgaggctgcgtttaagacgaactctacagctggagataccaaggagctgaccgatcccaaggtgtctggccatgatttggctcgttgggtcgaaaaggaaaagcaaatgattgacaaggagatggagcgaggggtggtctaccttatgggggaagccaatgtcattgcaggaccagaatcatctgccgcaaagaagatagtggtagactatgtctacgcattcttgaggaagaacttgacggagggggagaaggtgctctccattccgaaagaccaactactcaaagtagggataacatacgagatatagggattatgctgggcctcaagttacaatcctatgtatcaacttggcctgaagtcatataaagtttatgtatatcgagagattcaagattcaatgtaaattattcaattttattccttccacatggtatctatgaaatcgatctcagcaggggctatgtccttgttaagccaatagatcctattcagttgtcgcatttgctggggggcaactcccttattggtggtacatcatgagttcaagttttaatatttgagttacaatattagaagtctgtcacagcggtgcgcactgcacagtgaaacctgcagctttgatatttgtacacgtgctgtattgactggattcacgacggtttgcacgaatgctacaacagaaaattcccgatcccctgtctgaacgtttgcatcatcgtcatcgcgcatccactaaattcttctatcgtcgtcctcccttaatcagccgattgtgtttgatccacctagcccacgtgaatttcatcagcgagtagatcaagctatcgattgtgttttacctttagcatcgccccctacaatgggagcagatcaagctatccatcccatacatgtatgtgagctaacatcactgcaacagagaacagcagagaagggagaaaggaccagtgaacatttatatatccccattacatttatatatctgtttaatgctaaagatcaagtctgacaaatattctggaggcaaaggatataccgaaggtagtactggcatggagactgccaaataacgccaatgatcagacacgtgcatacaaatccaccatgggctactgcatgagacctagtacagtaccgaggtatggaaggtttaacatggttcctgttgatcagcaacagcaaggcattttgaggatacttagatgtgggactaaccaaatattttctaggcttagcaggctatggtaatatttagatttttttagataatgatggtaatatttagatgattgcccataactatgatggtaatgcaatagcattaagcttattcttgtgagcagcggaaatctcacccaacatatgcactatttaccattcgtcatttcatgactctaccaccttgtagaaaaatcatttgggatgaataagagcaaatagtttaatcgttacagtagccgaaatttgtgcttatgttgccaatagaagctgtgacactagcagcccagcaggtgttaggctatagaccttatcgtctaattagaattcagaagctgggtcgtgtaccactttcttccacatatttctgaaggcagcataccgactcccaat

SEQ ID NO: 14358 - DNA, 3939 bp, Zea Mays
ggctccagagccgtggttacgaaacgctccactccgctccgctttcccagttccggccaccgagcatggcaccaccccttccctccgtctcccgtggttcgcgggcgctcgtccaagcatccaaccccagctccgtgcgtcgcggcgcgaccaccggacctataagtacggaacgctcatgtccgcctcttgctttcctacctctccgcccccgttgcctcccaccgccgagacgacgcggacttcgtaccctctcaccgacgtgtgcgccgctgtcttccccggcactcactgctgctggttcggctcccgaaccttcgtcgactccgcatttctgaacaggatttttcatacattccaataacctcctaattgtccgaaggtgtcatatgtgacgagagagcacagatgtctctagaagttgagaagccaccagaaacgaccaagcagctcaagcgacaggattcactctatggtgatgcagaaaaggtctccggcttcaagcaccatggctctgagggaggctggccgcggttgctgcagcttgcatttcagagcattggcatcatctatggggacgtcgggacatcaccactctatgcgatatccagcaccttccctgatggcatcaaggaccaggatgacctacttggcgtcctctccctcatcctctacaccctaatcctgataccaatggtcaagtacgtcttcattgtgctttatgcagatgacaatggagatggtggcacgttcgccctctactcacttatatcgcggcactccaaggtaaggctgataccaaatcagcaggctgaggatgccatggtgtcaaattatggcatcgaagcgcccagtccggaactgagggtggcacagtggctgaagcagaagctcgagtctagcaaggcggcaaagattagcctctttatcattacaatccttggcacatcaatggtgatgggggatggaaccttgacaccatcaatttctgtgctctctgcagtgagtgggatcagggagaaggtgccaagcttaactgaaagtagtctggatctcagtgccgattttgttcgcgctcttctcggtccagcgctatggtacagacaaggtcgggtattcctttgctccgatcatcacactatggttttttcttattgctggcattggaatgtataacctcattgtgcacgagatcggtgttctccgagccttcaatccaatgtacatagtggattacttcagaaggaatgggaaggatggatgggtttcactgggtggcgttatcttgtgtgtcacaggcacagaaggaatgtatgcagacctaagccatttcaatatcaaggccattcagatcagctttagcactgtcttgctcccctccgtggcactgtgttacatcggacagacagcttacctgaggaaattcccagagagtgtcgcagacactttctttagatccatcccagagctaatgttctggccaaccttcattatcgccatcctttcggctatcatcgcaagccaagccatgctgtcaggcgcattcgccatcctctccaaggctttgtctcttggctgtttccccagtgtccaggtgattcatacatccaagagctacgagggccaggtttacattcctgaagtgaactttttgatgggattagcaagcatcatcgtcacgatcaccttcagaaccaccaccgaaatcggcaacgcttatgggatctgtgtggtaaccgtgttctcgatcaccacccacctgacgaccattgtgatgttactcgtgtggaggaagaatttcatcatcgtcttgcttttctacgtggtgttcagctccatagagctggtctacctctcatccatactgaccaagttcatccaaggcgggtacctgccgttctgcttctcgcttgtcctcatggccttgatgatcacatggcactacgtccacgtgatgaagtactggtacgagctggaccacgtcgtgccagccaacgaagtgacaacgctgcttgagaagcatgaggtgcggcggatccccggggtgggcctcctttactcggacctggtccaaggcatcacccccgtgtttccacgtctggtgcagaggataccctccgtgcacgcggtcttcctgttcatgtccatcaagcacctgccgatcccacacgtggcccctgtggagcggttcctcttccggcaggtcggcccgagggagcaccggatgttccggtgtgtggcgaggtatgggtactgtgacaagctagaggagtcggggctgttcaaagggttcctcatggagagcctaaagacgttcatccaagatgaggctgcgtttaagacgaactctacagctggagataccaaggagctgaccgatcccaaggtgtctggccatgatttggctcgttgggtcgaaaaggaaaagcaaatgattgacaaggagatggagcgaggggtggtctaccttatgggggaagccaatgtcattgcaggaccagaatcatctgccgcaaagaagatagtggtagactatgtctacgcattcttgaggaagaacttgacggagggggagaaggtgctctccattccgaaagaccaactactcaaagtagggataacatacgagatatagggattatgctgggcctcaagttacaatcctatgtatcaacttggcctgaagtcatataaagtttatgtatatcgagagattcaagattcaatgtaaattattcaattttattccttccacatggtatctatgaaatcgatctcagcaggggctatgtccttgttaagccaatagatcctattcagttgtcgcatttgctggggggcaactcccttattggtggtacatcatgagttcaagttttaatatttgagttacaatattagaagtctgtcacagcggtgcgcactgcacagtgaaacctgcagctttgatatttgtacacgtgctgtattgactggattcacgacggtttgcacgaatgctacaacagaaaattcccgatcccctgtctgaacgtttgcatcatcgtcatcgcgcatccactaaattcttctatcgtcgtcctcccttaatcagccgattgtgtttgatccacctagcccacgtgaatttcatcagcgagtagatcaagctatcgattgtgttttacctttagcatcgccccctacaatgggagcagatcaagctatccatcccatacatgtatgtgagctaacatcactgcaacagagaacagcagagaagggagaaaggaccagtgaacatttatatatccccattacatttatatatctgtttaatgctaaagatcaagtctgacaaatattctggaggcaaaggatataccgaaggtagtactggcatggagactgccaaataacgccaatgatcagacacgtgcatacaaatccaccatgggctactgcatgagacctagtacagtaccgaggtatggaaggtttaacatggttcctgttgatcagcaacagcaaggcattttgaggatacttagatgtgggactaaccaaatattttctaggcttagcaggctatggtaatatttagatttttttagataatgatggtaatatttagatgattgcccataactatgatggtaatgcaatagcattaagcttattcttgtgagcagcggaaatctcacccaacatatgcactatttaccattcgtcatttcatgactctaccaccttgtagaaaaatcatttgggatgaataagagcaaatagtttaatcgttacagtagccgaaatttgtgcttatgttgccaatagaagctgtgacactagcagcccagcaggtgttaggctatagaccttatcgtctaattagaattcagaagctgggtcgtgtaccactttcttccacatatttctgaaggcagcataccgactcccaat

SEQ ID NO: 14359 - DNA, 237 bp, Zea Mays
caaccactggcagcagcggaggaaggggaacgccggcgagctgggcaggaaacaggggaccgctagccacggattgggaggacgcgcaaagcaaaaccttctgctttgcggggatggccagcgaaacggggacgggacgctttcacgcgccgcggcttgattgcttccgcacgatcggttgggttgcggctattttctttcgctgggcaggctgccgcggttcttccgcgtacggcc

SEQ ID NO: 14360 - DNA, 489 bp, Zea Mays
ctattcccgacccccatttcccacctccgcacccctgctcgctgtccacgaagtctccacgtcgatcgccgctgtttaccatctcaggagccctctgctccgtcccagtcgctggtgggtagctccgagaagcctgcgtcctcctctacaattcccctactttgcctgctgctgttcgcaccgctcgccgttgtcgtgtcgtcgagccgccggcattcgcgactcgctggagcatcgtttgtcgcagactctctgcccttgtgccgtcttcagcgcggaacatcgctagagcacctcgccggagctgtactgccatgtgccatcggaagaagctgctggacgtcgttcgattccatcaccgcaccggtcctgctgcttcatcgtgtcgctgcccgtgttcgttggttcagctcgccgaagctatcgccctcgtcatcaaactaagtggttgatctagtagttaagaatcaagatctattcagatccgtg

SEQ ID NO: 14361 - DNA, 2689 bp, Zea Mays
gtgaccgacctgcgtcggggctggggcacccgcccgcgaggttgcggcggcggcctgcctgtgcgcgtggctcgtccatggacacacagtacaatcatgcagacgccacgtagtacagttgtttcttggcgctgctcgatcgatcgcgctggctggatgcggcatgccgccgtggttctcggtggcccatcgccgtccccgggccggggtattgtttcccggcttgcacgcaccacctcaaatcaaaggacggcgaccacacatcgtcgtaccttcaaggtcaggtcaggcagccccttcaatttcgctagatctgatgagacctctttttttttttgtatcggtacttatattattattgctcctgcttgatccaaaaaccattcaacgctcatgtatagtcagtcatgtttgctcgtcgcttgacagaggggccaaaacaggtagcagtagtgtgccccagtggcccaggctctacactctacagtgttagatctaggtgcgtgccccatacggccatagtgtgcatgccatcacacacgaataataaatgcaggcaataaatcagctcccaaagggtaaagaatgaaaaaaaatataaactggcaccttcataacaagtggataatttttttaagtgttgcctattttcatagtaggtaaaaacaaggggtgagctgttttcaattttgtaccacaacaaaaacagcctttggaacaaagcagttgtggcatttcagccctttggttgacttttacaaaatcaaaagcaggttccaaagcccaaccaaaaggaccttaaaattatcaaatcaacaaaagctacttgccaagaacatagaaaaagaaaaaattgtcctcattagatacaccaagcaaaaaataaacttttgaatgatctacatcaaaatagactcgaacccattcgataatcttttttggtgtttcatgatcaatattattgtttatacaagatcatgcaagagtccaaggcataagatgagagaaggccagacaaagacagagaaataaaggaaaaatagagcactcaaccacaccaaacgtgtcccacgtaataagagtgttactatactgaagaagagctactgagaaagagtacacagaacgctcaggtatccaccggacgtcacactagataggacaccggatacggaactcaaagatatctgcatcatatttgagaatatccataaggtaccagacttatccagtgtccatcggatacctcaccgaaccggacgtgtctaatgtaacaccggtgaaagcactagattctctgactcaaatggctaacaatgtcaagtaccgactgctagccgtcgaggacaaacactggtgtgtctaatgcctgcaccggagtatccagtaagtatgcaaaaaatatgcatcacttctgatggctagttttggacttgggggctatataccaccacaatagggcatttgagatgtgcgggagctaaaaacattgctaaagagttgagactacattcctatagctctagacatctaagtgcttaatgatcactctgtgattagcgttcgtgctttgtgaaatgcttaggttagttagaccgctatcattagctcttgctctaagttttgcctactgattagaagtgaggttaaagaccctcaaacccttggtgcttgcatgcatgattatataccttggctcttgcgcgcaccattgtgttgtaccaaaaggggttgtaaccttgtgatatcatattaattacatttatggtgtggtcgctatcgtgtactagagagaacgaggaccataacatcttggctggaaacttgatagcgcagaagacacagagcatccgagaaagaccaaaagtggagcaccatttgcatggagaaggtctgaagctatccacgaagttacttttgagtgggagcttgtcccttgtgtgggcattccctttcatggggctccaacaaggattaggggaaagcttgcatgctttttgatacctcggtaaaatactgatgcttcattggatgtgaaaggatcacgatgcccaagagagggtgaattgggcttgtctaaaattctaacaaaagattaaaccctaaacatgagcccaacttcacccaaactactagaaacaagtaaaagctatggaatagagaacaaccctaagtcattattgcaaatacgaactaagcaaatacacaaaataaaatgctcaaagtaaatgtgtaaagtaaagtagggacaagaagactcctcctatttttcctaaggtatcgaagagtcgccactcaccactggtcctcgttggagaacctgcacaagggtatcgctctcccttggtcctcgcaagaaccaagtgctcactacatgaatccacttaattcctgttggttaagaaccaacgggaattactaatcctcgtcggtttatggcttattcctgtcggcggtaagccgataaccgtcagatgtcggggataagattattcccgtcggctgctgacgggaataagtaatcatcgttggccagttacaagccgtcggcaataaacactaattcccgtaggtccggcgggtcggcgggaattaacaattaattcccgtcggccctgtaactctcgtcggccatgaccgaccgacagggattaacaattaattcccatctgccctacctagccgacag

SEQ ID NO: 14362 - DNA, 318 bp, Zea Mays
gtgaccgacctgcgtcggggctggggcacccgcccgcgaggttgcggcggcggcctgcctgtgcgcgtggctcgtccatggacacacagtacaatcatgcagacgccacgtagtacagttgtttcttggcgctgctcgatcgatcgcgctggctggatgcggcatgccgccgtggttctcggtggcccatcgccgtccccgggccggggtattgtttcccggcttgcacgcaccacctcaaatcaaaggacggcgaccacacatcgtcgtaccttcaagagtctgcttttagtactagtggcagagtgctaagtgatc

SEQ ID NO: 14363 - DNA, 6169 bp, Zea Mays
gtgaccgacctgcgtcggggctggggcacccgcccgcgaggttgcggcggcggcctgcctgtgcgcgtggctcgtccatggacacacagtacaatcatgcagacgccacgtagtacagttgtttcttggcgctgctcgatcgatcgcgctggctggatgcggcatgccgccgtggttctcggtggcccatcgccgtccccgggccggggtattgtttcccggcttgcacgcaccacctcaaatcaaaggacggcgaccacacatcgtcgtaccttcaaggttacgctcgaagcgggtgataacgtgtctgatcccacagcatggactggatttgttgactcacttttcgcgtttcctcctcctggtggcggcagcggttaaagctctaaccactcacgtggtggttatctctaaacacttgaactcgtgcacgctatgtttcttaactcgttgacgctatgtttttcgcgaactaaacactttaacttatctcgttgttcctatttgaaatgtttgtgtaaactcaatgtatgtgtctgttctgtgtgatgatatataagttatgtgtgcaattgtggagaaatattaacctaatttaatgctggttttgtagcagtataggttaattcccgtcggcccagtaactcccgtcggctatggtcgaaccgacggagattaacaattaatccccgtcggcccagtaactcctgtcggctaggaggtccgacaaccattaattggtaatttgtttgaggaataatcttatccccgacatctgacgcctgtcggcttacggccaacgagaataagccctaaaccaacggaaattactaattcctgtcggtttaaggcttttcccgtcggttccttgccgacgggaattaagtggattactgtagtaaatacaaataggcacaaatctttatattattccgcatcggtcatgtggattattgtatattatatttcttagggcatgtacaatctagataatatattacggttctccaagcactagatacacgtatgaaacttgttcatacaatccaatgtatagccttatatcttaattcactagaatctctcaagatacaactcatttatgtggagccgtatcttaggcttgaagaaccgtgctagagacgtttcatcaccgatatacgtctcttatgtttttttacacttacatcattaaatatcctttaaaatacggattattcatgtgggctgtagacgaccttagtatatttctcggtggcgccggtcccgtgaaggctggtttggagtcgatcgagtgcacaccttgcaccacctttgctctatcactatcatctcaagctgaatcagctttgtcattccataaaaaatcattttcaaaattatccaaggttaaatacctttataaattgtagtagctttatatacataaataccgacagctatgaattaaataaaaaacatttgataggaatattataagttaatttgtttgaggaccaggatattcgtacaatgtttgattcatggaatcgttctatggtcgtctcaatgaggacaacacccagaagcaggctaggaactggaatgcacagcttatggggcagatcatatacaggttactactactatattattagtttagtgtagtagcagccagtacagtactttacgatgattaacatcagctaaatgtcttttgcaatggcaagcaagcatgcacgcatgcatgtgcgacaactgacaaataattgtttcctttggattcaaatcgtgatgtacggataagcaacgggtagcattttagctgctgcctgttggtagtgaagtgggtggaacaccacatgcatgcatgatccatgggtgtcatgctggggtatgggctcgggtcggatcatgcacgcatgcaagttggcgcagcagtgacagactcgagtgagagcgagtgcgctggcgacatggggtacctatgatatgcatggtgatataggcgacatggtggtgataggagtaatcaggaccgagaacgagtgcagctacgcgcgtttggcgccgagtgcacgcatgaggccaagaatattgaacgcttgaatctggacatttggatttgattgaacaaaagatacaatgttggatcttgcagctcgctgatgagtattccggcccgttgaggtgctgtttggaattaagcgcatgtttgaaaccactcagtttttaagaaactagtttatgaaaattgagataagatggttctaaacataccaatttatatatcagtttatagaaactgatttcatagtttcttaaaaacaaagaagctagtctctcctatctaaaaaaaactggattactttcaaacatgatttaaaaaaaggaatacaaaatacagatgtagaaaaaacagtctttgctacggtatttctacaagactaaattgaaaagacacatttatgtaacgttgtgtatttgacaaacttttttttctattgcctaattattacatgtaatctctaatacttattaagtattaaggctgcaatagtagtctgtcattccctattctgctcatttcgtgttctgtcatcattccttgttctgcctttccgattccctccttcccgcacatagttcattcccatgttctgtcattccccctccccgcaaagctcattccattcccccgtacacatggcccccgaaggggattcgaactcaacctctcaagcaaattcttgaattatatttttggatggagggagtagtatttaaagaagagccttgcatgcaattttttttttgaataatgtttttaacttaaattcctttttttgcatgtgtgatatttattctttgtaatattttttccatggatatgacttgtgagtcatttttataaaccaacgccaaacatgaatcaatgtttcttatttgaaaactccgaacaaacaacattagcaggaggcactcgcgttggggtcgctcatcaacgacgagaagaaactttgcgactgccagttcgacctctagaaacagtcttacgtggccgcatgtgccgttatgtacgacaagcttcagcgcagccgtcgcttggacgcggtgcagagcggttgctccacgctgttcattgtcaagcaggggaccccatggtcgtcgccaacgtcggcgactctcgggttattctgggcatcacattcgacgactacgccatcatgtcgtccagctcgtcatccacctaaagcccaacctgccacgtaagtcgcaactgaccgacaataaattcttgtgcattgggacgatggtcgttgctgacgttgtgtgagtgtcgttgaacatgatgtatgtagaggagtaacgcatctggtggtgcaacggccaggggtactaccttgctgatgagcctacggtgcacttcgttttacagcccaaccaagagtcatcagtactcgatatgttgtgcgcgttcgacgactattatatcgaggatcgtggcgtcatcttgacgcatgaggtgacacagaggaggaccgacaacaatgaccagttcgtcatcctcgccaccgttggggtagcttttgtgccgacttgcctttaattctcttcacaaacacacacacttgcctttttttaagcaaaagtgtatggtggtacgtgtctgatgactaacgatgtacgggggaatttcttcctacatgtgtggaacatgctctccaatgatgagaccattcaaatcgtgacatatatcgaagtttgcatgatattgatggttgcaatgtagtggtgaaacatatagattaaaataacaaaatttatgtatggccagaatcacaaattgattataaaacattttctcataatgatataacacatattttgtatataagttatcgtagtatacttgtattatatattctcattgcaacccatgggcactcagctagtttaactattatatacctaatgcaaaatggcactggtatgatgttgttttgcaactaaatataaaacgtgcccgacatggttttgcaaataaatataactcagctaataaaataaacctcggagtccactagagccttctttgccaagtgtaaggccagcaaacactcggtaaaggctccatcaccgtcgcttggtacgtgatgatgactttttttgtcgagtgcccgacaaaaaaatactcggcaaaaaagccgttgccgatgtacagttcactgagacctttttgtcgagagacactcgacaaaagactttgtcgagagttttctaggctttgccaagtgcctgaagaactcggtaaaacagatgtgtccggtagtgattgtttatacaagcgaggactacagtcgctgaatgacatcacctcgtcgctgcgaagaggatgtagcccttggagtcctttttttatttgtgcagtgcagcctagaacactctagaggcaaaagagcgatggcttatgttgagaccagaccaatgccgttggatgagaatctcgcatgagaatctcgcggttgatgtgaggtagggtgacatggatgaaccggagggaggatttgcccccactgtgaatataacacatgattggttgtaggtagggatggcagtgggtacggttatgggtaacccgtcgggtacagatatggtggattttcgtatccgcgggtacggatatggatactatatagtatccagggttattaatttcgcggattgtgaatttgtgatgtcaactcccaacgaaaatagcaacactcaatttcaacctccctcatctcaagcatctgttgagggtggaagtgggcttccagagaatgtgattaatgttgaacaagatggtgatgaggatgatgatgaagtagaagaaaatgggagaaaaagaaaattgaaatctgtagtgtggagtgaattcaagagggtaaatgttggagatatttggaaggcaaagtgtaattattgttcaaagaagctttcgggtgtaacaaagaatggtacatctcatttgaaagcccatctagagacatacatctatcgaaagaggaatcctacagataaggtacaaagctctttgtggttcacatctagtagcgaacaaggacaagtgtcggtgaaggagtatgttttcgaccaagatgtggcgagaaaggcccgtcctgaaatggttgttttgcatgaatatccattgtccattgtggatcatgttggttttagaagtagagcaatgctagagatagaaaatgtgaggaaattatttgatgaactgattaaagagtacaacaacaaatgcattaaacctgttactagtggtggacaaaatgcatcatcatcttgtgtttctaatgcttccacatatacggatgagttgttctctgccatggaggaagagctcgatgacatgtgcagtgatgaagaaaaggctaagtctgagcttgatctttatgtggatgaaggtcgtattcccaagtcaaaggaatttgatatattaggctattggaaaatttatgggatacggtaccctactataaggatgatagcccgtgacatatttgatattcctgttacaactgtcgcttcagagtctgcttttagtactagtggcagagtgctaagtgatcatcgaagtcgacttactcccaaaactttagaggttttgatgtgtgcacaaaattggcttcgtgttggtcaagcaaaaggtacaaacaatacatctttaaaattattgtatgtcgttgtaacttgtatgttttgatttcagtttactctcatttgttgtactctcacttattgtaggaaaagaagattatatgggtttgtggacttgtcttgaagatatacaagaagaacttgtggaactctcctttggattctccacaatgccaaatgaagaaatttgaaggaaaattcacaggatgtcaaatgaagttgaatgccattcagccatgctcattacaataatttgttgttgcattttgaaaactatgtatgactataatttcattccaagaacatgttttatgatgtattgtattgtctttgctacttctactacttgctatggactatgtcactatggtgaaatgttgttgtaagcctggaatgttatctatttatgttgttagaatgttgaaattattgtttggaatgttgaaattattgttttggaatgttgaaattattt

SEQ ID NO: 14364 - DNA, 1697 bp, Zea Mays
agacactcgacaaaagactttgtcgagagttttctaggctttgccaagtgcctgaagaactcggtaaaacagatgtgtccggtagtgattgtttatacaagcgaggactacagtcgctgaatgacatcacctcgtcgctgcgaagaggatgtagcccttggagtcctttttttatttgtgcagtgcagcctagaacactctagaggcaaaagagcgatggcttatgttgagaccagaccaatgccgttggatgagaatctcgcatgagaatctcgcggttgatgtgaggtagggtgacatggatgaaccggagggaggatttgcccccactgtgaatataacacatgattggttgtaggtagggatggcagtgggtacggttatgggtaacccgtcgggtacagatatggtggattttcgtatccgcgggtacggatatggatactatatagtatccagggttattaatttcgcggattgtgaatttgtgatgtcaactcccaacgaaaatagcaacactcaatttcaacctccctcatctcaagcatctgttgagggtggaagtgggcttccagagaatgtgattaatgttgaacaagatggtgatgaggatgatgatgaagtagaagaaaatgggagaaaaagaaaattgaaatctgtagtgtggagtgaattcaagagggtaaatgttggagatatttggaaggcaaagtgtaattattgttcaaagaagctttcgggtgtaacaaagaatggtacatctcatttgaaagcccatctagagacatacatctatcgaaagaggaatcctacagataaggtacaaagctctttgtggttcacatctagtagcgaacaaggacaagtgtcggtgaaggagtatgttttcgaccaagatgtggcgagaaaggcccgtcctgaaatggttgttttgcatgaatatccattgtccattgtggatcatgttggttttagaagtagagcaatgctagagatagaaaatgtgaggaaattatttgatgaactgattaaagagtacaacaacaaatgcattaaacctgttactagtggtggacaaaatgcatcatcatcttgtgtttctaatgcttccacatatacggatgagttgttctctgccatggaggaagagctcgatgacatgtgcagtgatgaagaaaaggctaagtctgagcttgatctttatgtggatgaaggtcgtattcccaagtcaaaggaatttgatatattaggctattggaaaatttatgggatacgttactctcatttgttgtactctcacttattgtaggaaaagaagattatatgggtttgtggacttgtcttgaagatatacaagaagaacttgtggaactctcctttggattctccacaatgccaaatgaagaaatttgaaggaaaattcacaggatgtcaaatgaagttgaatgccattcagccatgctcattacaataatttgttgttgcattttgaaaactatgtatgactataatttcattccaagaacatgttttatgatgtattgtattgtctttgctacttctactacttgctatggactatgtcactatggtgaaatgttgttgtaagcctggaatgttatctatttatgttgttagaatgttgaaattattgtttggaatgttgaaattattgttttggaatgttgaaattattt

SEQ ID NO: 14365 - DNA, 1743 bp, Zea Mays
cggcacggcacggcatggcctgcagataatctagtcgagctgatgatcatcgtggatgacgccggggcattcattccggcgatgaaccactccccctgggatggcgtaacggtggccgactttgtcatgcctttcttcctcttcatcgtcggagtcgccctggcgctcgcgtacaagagagttccggacaagttggacgcttcgagaaaggcattgctccgtgcgctgaagctgttttgtcttggtcttgttctacaaggtggattctttcatggtgttcgcagtctaagtttcggggttgatcttcaagaaatacggctgatgggtgtactgcagagaattgcaatagcttatttgctgaccgccctctgtgagatttggatcagaggagatgaagatgtagactatggatacgatttgctcaagcgataccgctaccaactgttcgtaggtgcagtcgtggcaatcacatacatgtccctgttgtacggtacctatgttcctgactgggagtaccagacatcagctcctggttccacagagaagcatctctttgtgaaatgtggagtaagaggtgacaccagcccaggctgcaatgcggttggcatgatcgaccgtaaaatcctgggcatccagcatctctacggccgacctgtttatgcacgatccaagcaatgcagcatcgactcgccacaaaatgggccccttccttctgatgcaccctcttggtgccaggccccttttgaccctgaagggcttcttagttccgtgatggccatcgtcacatgcttgattggactccaatacggacacgtcatagtgcattttcagaaacacagggagaggatgatgaactggctaatcccttccttcagcatgctggtcctagccttcgccatggacttctttggactacacatgaacaagccactgtacaccctgagctacaccttaggcaccgccggcgcggcggggctcctcttctccggaatctacacgctggtcgacatctacgggtaccggcggccgaccgtcgccatggaatggatggggatgcacgcgctgatgatatacgtcctgatcgcttgcaacgtcctgcccatattcatccacggcttctactggaaggagcccaagaacaacctgctgaagttcatcgggattggagcgtgaggcgatggactgacgacggtacacgagtacggatattgtttaggagtctatttggacagagatagagaagcgcgtgcgttcagcaggccaagttttgctacacggccagtgctgcagctgcagcgcatcattgttgctgcacagagcgcctttctctgtgagctcttgtatatatgataaaaaagagtgttgcatataatgacgacacgatttgaaagaaaaaatatatacataatacagtagtatagagatcttacgtgaatgacggtggaaattgtcaccgaactagcaaaattgttccgcgcggggccgcatggggacgaggcgcgcaacaccgttgcacaacctgaatttaatctgaccagatgacattttaacaggtttagtattacaaaacagttactagctatttaaatcctttgctctttataatatatatctatatctgtcattttctgttctgccttttttcgttttctgttttgccctcatcccttgtctggcagtaaaaaatgaaatctgtaagaattatgagtcgaactcaagacctactgctagattagagacaac

SEQ ID NO: 14366 - DNA, 2871 bp, Zea Mays
aaagattcctcttgggcctggctcccgagatacgtaggaattggccatttctccagagtcaggctctgccggtgcaaccattagtctttcctaatgacagattaacgtataattagtgtctattaaataattttaatttatttaaaagtggattaaggctttgtatgacatattatgactattgcaacatgatcacatgaaaatataataaaactttatagcttttaagctcatgcatcaagcatttatgcaagcaaccaaacatcatctcgcataggccatgctaagctcatacaggcaaccaaacatagggatattgcatgctctcggccagactatcaagagccaggttccctagatacgagccaggcccacccatccagacaaccaaacaggccataaatgaaccgatcgagccgagccgacccaagcggagacggtctggaaacgagcgagccatgagacagactatttcgtccggctctacatattctatatattaaccgtgggagcaaggaagaacaaccagaccatccacgtcactatatatttttcagccgtcggatcgagcaacaacggtcctcgaatccttccgccctctccgtggcgctctccgtgtctggacgcttccaggagctacgtagacctcccacggtcccacctctccattcatcgcttccgtgaagctcgagccccatcgacccccgactaaccggcgcttgggcgtagcagttccgaccgctccccccgtgggccgccgtcgccccaccgtctccatgtcagttttcagcgctatccaccatgccctccttcgcccgtcagctcgctgagcagacctcccagataagcaagccctgccgccgtccccggaagccgttgctgcatcgccctcggcaaaggatgtgccgctcctacccgacgcgggaatgcggcactgggccgcgtgcgggcggtttgcgcagtgcagcgggtccttccgcggtgaagtcgaccgggccaccgccgaggccttcctcctcacgaggctcccagtgatcctcctccgctacctcggggttgcagaaactattaatgacgcagttgaatttgttcatcagaatttcatagaaatgaataaactctaggtccgaatgtagcatctggttcgccatcctatatgatactgaaagcaatattggaattgcgtgatccggtaataaccttcatctcctaagtcaaattgaaggcgttgaccttgatacatacaaagaaattgtttttcttaacgatcacgactcgcgcaagccgcgagcacgacactagtgacacatgagctggggacgggagcgagagattatacctaccttcataatgccagtgctgccgttgctgtccgcaaagccatcccctccctgcacgccccctcggcccggtggtgagtggtaggcggccgaagaattccagggtgggtggggagcgcccggaccggagacaaggaagatcgaggcatgaaggacctggtgtcgtgcttcagcgagcacgccgtgcggatctccgacgtggcctgctccggctccggtcccgccaatgcggcggcgggcgccccggaggccggaggaggagggcgggcgccagcggtgagcgcggtgaccaccgcgtaccggtcgcggctgtcggcgtccgggaaggagctgctcatcgacgtgacttggtcatggtctcgggcgcccgacgggcccgcgctctccgtcgccgtccacgaggcggacgccgtctcgcgccaccgcgccgccagcggcgccgcggcgccgcggcacctgcacaagaagaaggggagcgggacgttcacggcgggcagctgcgtggtgggcgtgttctgggactacgccgcggcgcggtacggcgctggctcggggcccgagccgacgtccgggttctacgtcgccgtggtcgccgacgccgagttcgttctcctgctgggcgacctcagccgcgggtacgtggaccgcctgcacgggggcatcccgatcgccgggtcccggatggcgcggcgccgggagcggtttgtcgggtgcgggcgctggtccacgagagcccggttcttggagtccggcgaggagcacgagatcggcgtcgcgctgctggacggcgacgcggaggcgtgggtcaccgtggacggccgcaaggtcgtgcagctccggcggctgcggtggaacttccgcggctgccacaccatcttcctcgacggcggagcgccagtcgacgtgacgtgggacctgcacggctggctcttccacgcgggcgccgagtcgccccaaccgtcctccacttccccctgtgccgtgttcacgttccaggcgcgcggcgcgtcggagacaaagctgtggacggacgacgattgcttcgacgacggagaggaggcggacaagctgccggtgacgccgagcggtcggcaacagaaggcgggaggcggtggggcgtcggggtcggggcaggggttctgcctgctgatccaaggctccaggagcttttccatgagcacttaacctgtacatgccgttagagactttctatcgccattttttttcacttcttgcttggggtttgtgttgggattgattaggaatttaggatagacattcagctggttgactcttgttgattaatctgatgcatgacaaggggtgttgtgattgtgaatagttgggatagtgtcagagagagagagagagaggttgacacacagaattagaaagtgatgttgtctttccagtttgctgcatcgctgtgctgatttcgtacaatgacatgattgtaagttctgctagttacttatcagaaattgagaaacacaccaaagattggatcttacgattactgtttacatctttt

SEQ ID NO: 14367 - DNA, 2075 bp, Zea Mays
agacctcccacggtcccacctctccattcatcgcttccgtgaagctcgagccccatcgacccccgactaaccggcgcttgggcgtagcagttccgaccgctccccccgtgggccgccgtcgccccaccgtctccatgtcagttttcagcgctatccaccatgccctccttcgcccgtcagctcgctgagcagacctcccagataagcaagccctgccgccgtccccggaagccgttgctgcatcgccctcggcaaaggatgtgccgctcctacccgacgcgggaatgcggcactgggccgcgtgcgggcggtttgcgcagtgcagcgggtccttccgcggtgaagtcgaccgggccaccgccgaggccttcctcctcacgaggctcccagtgatcctcctccgctacctcggggttgcagaaactattaatgacgcagttgaatttgttcatcagaatttcatagaaatgaataaactctaggtccgaatgtagcatctggttcgccatcctatatgatactgaaagcaatattggaattgcgtgatccgcataatgccagtgctgccgttgctgtccgcaaagccatcccctccctgcacgccccctcggcccggtggtgagtggtaggcggccgaagaattccagggtgggtggggagcgcccggaccggagacaaggaagatcgaggcatgaaggacctggtgtcgtgcttcagcgagcacgccgtgcggatctccgacgtggcctgctccggctccggtcccgccaatgcggcggcgggcgccccggaggccggaggaggagggcgggcgccagcggtgagcgcggtgaccaccgcgtaccggtcgcggctgtcggcgtccgggaaggagctgctcatcgacgtgacttggtcatggtctcgggcgcccgacgggcccgcgctctccgtcgccgtccacgaggcggacgccgtctcgcgccaccgcgccgccagcggcgccgcggcgccgcggcacctgcacaagaagaaggggagcgggacgttcacggcgggcagctgcgtggtgggcgtgttctgggactacgccgcggcgcggtacggcgctggctcggggcccgagccgacgtccgggttctacgtcgccgtggtcgccgacgccgagttcgttctcctgctgggcgacctcagccgcgggtacgtggaccgcctgcacgggggcatcccgatcgccgggtcccggatggcgcggcgccgggagcggtttgtcgggtgcgggcgctggtccacgagagcccggttcttggagtccggcgaggagcacgagatcggcgtcgcgctgctggacggcgacgcggaggcgtgggtcaccgtggacggccgcaaggtcgtgcagctccggcggctgcggtggaacttccgcggctgccacaccatcttcctcgacggcggagcgccagtcgacgtgacgtgggacctgcacggctggctcttccacgcgggcgccgagtcgccccaaccgtcctccacttccccctgtgccgtgttcacgttccaggcgcgcggcgcgtcggagacaaagctgtggacggacgacgattgcttcgacgacggagaggaggcggacaagctgccggtgacgccgagcggtcggcaacagaaggcgggaggcggtggggcgtcggggtcggggcaggggttctgcctgctgatccaaggctccaggagcttttccatgagcacttaacctgtacatgccgttagagactttctatcgccattttttttcacttcttgcttggggtttgtgttgggattgattaggaatttaggatagacattcagctggttgactcttgttgattaatctgatgcatgacaaggggtgttgtgattgtgaatagttgggatagtgtcagagagagagagagagaggttgacacacagaattagaaagtgatgttgtctttccagtttgctgcatcgctgtgctgatttcgtacaatgacatgattgtaagttctgctagttacttatcagaaattgagaaacacaccaaagattggatcttacgattactgtttacatctttt

SEQ ID NO: 14368 - DNA, 2220 bp, Zea Mays
gctcgagccccatcgacccccgactaaccggcgcttgggcgtagcagttccgaccgctccccccgtgggccgccgtcgccccaccgtctccatgtcagttttcagcgctatccaccatgccctccttcgcccgtcagctcgctgagcagacctcccagataagcaagccctgccgccgtccccggaagccgttgctgcatcgccctcggcaaaggatgtgccgctcctacccgacgcgggaatgcggcactgggccgcgtgcgggcggtttgcgcagtgcagcgggtccttccgcggtgaagtcgaccgggccaccgccgaggccttcctcctcacgaggctcccagtgatcctcctccgctacctcggggttgcagaaactattaatgacgcagttgaatttgttcatcagaatttcatagaaatgaataaactctaggtccgaatgtagcatctggttcgccatcctatatgatactgaaagcaatattggaattgcgtgatccggtaataaccttcatctcctaagtcaaattgaaggcgttgaccttgatacatacaaagaaattgtttttcttaacgatcacgactcgcgcaagccgcgagcacgacactagtgacacatgagctggggacgggagcgagagattatacctaccttgtaagctccagcctattgctcgacaggcttcccacataatgccagtgctgccgttgctgtccgcaaagccatcccctccctgcacgccccctcggcccggtggtgagtggtaggcggccgaagaattccagggtgggtggggagcgcccggaccggagacaaggaagatcgaggcatgaaggacctggtgtcgtgcttcagcgagcacgccgtgcggatctccgacgtggcctgctccggctccggtcccgccaatgcggcggcgggcgccccggaggccggaggaggagggcgggcgccagcggtgagcgcggtgaccaccgcgtaccggtcgcggctgtcggcgtccgggaaggagctgctcatcgacgtgacttggtcatggtctcgggcgcccgacgggcccgcgctctccgtcgccgtccacgaggcggacgccgtctcgcgccaccgcgccgccagcggcgccgcggcgccgcggcacctgcacaagaagaaggggagcgggacgttcacggcgggcagctgcgtggtgggcgtgttctgggactacgccgcggcgcggtacggcgctggctcggggcccgagccgacgtccgggttctacgtcgccgtggtcgccgacgccgagttcgttctcctgctgggcgacctcagccgcgggtacgtggaccgcctgcacgggggcatcccgatcgccgggtcccggatggcgcggcgccgggagcggtttgtcgggtgcgggcgctggtccacgagagcccggttcttggagtccggcgaggagcacgagatcggcgtcgcgctgctggacggcgacgcggaggcgtgggtcaccgtggacggccgcaaggtcgtgcagctccggcggctgcggtggaacttccgcggctgccacaccatcttcctcgacggcggagcgccagtcgacgtgacgtgggacctgcacggctggctcttccacgcgggcgccgagtcgccccaaccgtcctccacttccccctgtgccgtgttcacgttccaggcgcgcggcgcgtcggagacaaagctgtggacggacgacgattgcttcgacgacggagaggaggcggacaagctgccggtgacgccgagcggtcggcaacagaaggcgggaggcggtggggcgtcggggtcggggcaggggttctgcctgctgatccaaggctccaggagcttttccatgagcacttaacctgtacatgccgttagagactttctatcgccattttttttcacttcttgcttggggtttgtgttgggattgattaggaatttaggatagacattcagctggttgactcttgttgattaatctgatgcatgacaaggggtgttgtgattgtgaatagttgggatagtgtcagagagagagagagagaggttgacacacagaattagaaagtgatgttgtctttccagtttgctgcatcgctgtgctgatttcgtacaatgacatgattgtaagttctgctagttacttatcagaaattgagaaacacaccaaagattggatcttacgattactgtttacatctttt

SEQ ID NO: 14369 - DNA, 2098 bp, Zea Mays
gctcgagccccatcgacccccgactaaccggcgcttgggcgtagcagttccgaccgctccccccgtgggccgccgtcgccccaccgtctccatgtcagttttcagcgctatccaccatgccctccttcgcccgtcagctcgctgagcagacctcccagataagcaagccctgccgccgtccccggaagccgttgctgcatcgccctcggcaaaggatgtgccgctcctacccgacgcgggaatgcggcactgggccgcgtgcgggcggtttgcgcagtgcagcgggtccttccgcggtgaagtcgaccgggccaccgccgaggccttcctcctcacgaggctcccagtgatcctcctccgctacctcgggttcgccatcctatatgatactgaaagcaatattggaattgcgtgatccggtaataaccttcatctcctaagtcaaattgaaggcgttgaccttgatacatacaaagaaattgtttttcttaacgatcacgactcgcgcaagccgcgagcacgacactagtgacacatgagctggggacgggagcgagagattatacctaccttcataatgccagtgctgccgttgctgtccgcaaagccatcccctccctgcacgccccctcggcccggtggtgagtggtaggcggccgaagaattccagggtgggtggggagcgcccggaccggagacaaggaagatcgaggcatgaaggacctggtgtcgtgcttcagcgagcacgccgtgcggatctccgacgtggcctgctccggctccggtcccgccaatgcggcggcgggcgccccggaggccggaggaggagggcgggcgccagcggtgagcgcggtgaccaccgcgtaccggtcgcggctgtcggcgtccgggaaggagctgctcatcgacgtgacttggtcatggtctcgggcgcccgacgggcccgcgctctccgtcgccgtccacgaggcggacgccgtctcgcgccaccgcgccgccagcggcgccgcggcgccgcggcacctgcacaagaagaaggggagcgggacgttcacggcgggcagctgcgtggtgggcgtgttctgggactacgccgcggcgcggtacggcgctggctcggggcccgagccgacgtccgggttctacgtcgccgtggtcgccgacgccgagttcgttctcctgctgggcgacctcagccgcgggtacgtggaccgcctgcacgggggcatcccgatcgccgggtcccggatggcgcggcgccgggagcggtttgtcgggtgcgggcgctggtccacgagagcccggttcttggagtccggcgaggagcacgagatcggcgtcgcgctgctggacggcgacgcggaggcgtgggtcaccgtggacggccgcaaggtcgtgcagctccggcggctgcggtggaacttccgcggctgccacaccatcttcctcgacggcggagcgccagtcgacgtgacgtgggacctgcacggctggctcttccacgcgggcgccgagtcgccccaaccgtcctccacttccccctgtgccgtgttcacgttccaggcgcgcggcgcgtcggagacaaagctgtggacggacgacgattgcttcgacgacggagaggaggcggacaagctgccggtgacgccgagcggtcggcaacagaaggcgggaggcggtggggcgtcggggtcggggcaggggttctgcctgctgatccaaggctccaggagcttttccatgagcacttaacctgtacatgccgttagagactttctatcgccattttttttcacttcttgcttggggtttgtgttgggattgattaggaatttaggatagacattcagctggttgactcttgttgattaatctgatgcatgacaaggggtgttgtgattgtgaatagttgggatagtgtcagagagagagagagagaggttgacacacagaattagaaagtgatgttgtctttccagtttgctgcatcgctgtgctgatttcgtacaatgacatgattgtaagttctgctagttacttatcagaaattgagaaacacaccaaagattggatcttacgattactgtttacatctttt

SEQ ID NO: 14370 - DNA, 1361 bp, Zea Mays
gtttaagttctattcaatacgaagaattaaaaattgataaatgtttatcttttacatatctcttaacatatattttagaacatgaattctaatattgttagagcgtctccaagtgatcctaaaaacaaatcttttaatatatggaaattaagatcttcttaagggctcgtttggtagcccatttcctggcggcagggaacctcgtcatttccttgtgccggcagcccactgtgaaatttccacggggacagagattcagtctgtttggaagacagcttcgtgcggatatctgcccatcctaaggcaaatttccgcgtggaaacgcgtccggccttcggacgtcgggcgactttccacttctcgagcacgccacgtctcctctcgcctctcgctcggagtcgctcgagcacgccgacgccccgcttccgctcgcctgagcacgctgccaccttcgctcacctagagtcgcttgacgttgtcgcctccgctcgcctgccgccgctcctctcgcctagaggctggagtcgcctgagcacgtcgccttctctggcctagagtctccgagcatgtcgtcgcctcggtcactccgcctcctcaggcgttactagtctgtggttggggacttgaggcaacagatagcagcaggcagtgaccagtgtcaggattagagaatgttaagtggaaacaacacatgaagctaacatggagaaggatgacagtcgatataagctgctgctgatcagcttgccaagagaggactcctcatccagcagcctgtcctatttgtggtcaggaagaagaatcaatccagcgcctgtgctttccagtgtctttgctcaacaggtttggtttataattttccagtggctgggcctcactgccatgccatcacaccacaatcttccaccggcatattctcaaattggtggtgcaaggtaatgaaggtggtccccaaaggtcgagaaagggcttattatttcactagctggatgcccgtgcgttgcaacgggaatatataataccagtatactacgataacttatatacaaaatctgtattatattgttatgagaaaatgtttcataatcaatttgtgatcctagccatacataaattttgctattttaatctagttatttcaccactacattgcaaccatcagtatcatgcagacttcgatatatgctacgatttgtatggtctcatcattggagagcacgaacacgttccacacatgccgggaaaaattccctcgtacatcgttagtcatcagacacgcaccaccatatgctcttgcttaaacaaaaaggtaagtgtgtatgtgtttgcgaaaaggaattaaaggcaggccggcacaaaag

SEQ ID NO: 14371 - DNA, 1232 bp, Zea Mays
gggctcgtttggtagcccatttcctggcggcagggaacctcgtcatttccttgtgccggcagcccactgtgaaatttccacggggacagagattcagtctgtttggaagacagcttcgtgcggatatctgcccatcctaaggcaaatttccgcgtggaaacgcgtccggccttcggacgtcgggcgactttccacttctcgagcacgccacgtctcctctcgcctctcgctcggagtcgctcgagcacgccgacgccccgcttccgctcgcctgagcacgctgccaccttcgctcacctagagtcgcttgacgttgtcgcctccgctcgcctgccgccgctcctctcgcctagaggctggagtcgcctgagcacgtcgccttctctggcctagagtctccgagcatgtcgtcgcctcggtcactccgcctcctcaggcgttactagtctgtggttggggacttgaggcaacagatagcagcaggcagtgaccagtgtcaggattagagaatgttaagtggaaacaacacatgaagctaacatggagaaggatgacagtcgatataagcaccatacgctgctggcggaggtgttaccgaagagatgagcccctctagagcagaggttgtgcatgaaggcggacgcagcgcgcggcagctccttgcccaggtggaaccccaggcgaccggcgtcgtcctccattttctgtgcaagcaccacggctgcagcagcacgttggagcagtgcccacacaagaagcagcacatatgaaccaagcgcaaggtccattcgcaccaccgttgccacctcttctgccaccgcttctgcaacagtttggtactttcggtcacgacgctggaggattgatatggaagtaggacctttcgggatgatgcctagctccatgcctccgcctccgataagcacgaggacggggccgcgtccttcggagggggattgggagcttcagaagctgcgaactttgtgcagcgggtggggctttttcgcccgcgagaagatggatacagtacagtttgggttgtttttatatttgtcactaaaatctaaattcggatgagaatattaagatatattgtgtcagagaaaatacatactcctaactagcattaagaccctctcaagaatccttgacgaggtatagagatggcaatggagatccgattctcgattctctgcgggtaatttttcgattaggggatggggagagcgaaa

SEQ ID NO: 14372 - DNA, 1237 bp, Zea Mays
gggctcgtttggtagcccatttcctggcggcagggaacctcgtcatttccttgtgccggcagcccactgtgaaatttccacggggacagagattcagtctgtttggaagacagcttcgtgcggatatctgcccatcctaaggcaaatttccgcgtggaaacgcgtccggccttcggacgtcgggcgactttccacttctcgagcacgccacgtctcctctcgcctctcgctcggagtcgctcgagcacgccgacgccccgcttccgctcgcctgagcacgctgccaccttcgctcacctagagtcgcttgacgttgtcgcctccgctcgcctgccgccgctcctctcgcctagaggctggagtcgcctgagcacgtcgccttctctggcctagagtctccgagcatgtcgtcgcctcggtcactccgcctcctcaggcgttactagtctgtggttggggacttgaggcaacagatagcagcaggcagtgaccagtgtcaggattagagaatgttaagtggaaacaacacatgaagctaacatggagaaggatgacagtcgatataagtttagcaccatacgctgctggcggaggtgttaccgaagagatgagcccctctagagcagaggttgtgcatgaaggcggacgcagcgcgcggcagctccttgcccaggtggaaccccaggcgaccggcgtcgtcctccattttctgtgcaagcaccacggctgcagcagcacgttggagcagtgcccacacaagaagcagcacatatgaaccaagcgcaaggtccattcgcaccaccgttgccacctcttctgccaccgcttctgcaacagtttggtactttcggtcacgacgctggaggattgatatggaagtaggacctttcgggatgatgcctagctccatgcctccgcctccgataagcacgaggacggggccgcgtccttcggagggggattgggagcttcagaagctgcgaactttgtgcagcgggtggggctttttcgcccgcgagaagatggatacagtacagtttgggttgtttttatatttgtcactaaaatctaaattcggatgagaatattaagatatattgtgtcagagaaaatacatactcctaactagcattaagaccctctcaagaatccttgacgaggtatagagatggcaatggagatccgattctcgattctctgcgggtaatttttcgattaggggatggggagagcgaaa

SEQ ID NO: 14373 - DNA, 1246 bp, Zea Mays
catttcctggcggcagggaacctcgtcatttccttgtgccggcagcccactgtgaaatttccacggggacagagattcagtctgtttggaagacagcttcgtgcggatatctgcccatcctaaggcaaatttccgcgtggaaacgcgtccggccttcggacgtcgggcgactttccacttctcgagcacgccacgtctcctctcgcctctcgctcggagtcgctcgagcacgccgacgccccgcttccgctcgcctgagcacgctgccaccttcgctcacctagagtcgcttgacgttgtcgcctccgctcgcctgccgccgctcctctcgcctagaggctggagtcgcctgagcacgtcgccttctctggcctagagtctccgagcatgtcgtcgcctcggtcactccgcctcctcaggcgttactagtctgtggttggggacttgaggcaacagatagcagcaggcagtgaccagtgtcaggattagaggtgaggaggccatctgagatttacgtaatgttaagtggaaacaacacatgaagctaacatggagaaggatgacagtcgatataagtttagcaccatacgctgctggcggaggtgttaccgaagagatgagcccctctagagcagaggttgtgcatgaaggcggacgcagcgcgcggcagctccttgcccaggtggaaccccaggcgaccggcgtcgtcctccattttctgtgcaagcaccacggctgcagcagcacgttggagcagtgcccacacaagaagcagcacatatgaaccaagcgcaaggtccattcgcaccaccgttgccacctcttctgccaccgcttctgcaacagtttggtactttcggtcacgacgctggaggattgatatggaagtaggacctttcgggatgatgcctagctccatgcctccgcctccgataagcacgaggacggggccgcgtccttcggagggggattgggagcttcagaagctgcgaactttgtgcagcgggtggggctttttcgcccgcgagaagatggatacagtacagtttgggttgtttttatatttgtcactaaaatctaaattcggatgagaatattaagatatattgtgtcagagaaaatacatactcctaactagcattaagaccctctcaagaatccttgacgaggtatagagatggcaatggagatccgattctcgattctctgcgggtaatttttcgattaggggatggggagagcgaaa

SEQ ID NO: 14374 - DNA, 1217 bp, Zea Mays
gtcatttccttgtgccggcagcccactgtgaaatttccacggggacagagattcagtctgtttggaagacagcttcgtgcggatatctgcccatcctaaggcaaatttccgcgtggaaacgcgtccggccttcggacgtcgggcgactttccacttctcgagcacgccacgtctcctctcgcctctcgctcggagtcgctcgagcacgccgacgccccgcttccgctcgcctgagcacgctgccaccttcgctcacctagagtcgcttgacgttgtcgcctccgctcgcctgccgccgctcctctcgcctagaggctggagtcgcctgagcacgtcgccttctctggcctagagtctccgagcatgtcgtcgcctcggtcactccgcctcctcaggcgttactagtctgtggttggggacttgaggcaacagatagcagcaggcagtgaccagtgtcaggattagaggtgaggaggccatctgagatttacgtaatgttaagtggaaacaacacatgaagctaacatggagaaggatgacagtcgatataagcaccatacgctgctggcggaggtgttaccgaagagatgagcccctctagagcagaggttgtgcatgaaggcggacgcagcgcgcggcagctccttgcccaggtggaaccccaggcgaccggcgtcgtcctccattttctgtgcaagcaccacggctgcagcagcacgttggagcagtgcccacacaagaagcagcacatatgaaccaagcgcaaggtccattcgcaccaccgttgccacctcttctgccaccgcttctgcaacagtttggtactttcggtcacgacgctggaggattgatatggaagtaggacctttcgggatgatgcctagctccatgcctccgcctccgataagcacgaggacggggccgcgtccttcggagggggattgggagcttcagaagctgcgaactttgtgcagcgggtggggctttttcgcccgcgagaagatggatacagtacagtttgggttgtttttatatttgtcactaaaatctaaattcggatgagaatattaagatatattgtgtcagagaaaatacatactcctaactagcattaagaccctctcaagaatccttgacgaggtatagagatggcaatggagatccgattctcgattctctgcgggtaatttttcgattaggggatggggagagcgaaa

SEQ ID NO: 14375 - DNA, 1380 bp, Zea Mays
ccactgtgaaatttccacggggacagagattcagtctgtttggaagacagcttcgtgcggatatctgcccatcctaaggcaaatttccgcgtggaaacgcgtccggccttcggacgtcgggcgactttccacttctcgagcacgccacgtctcctctcgcctctcgctcggagtcgctcgagcacgccgacgccccgcttccgctcgcctgagcacgctgccaccttcgctcacctagagtcgcttgacgttgtcgcctccgctcgcctgccgccgctcctctcgcctagaggctggagtcgcctgagcacgtcgccttctctggcctagagtctccgagcatgtcgtcgcctcggtcactccgcctcctcaggcgttactagtctgtggttggggacttgaggcaacagatagcagcaggcagtgaccagtgtcaggattagaggtgaggaggccatctgagatttacaatgttaagtggaaacaacacatgaagctaacatggagaaggatgacagtcgatataagtttagcaccatacgctgctggcggaggtgttaccgaagagatgagcccctctagagcagaggttgtgcatgaaggcggacgcagcgcgcggcagctccttgcccaggtggaaccccaggcgaccggcgtcgtcctccattttctgtgcaagcaccacggctgcagcagcacgttggagcagtgcccacacaagaagcagcacatatgaaccaagcgcaagctgctgctgatcagcttgccaagagaggactcctcatccagcagcctgtcctatttgtggtcaggaagaagaatcaatccagcgcctgtgctttccagtgtctttgctcaacaggtttggtttataattttccagtggctgggcctcactgccatgccatcacaccacaatcttccaccggcatattctcaaattggtggtgcaaggtaatgaaggtggtccccaaaggtcgagaaagggcttattatttcactagctggatgcccgtgcgttgcaacgggaatatataataccagtatactacgataacttatatacaaaatctgtattatattgttatgagaaaatgtttcataatcaatttgtgatcctagccatacataaattttgctattttaatctagttatttcaccactacattgcaaccatcagtatcatgcagacttcgatatatgctacgatttgtatggtctcatcattggagagcacgaacacgttccacacatgccgggaaaaattccctcgtacatcgttagtcatcagacacgcaccaccatatgctcttgcttaaacaaaaaggtaagtgtgtatgtgtttgcgaaaaggaattaaaggcaggccggcacaaaag

SEQ ID NO: 14376 - DNA, 1011 bp, Zea Mays
cgtcgccgccgaggcgagggagatcgatcgcggtcgcgcctataaataagccccaccacgcagcacgcacccaagaaaaaagcagagcagtggacttggccaagaaaaaagcagagcagtggacttggccatcgatcctcccagctgcctgcccccaccagcaatctccgctgccggccccccttctccttctgctagtcgagtgaccgaccgcggcttccaacggcggaggcaaaggcaaaggcaaagcgcgagcgagcatggacagactgaacgcgaagctgtacctgcagaactgcttcatcatgaaggagaacgagcggctgcgcaagaaggcgctgctgctcaaccaggagaaccaggccctgctcaccgagctcaagcagcggcgcatcgccaaaaccaaaacggcggcgccgcccaaccacagcgccaacgggaatgcggcggcggcagcaggccaccgcgcgccgatcccggacctcaatgccgccgctccgggcccgcgtgcagccggccacgagaaggcggcggcggcggcgtcgcccaacaagccgaagaaggcggtcgccaactgacgcgcggcttcattagttagtcaaaagctgccttgtagttatctttaccggtttgccgccaattctggacgcatgtcaagtcaagaacgccgcctgcttagttgttttagctaatgcatactggagttgcattgcatgcctaatgtaatgatcgagacatatgctgctctgctcccttctggagggatatagctagatcagctagtgtggtatatatacgtagttgggtgtgtctgctgtatgacaggcagtggtgcttaaggagtgagcttcttcttccctgggatctttaggacaagtagagctttctgctgcatgctccatgaggatgtgccaatctaaagcatgcatggtgctaccgtctttttgcatgaaaaactcgagtacagcgtagggtggtgtctaataagtgcagtgcaaaaatatcaaattg

SEQ ID NO: 14377 - DNA, 917 bp, Zea Mays
agtggacttggccaagaaaaaagcagagcagtggacttggccatcgatcctcccagctgcctgcccccaccagcaatctccgctgccggccccccttctccttctgctagtcgagtgaccgaccgcggcttccaacggcggaggcaaaggcaaagcgcgagcgagcatggacagactgaacgcgaagctgtacctgcagaactgcttcatcatgaaggagaacgagcggctgcgcaagaaggcgctgctgctcaaccaggagaaccaggccctgctcaccgagctcaagcagcggcgcatcgccaaaaccaaaacggcggcgccgcccaaccacagcgccaacgggaatgcggcggcggcagcaggccaccgcgcgccgatcccggacctcaatgccgccgctccgggcccgcgtgcagccggccacgagaaggcggcggcggcggcgtcgcccaacaagccgaagaaggcggtcgccaactgacgcgcggcttcattagttagtcaaaagctgccttgtagttatctttaccggtttgccgccaattctggacgcatgtcaagtcaagaacgccgcctgcttagttgttttagctaatgcatactggagttgcattgcatgcctaatgtaatgatcgagacatatgctgctctgctcccttctggagggatatagctagatcagctagtgtggtatatatacgtagttgggtgtgtctgctgtatgacaggcagtggtgcttaaggagtgagcttcttcttccctgggatctttaggacaagtagagctttctgctgcatgctccatgaggatgtgccaatctaaagcatgcatggtgctaccgtctttttgcatgaaaaactcgagtacagcgtagggtggtgtctaataagtgcagtgcaaaaatatcaaattg

SEQ ID NO: 14378 - DNA, 1633 bp, Zea Mays
ccgcccccatgacaggatggtgttggcagaggcagagcccgccgcgtgggtccatcacgagcggaccagacgagggaagcgccgtccagagcacgccgcggcagccggcaggcaggtatggcgattggcgtgggcggtgggcctcgggtgccatgcgccgctacggttaaaagccgagagagccagctgccagcctccgcgcttcagcagcagcggcttccactgtagtcccaagccggcgtgaccattccaaatcttccgcacccatctctcgccgcctcgcctgcaccggagactggccctagtgcccgcgcgcctgcgagatggcaatggcaaccttcacatcatccccagttctctgcagcttcaggaccatcgaacagaagaaggcccctctgctgaacaacagcacaaaacggccgcttcacttgggcttcccaaggagcgtgccgacgtcgccgagcttgagagagaggctagacctgcgcgtcgccgctgtctacaaggtgaagctcctcggccccgaagggcaggagagcgtgctcgacgtgccagaggacagctacatcctggacgctgccgaggaggccggtctcgacctgccctactcctgccgcgccggcgcgtgctccacgtgcgccggcaagctcctggagggctccgtcgaccaggcagaccagtcgttcctcgacgaggcgcaggtcggtgccgggtacgcgctcacctgcgtcgcgtacccgacgtccgactgcgtcatccagacgcacagggaggaagacttgtactagaccgggctggtccccgtgcatggatcaaccttgcacttccattcagattcgatctttgagttattgacactgtccttggcacacgctgttgcggttgcagcttgctagaactaatcgtcgtccagataatttggcatgatgaccaagtgcaggttcttgtgatatgattcttccccgtgctttgttacatctggtctctggatatcaaccaagccccgtcttgaaatcaacctgtcagtttcaggctttcagcttctccctggaaagagacagtcaaacagatgggagctttcagggatgttgctgcggccaatgcagacggcaagcgtttacgtcgccgaaaggccggctgggccggcgggcgcaatgatttggatgctactagacaggaacgtgtcacatgatgaaaactgaaaatacgaaaaaggtcctgcgatcctgataaaacaaggagatgccgcgcagtttgctgttggagacatgaggactcgcaccaagcgatgaaacagaagttgatggagtggatgtatggaatgggaggcgatttgtagcgtagatgcgtaattgtgccaaatgcaagaaagagatatgttattattcaggtgttgtccacttgtacctttgccagattgcctagtcccatgctcgtttggacattggagtactagaacatgaggcgttcatacggacgccctatcaagagaacacaagtgatagtatctccatttgtcgggtaccatataattaggggtaattgtcgggtaccataattagggatactcagatcacaatctaaagtgtctagatgcttgagtaagagaatgtcataagcaaatacgcttcca

SEQ ID NO: 14379 - DNA, 3128 bp, Zea Mays
gtcatggttcctcttcccaccgtccgacgcgaccccagtcgtcaggatcatagtagacgcttccgatcagcttccgtggcctgttccatttccagtccagcacagaaggccctgcccgccgcggcgccgcccactcgttaaaccaccaaaaccaaaacacttcgagacatgcagcttccctgagatctatcgtcacgtcgccagatctaaccaagccccaaatctgcgcgccggcaatggcggtgcgcgcgagcctcgcctgcttcccctccgacccagcgctccacgcggcttgcggcatgccgtggggcgtcgccatcaccccgttctctgccacagatgagcgcggcttcccgccggccaccggcaccgagggccacctcctcccgcgctgccagtcctgcttcgcctacttcaacttgctctgtccgctcgaccgctggtcctggaactgcgccatctgcggcgccgagaatgacctctccgccgacgcagctgcgcgctacgcccgcgacggtggccacgacccgcccgagatgcgctccgcgttcgtcgacctcctcctcccagtggaggagggcgaggcggcagcggcggcggctccgacgcccgtgtacgtggcggcgatcgacttgtcctcttcagaggagttcttggagctagtcaaaagtgctcttcaagctgctcttgaagctcttttgccaggatcactatttggacttttgacatttagcagcaaaataggattgtatgatgtccaaggtccaataccaatcgtgaagaatgtgtttatccctcctgattctgatggtgccttacaagtcgaccttgaagatatcatgcccctttgctcatttttggcttctattgatagctgcaaagaccgcattactgaagcacttgaaacaattaaaccaatgtcttcctgggaagtagcagcaaatgcgcacgatggacaggatcatgtattgcatcacatacgtggttttggtgtagcgttggatgttcttatcaactacctaagttcagaatatggaaatgcatttgagcttgctaggatatttgcgtttttatctggtccacccaattatggggctgggcagctggatataaatgaggaccaaaattctggtaaagcaaggggtgctgatcatatattgcttcaagagcagacaagtttctacagaaatctggctactagtgctgttcaagcaggtgtatgcgtggacctttttgcaattacaaatgaatacactgatcttacttctctgaaagttctgagtgttgagagtggtggatcactgtttctatattccagtacagatgaatcaacacttccacaagatatatacaagatgttgagtcgtccttatgcttttggatgtgtaatgcgattgagaacatcgtcgcagttcaagattgttgattcttatggccatttcttcccagacccccagtacatgcatgttcagcacataaattgttgcgactcttttgctacatacagttatgactttgagtttgaaaaggattcccaattttccaggaagtcaagccctcccattattcaaattgcatttaagtacactgtgcttgtgcacaatggtgatatatcagatcttccaaattctgggtgcagatttaaatacttgttagaaaggaggctaagagtgcggactatccagtacaacacaactgctaatatctgggacctttacgattttgttgatccagatgttgttttgacaatattggtacaccaggttattttggcttctttaagtgatgcactggaaacaaggctgtggctccaagattggttggtggttgtcatcgctcagtacaacaaagcatacaagaatgtcacatctggaggtggtactgagatttataatattgatgtcaatttctcacactgctcgcaactgcagcctttgtcacggtttgtgtttgctattctgttgagccccctgcttcaagtcagcagtgaaggcattcatccagattatgtgacatatttgcaatgcctcttgagtgcactggagccagcttcgcttcggcaggctatttggcctacgttgatttcatactcctcccccgatgtagaagcagaagtacatcaatcactaagccggactgtgttcaccagtgagaggccaatatatattcttgatgcatacaaagaccttctggtgtattactcacctacagctagtagcgaaatcccttttcctcctccacgaaactgtctactgagatcaacagtcgatagactaaaacaagaaaggaatataacacccaaactggttttcattcacggagcacatgatgacactacagaatttgagaaataccttgttgaggatcagaccttggatgggtccccgttatctagctccacaggtttcagctcattccttgatgaggttagaagtaaagtggctgagcatggcatttgaggaccagtgtcacctgtctcccgattgctggactgtgatgttaaacgggtgatgactgatgacccatgcaacccagaaatactgtcatgaatagaaagagtaagtgctttgctggtttaccggcaaacgtttttgtatgtgtgccgtgtgtttgatggatgctgttcgccatttttttaccgacagctagatgaattttaaagctttcctttacaagaccgcgctatatgtttttgtaatatccatgcgctactatgtttttttgggtacattgcctgttgctaaactatgcatttgctatatacattgctgaaaaacccgttcattatatttctagattgctctatagttcgaatgcttttggtaccattttcggtgtttggtgttgcaatgtactgttttgtccttgtttttcttaggtttctggcgctacctcagacatttgctacctgatgatcttgaacgcaccaaccaatctcgattttgtattagttagacgtttgctacatgaaaaggaattctgaagcgaatacattcatttcggcagaaagcctgaaggcacgtatacaactcaactactgcatcctgcatgtataaaaagtctgtgtgtgtgggaggggggaatgtaaggatgtgcttctttctcatgtgtgggaaaattgttaaaac

SEQ ID NO: 14380 - DNA, 2808 bp, Zea Mays
gtcatggttcctcttcccaccgtccgacgcgaccccagtcgtcaggatcatagtagacgcttccgatcagcttccgtggcctgttccatttccagtccagcacagaaggccctgcccgccgcggcgccgcccactcgttaaaccaccaaaaccaaaacacttcgagacatgcagcttccctgagatctatcgtcacgtcgccagatctaaccaagccccaaatctgcgcgccggcaatggcggtgcgcgcgagcctcgcctgcttcccctccgacccagcgctccacgcggcttgcggcatgccgtggggcgtcgccatcaccccgttctctgccacagatgagcgcggcttcccgccggccaccggcaccgagggccacctcctcccgcgctgccagtcctgcttcgcctacttcaacttgctctgtccgctcgaccgctggtcctggaactgcgccatctgcggcgccgagaatgacctctccgccgacgcagctgcgcgctacgcccgcgacggtggccacgacccgcccgagatgcgctccgcgttcgtcgacctcctcctcccagtggaggagggcgaggcggcagcggcggcggctccgacgcccgtgtacgtggcggcgatcgacttgtcctcttcagaggagttcttggagctagtcaaaagtgctcttcaagctgctcttgaagctcttttgccaggatcactatttggacttttgacatttagcagcaaaataggattgtatgatgtccaaggtccaataccaatcgtgaagaatgtgtttatccctcctgattctgatggtgccttacaagtcgaccttgaagatatcatgcccctttgctcatttttggcttctattgatagctgcaaagaccgcattactgaagcacttgaaacaattaaaccaatgtcttcctgggaagtagcagcaaatgcgcacgatggacaggatcatgtattgcatcacatacgtggttttggtgtagcgttggatgttcttatcaactacctaagttcagaatatggaaatgcatttgagcttgctaggatatttgcgtttttatctggtccacccaattatggggctgggcagctggatataaatgaggaccaaaattctggtaaagcaaggggtgctgatcatatattgcttcaagagcagacaagtttctacagaaatctggctactagtgctgttcaagcaggtgtatgcgtggacctttttgcaattacaaatgaatacactgatcttacttctctgaaagttctgagtgttgagagtggtggatcactgtttctatattccagtacagatgaatcaacacttccacaagatatatacaagatgttgagtcgtccttatgcttttggatgtgtaatgcgattgagaacatcgtcgcagttcaagattgttgattcttatggccatttcttcccagacccccagtacatgcatgttcagcacataaattgttgcgactcttttgctacatacagttatgactttgagtttgaaaaggattcccaattttccaggaagtcaagccctcccattattcaaattgcatttaagtacactgtgcttgtgcacaatggtgatatatcagatcttccaaattctgggtgcagatttaaatacttgttagaaaggaggctaagagtgcggactatccagtacaacacaactgctaatatctgggacctttacgattttgttgatccagatgttgttttgacaatattggtacaccaggttattttggcttctttaagtgatgcactggaaacaaggctgtggctccaagattggttggtggttgtcatcgctcagtacaacaaagcatacaagaatgtcacatctggaggtggtactgagatttataatattgatgtcaatttctcacactgctcgcaactgcagcctttgtcacggtttgtgtttgctattctgttgagccccctgcttcaagtcagcagtgaaggcattcatccagattatgtgacatatttgcaatgcctcttgagtgcactggagccagcttcgcttcggcaggctatttggcctacgttgatttcatactcctcccccgatgtagaagcagaagtacatcaatcactaagccggactgtgttcaccagtgagaggccaatatatattcttgatgcatacaaagaccttctggtgtattactcacctacagctagtagcgaaatcccttttcctcctccacgaaactgtctactgagatcaacagtcgatagactaaaacaagaaaggaatataacacccaaactggttttcattcacggagcacatgatgacactacagaatttgagaaataccttgttgaggatcagaccttggatgggtccccgttatctagctccacaggtttcagctcattccttgatgaggttagaagtaaagtggctgagcatggcatttgaggaccagtgtcacctgtctcccgattgctggactgtgatgttaaacgggtgatgactgatgacccatgcaacccagaaatactgtcatgaatagaaagagtttctggcgctacctcagacatttgctacctgatgatcttgaacgcaccaaccaatctcgattttgtattagttagacgtttgctacatgaaaaggaattctgaagcgaatacattcatttcggcagaaagcctgaaggcacgtatacaactcaactactgcatcctgcatgtataaaaagtctgtgtgtgtgggaggggggaatgtaaggatgtgcttctttctcatgtgtgggaaaattgttaaaac

SEQ ID NO: 14381 - DNA, 3024 bp, Zea Mays
gttccatttccagtccagcacagaaggccctgcccgccgcggcgccgcccactcgttaaaccaccaaaaccaaaacacttcgagacatgcagcttccctgagatctatcgtcacgtcgccagatctaaccaagccccaaatctgcgcgccggcaatggcggtgcgcgcgagcctcgcctgcttcccctccgacccagcgctccacgcggcttgcggcatgccgtggggcgtcgccatcaccccgttctctgccacagatgagcgcggcttcccgccggccaccggcaccgagggccacctcctcccgcgctgccagtcctgcttcgcctacttcaacttgctctgtccgctcgaccgctggtcctggaactgcgccatctgcggcgccgagaatgacctctccgccgacgcagctgcgcgctacgcccgcgacggtggccacgacccgcccgagatgcgctccgcgttcgtcgacctcctcctcccagtggaggagggcgaggcggcagcggcggcggctccgacgcccgtgtacgtggcggcgatcgacttgtcctcttcagaggagttcttggagctagtcaaaagtgctcttcaagctgctcttgaagctcttttgccaggatcactatttggacttttgacatttagcagcaaaataggattgtatgatgtccaaggtccaataccaatcgtgaagaatgtgtttatccctcctgattctgatggtgccttacaagtcgaccttgaagatatcatgcccctttgctcatttttggcttctattgatagctgcaaagaccgcattactgaagcacttgaaacaattaaaccaatgtcttcctgggaagtagcagcaaatgcgcacgatggacaggatcatgtattgcatcacatacgtggttttggtgtagcgttggatgttcttatcaactacctaagttcagaatatggaaatgcatttgagcttgctaggatatttgcgtttttatctggtccacccaattatggggctgggcagctggatataaatgaggaccaaaattctggtaaagcaaggggtgctgatcatatattgcttcaagagcagacaagtttctacagaaatctggtgtatgcgtggacctttttgcaattacaaatgaatacactgatcttacttctctgaaagttctgagtgttgagagtggtggatcactgtttctatattccagtacagatgaatcaacacttccacaagatatatacaagatgttgagtcgtccttatgcttttggatgtgtaatgcgattgagaacatcgtcgcagttcaagattgttgattcttatggccatttcttcccagacccccagtacatgcatgttcagcacataaattgttgcgactcttttgctacatacagttatgactttgagtttgaaaaggattcccaattttccaggaagtcaagccctcccattattcaaattgcatttaagtacactgtgcttgtgcacaatggtgatatatcagatcttccaaattctgggtgcagatttaaatacttgttagaaaggaggctaagagtgcggactatccagtacaacacaactgctaatatctgggacctttacgattttgttgatccagatgttgttttgacaatattggtacaccaggttattttggcttctttaagtgatgcactggaaacaaggctgtggctccaagattggttggtggttgtcatcgctcagtacaacaaagcatacaagaatgtcacatctggaggtggtactgagatttataatattgatgtcaatttctcacactgctcgcaactgcagcctttgtcacggtttgtgtttgctattctgttgagccccctgcttcaagtcagcagtgaaggcattcatccagattatgtgacatatttgcaatgcctcttgagtgcactggagccagcttcgcttcggcaggctatttggcctacgttgatttcatactcctcccccgatgtagaagcagaagtacatcaatcactaagccggactgtgttcaccagtgagaggccaatatatattcttgatgcatacaaagaccttctggtgtattactcacctacagctagtagcgaaatcccttttcctcctccacgaaactgtctactgagatcaacagtcgatagactaaaacaagaaaggaatataacacccaaactggttttcattcacggagcacatgatgacactacagaatttgagaaataccttgttgaggatcagaccttggatgggtccccgttatctagctccacaggtttcagctcattccttgatgaggttagaagtaaagtggctgagcatggcatttgaggaccagtgtcacctgtctcccgattgctggactgtgatgttaaacgggtgatgactgatgacccatgcaacccagaaatactgtcatgaatagaaagagtaagtgctttgctggtttaccggcaaacgtttttgtatgtgtgccgtgtgtttgatggatgctgttcgccatttttttaccgacagctagatgaattttaaagctttcctttacaagaccgcgctatatgtttttgtaatatccatgcgctactatgtttttttgggtacattgcctgttgctaaactatgcatttgctatatacattgctgaaaaacccgttcattatatttctagattgctctatagttcgaatgcttttggtaccattttcggtgtttggtgttgcaatgtactgttttgtccttgtttttcttaggtttctggcgctacctcagacatttgctacctgatgatcttgaacgcaccaaccaatctcgattttgtattagttagacgtttgctacatgaaaaggaattctgaagcgaatacattcatttcggcagaaagcctgaaggcacgtatacaactcaactactgcatcctgcatgtataaaaagtctgtgtgtgtgggaggggggaatgtaaggatgtgcttctttctcatgtgtgggaaaattgttaaaac

SEQ ID NO: 14382 - DNA, 2598 bp, Zea Mays
ttccagtccagcacagaaggccctgcccgccgcggcgccgcccactcgttaaaccaccaaaaccaaaacacttcgagacatgcagcttccctgagatctatcgtcacgtcgccagatctaaccaagccccaaatctgcgcgccggcaatggcggtgcgcgcgagcctcgcctgcttcccctccgacccagcgctccacgcggcttgcggcatgccgtggggcgtcgccatcaccccgttctctgccacagatgagcgcggcttcccgccggccaccggcaccgagggccacctcctcccgcgctgccagtcctgcttcgcctacttcaacttgctctgtccgctcgaccgctggtcctggaactgcgccatctgcggcgccgagaatgacctctccgccgacgcagctgcgcgctacgcccgcgacggtggccacgacccgcccgagatgcgctccgcgttcgtcgacctcctcctcccagtggaggagggcgaggcggcagcggcggcggctccgacgcccgtgtacgtggcggcgatcgacttgtcctcttcagaggagttcttggagctagtcaaaagtgctcttcaagctgctcttgaagctcttttgccaggatcactatttggacttttgacatttagcagcaaaataggattgtatgatgtccaaggtccaataccaatcgtgaagaatgtgtttatccctcctgattctgatggtgccttacaagtcgaccttgaagatatcatgcccctttgctcatttttggcttctattgatagctgcaaagaccgcattactgaagcacttgaaacaattaaaccaatgtcttcctgggaagtagcagcaaatgcgcacgatggacaggatcatgtattgcatcacatacgtggttttggtgtagcgttggatgttcttatcaactacctaagttcagaatatggaaatgcatttgagcttgctaggatatttgcgtttttatctggtccacccaattatggggctgggcagctggatataaatgaggaccaaaattctggtaaagcaaggggtgctgatcatatattgcttcaagagcagacaagtttctacagaaatctggtgtatgcgtggacctttttgcaattacaaatgaatacactgatcttacttctctgaaagttctgagtgttgagagtggtggatcactgtttctatattccagtacagatgaatcaacacttccacaagatatatacaagatgttgagtcgtccttatgcttttggatgtgtaatgcgattgagaacatcgtcgcagttcaagattgttgattcttatggccatttcttcccagacccccagtacatgcatgttcagcacataaattgttgcgactcttttgctacatacagttatgactttgagtttgaaaaggattcccaattttccaggaagtcaagccctcccattattcaaattgcatttaagtacactgtgcttgtgcacaatggtgatatatcagatcttccaaattctgggtgcagatttaaatacttgttagaaaggaggctaagagtgcggactatccagtacaacacaactgctaatatctgggacctttacgattttgttgatccagatgttgttttgacaatattggtacaccaggttattttggcttctttaagtgatgcactggaaacaaggctgtggctccaagattggttggtggttgtcatcgctcagtacaacaaagcatacaagaatgtcacatctggaggtggtactgagatttataatattgatgtcaatttctcacactgctcgcaactgcagcctttgtcacggtttgtgtttgctattctgttgagccccctgcttcaagtcagcagtgaaggcattcatccagattatgtgacatatttgcaatgcctcttgagtgcactggagccagcttcgcttcggcaggctatttggcctacgttgatttcatactcctcccccgatgtagaagcagaagtacatcaatcactaagccggactgtgttcaccagtctactgagatcaacagtcgatagactaaaacaagaaaggaatataacacccaaactggttttcattcacggagcacatgatgacactacagaatttgagaaataccttgttgaggatcagaccttggatgggtccccgttatctagctccacaggtttcagctcattccttgatgaggttagaagtaaagtggctgagcatggcatttgaggaccagtgtcacctgtctcccgattgctggactgtgatgttaaacgggtgatgactgatgacccatgcaacccagaaatactgtcatgaatagaaagagtttctggcgctacctcagacatttgctacctgatgatcttgaacgcaccaaccaatctcgattttgtattagttagacgtttgctacatgaaaaggaattctgaagcgaatacattcatttcggcagaaagcctgaaggcacgtatacaactcaactactgcatcctgcatgtataaaaagtctgtgtgtgtgggaggggggaatgtaaggatgtgcttctttctcatgtgtgggaaaattgttaaaac

SEQ ID NO: 14383 - DNA, 2893 bp, Zea Mays
ttccagtccagcacagaaggccctgcccgccgcggcgccgcccactcgttaaaccaccaaaaccaaaacacttcgagacatgcagcttccctgagatctatcgtcacgtcgccagatctaaccaagccccaaatctgcgcgccggcaatggcggtgcgcgcgagcctcgcctgcttcccctccgacccagcgctccacgcggcttgcggcatgccgtggggcgtcgccatcaccccgttctctgccacagatgagcgcggcttcccgccggccaccggcaccgagggccacctcctcccgcgctgccagtcctgcttcgcctacttcaacttgctctgtccgctcgaccgctggtcctggaactgcgccatctgcggcgccgagaatgacctctccgccgacgcagctgcgcgctacgcccgcgacggtggccacgacccgcccgagatgcgctccgcgttcgtcgacctcctcctcccagtggaggagggcgaggcggcagcggcggcggctccgacgcccgtgtacgtggcggcgatcgacttgtcctcttcagaggagttcttggagctagtcaaaagtgctcttcaagctgctcttgaagctcttttgccaggatcactatttggacttttgacatttagcagcaaaataggattgtatgatgtccaaggtccaataccaatcgtgaagaatgtgtttatccctcctgattctgatggtgccttacaagtcgaccttgaagatatcatgcccctttgctcatttttggcttctattgatagctgcaaagaccgcattactgaagcacttgaaacaattaaaccaatgtcttcctgggaagtagcagcaaatgcgcacgatggacaggatcatgtattgcatcacatacgtggttttggtgtagcgttggatgttcttatcaactacctaagttcagaatatggaaatgcatttgagcttgctaggatatttgcgtttttatctggtccacccaattatggggctgggcagctggatataaatgaggaccaaaattctggtaaagcaaggggtgctgatcatatattgcttcaagagcagacaagtttctacagaaatctggtgtatgcgtggacctttttgcaattacaaatgaatacactgatcttacttctctgaaagttctgagtgttgagagtggtggatcactgtttctatattccagtacagatgaatcaacacttccacaagatatatacaagatgttgagtcgtccttatgcttttggatgtgtaatgcgattgagaacatcgtcgcagttcaagattgttgattcttatggccatttcttcccagacccccagtacatgcatgttcagcacataaattgttgcgactcttttgctacatacagttatgactttgagtttgaaaaggattcccaattttccaggaagtcaagccctcccattattcaaattgcatttaagtacactgtgcttgtgcacaatggtgatatatcagatcttccaaattctgggtgcaggttattttggcttctttaagtgatgcactggaaacaaggctgtggctccaagattggttggtggttgtcatcgctcagtacaacaaagcatacaagaatgtcacatctggaggtggtactgagatttataatattgatgtcaatttctcacactgctcgcaactgcagcctttgtcacggtttgtgtttgctattctgttgagccccctgcttcaagtcagcagtgaaggcattcatccagattatgtgacatatttgcaatgcctcttgagtgcactggagccagcttcgcttcggcaggctatttggcctacgttgatttcatactcctcccccgatgtagaagcagaagtacatcaatcactaagccggactgtgttcaccagtgagaggccaatatatattcttgatgcatacaaagaccttctggtgtattactcacctacagctagtagcgaaatcccttttcctcctccacgaaactgtctactgagatcaacagtcgatagactaaaacaagaaaggaatataacacccaaactggttttcattcacggagcacatgatgacactacagaatttgagaaataccttgttgaggatcagaccttggatgggtccccgttatctagctccacaggtttcagctcattccttgatgaggttagaagtaaagtggctgagcatggcatttgaggaccagtgtcacctgtctcccgattgctggactgtgatgttaaacgggtgatgactgatgacccatgcaacccagaaatactgtcatgaatagaaagagtaagtgctttgctggtttaccggcaaacgtttttgtatgtgtgccgtgtgtttgatggatgctgttcgccatttttttaccgacagctagatgaattttaaagctttcctttacaagaccgcgctatatgtttttgtaatatccatgcgctactatgtttttttgggtacattgcctgttgctaaactatgcatttgctatatacattgctgaaaaacccgttcattatatttctagattgctctatagttcgaatgcttttggtaccattttcggtgtttggtgttgcaatgtactgttttgtccttgtttttcttaggtttctggcgctacctcagacatttgctacctgatgatcttgaacgcaccaaccaatctcgattttgtattagttagacgtttgctacatgaaaaggaattctgaagcgaatacattcatttcggcagaaagcctgaaggcacgtatacaactcaactactgcatcctgcatgtataaaaagtctgtgtgtgtgggaggggggaatgtaaggatgtgcttctttctcatgtgtgggaaaattgttaaaac

SEQ ID NO: 14384 - DNA, 2697 bp, Zea Mays
ttccagtccagcacagaaggccctgcccgccgcggcgccgcccactcgttaaaccaccaaaaccaaaacacttcgagacatgcagcttccctgagatctatcgtcacgtcgccagatctaaccaagccccaaatctgcgcgccggcaatggcggtgcgcgcgagcctcgcctgcttcccctccgacccagcgctccacgcggcttgcggcatgccgtggggcgtcgccatcaccccgttctctgccacagatgagcgcggcttcccgccggccaccggcaccgagggccacctcctcccgcgctgccagtcctgcttcgcctacttcaacttgctctgtccgctcgaccgctggtcctggaactgcgccatctgcggcgccgagaatgacctctccgccgacgcagctgcgcgctacgcccgcgacggtggccacgacccgcccgagatgcgctccgcgttcgtcgacctcctcctcccagtggaggagggcgaggcggcagcggcggcggctccgacgcccgtgtacgtggcggcgatcgacttgtcctcttcagaggagttcttggagctagtcaaaagtgctcttcaagctgctcttgaagctcttttgccaggatcactatttggacttttgacatttagcagcaaaataggattgtatgatgtccaaggtccaataccaatcgtgaagaatgtgtttatccctcctgattctgatggtgccttacaagtcgaccttgaagatatcatgcccctttgctcatttttggcttctattgatagctgcaaagaccgcattactgaagcacttgaaacaattaaaccaatgtcttcctgggaagtagcagcaaatgcgcacgatggacaggatcatgtattgcatcacatacgtggttttggtgtagcgttggatgttcttatcaactacctaagttcagaatatggaaatgcatttgagcttgctaggatatttgcgtttttatctggtccacccaattatggggctgggcagctggatataaatgaggaccaaaattctggtaaagcaaggggtgctgatcatatattgcttcaagagcagacaagtttctacagaaatctggtgtatgcgtggacctttttgcaattacaaatgaatacactgatcttacttctctgaaagttctgagtgttgagagtggtggatcactgtttctatattccagtacagatgaatcaacacttccacaagatatatacaagatgttgagtcgtccttatgcttttggatgtgtaatgcgattgagaacatcgtcgcagttcaagattgttgattcttatggccatttcttcccagacccccagtacatgcatgttcagcacataaattgttgcgactcttttgctacatacagttatgactttgagtttgaaaaggattcccaattttccaggaagtcaagccctcccattattcaaattgcatttaagtacactgtgcttgtgcacaatggtgatatatcagatcttccaaattctgggtgcagatttaaatacttgttagaaaggaggctaagagtgcggactatccagtacaacacaactgctaatatctgggacctttacgattttgttgatccagatgttgttttgacaatattggtacaccaggttattttggcttctttaagtgatgcactggaaacaaggctgtggctccaagattggttggtggttgtcatcgctcagtacaacaaagcatacaagaatgtcacatctggaggtggtactgagatttataatattgatgtcaatttctcacactgctcgcaactgcagcctttgtcacggtttgtgtttgctattctgttgagccccctgcttcaagtcagcagtgaaggcattcatccagattatgtgacatatttgcaatgcctcttgagtgcactggagccagcttcgcttcggcaggctatttggcctacgttgatttcatactcctcccccgatgtagaagcagaagtacatcaatcactaagccggactgtgttcaccagtgagaggccaatatatattcttgatgcatacaaagaccttctggtgtattactcacctacagctagtagcgaaatcccttttcctcctccacgaaactgtctactgagatcaacagtcgatagactaaaacaagaaaggaatataacacccaaactggttttcattcacggagcacatgatgacactacagaatttgagaaataccttgttgaggatcagaccttggatgggtccccgttatctagctccacaggtttcagctcattccttgatgaggttagaagtaaagtggctgagcatggcatttgaggaccagtgtcacctgtctcccgattgctggactgtgatgttaaacgggtgatgactgatgacccatgcaacccagaaatactgtcatgaatagaaagagtttctggcgctacctcagacatttgctacctgatgatcttgaacgcaccaaccaatctcgattttgtattagttagacgtttgctacatgaaaaggaattctgaagcgaatacattcatttcggcagaaagcctgaaggcacgtatacaactcaactactgcatcctgcatgtataaaaagtctgtgtgtgtgggaggggggaatgtaaggatgtgcttctttctcatgtgtgggaaaattgttaaaac

SEQ ID NO: 14385 - DNA, 2915 bp, Zea Mays
ttccagtccagcacagaaggccctgcccgccgcggcgccgcccactcgttaaaccaccaaaaccaaaacacttcgagacatgcagcttccctgagatctatcgtcacgtcgccagatctaaccaagccccaaatctgcgcgccggcaatggcggtgcgcgcgagcctcgcctgcttcccctccgacccagcgctccacgcggcttgcggcatgccgtggggcgtcgccatcaccccgttctctgccacagatgagcgcggcttcccgccggccaccggcaccgagggccacctcctcccgcgctgccagtcctgcttcgcctacttcaacttgctctgtccgctcgaccgctggtcctggaactgcgccatctgcggcgccgagaatgacctctccgccgacgcagctgcgcgctacgcccgcgacggtggccacgacccgcccgagatgcgctccgcgttcgtcgacctcctcctcccagtggaggagggcgaggcggcagcggcggcggctccgacgcccgtgtacgtggcggcgatcgacttgtcctcttcagaggagttcttggagctagtcaaaagtgctcttcaagctgctcttgaagctcttttgccaggatcactatttggacttttgacatttagcagcaaaataggattgtatgatgtccaaggtccaataccaatcgtgaagaatgtgtttatccctcctgattctgatggtgccttacaagtcgaccttgaagatatcatgcccctttgctcatttttggcttctattgatagctgcaaagaccgcattactgaagcacttgaaacaattaaaccaatgtcttcctgggaagtagcagcaaatgcgcacgatggacaggatcatgtattgcatcacatacgtggttttggtgtagcgttggatgttcttatcaactacctaagttcagaatatggaaatgcatttgagcttgctaggatatttgcgtttttatctggtccacccaattatggggctgggcagctggatataaatgaggaccaaaattctggtaaagcaaggggtgctgatcatatattgcttcaagagcagacaagtttctacagaaatctggctactagtgctgttcaagcaggtgtatgcgtggacctttttgcaattacaaatgaatacactgatcttacttctctgaaagttctgagtgttgagagtggtggatcactgtttctatattccagtacagatgaatcaacacttccacaagatatatacaagatgttgagtcgtccttatgcttttggatgtgtaatgcgattgagaacatcgtcgcagttcaagattgttgattcttatggccatttcttcccagacccccagtacatgcatgttcagcacataaattgttgcgactcttttgctacatacagttatgactttgagtttgaaaaggattcccaattttccaggaagtcaagccctcccattattcaaattgcatttaagtacactgtgcttgtgcacaatggtgatatatcagatcttccaaattctgggtgcaggttattttggcttctttaagtgatgcactggaaacaaggctgtggctccaagattggttggtggttgtcatcgctcagtacaacaaagcatacaagaatgtcacatctggaggtggtactgagatttataatattgatgtcaatttctcacactgctcgcaactgcagcctttgtcacggtttgtgtttgctattctgttgagccccctgcttcaagtcagcagtgaaggcattcatccagattatgtgacatatttgcaatgcctcttgagtgcactggagccagcttcgcttcggcaggctatttggcctacgttgatttcatactcctcccccgatgtagaagcagaagtacatcaatcactaagccggactgtgttcaccagtgagaggccaatatatattcttgatgcatacaaagaccttctggtgtattactcacctacagctagtagcgaaatcccttttcctcctccacgaaactgtctactgagatcaacagtcgatagactaaaacaagaaaggaatataacacccaaactggttttcattcacggagcacatgatgacactacagaatttgagaaataccttgttgaggatcagaccttggatgggtccccgttatctagctccacaggtttcagctcattccttgatgaggttagaagtaaagtggctgagcatggcatttgaggaccagtgtcacctgtctcccgattgctggactgtgatgttaaacgggtgatgactgatgacccatgcaacccagaaatactgtcatgaatagaaagagtaagtgctttgctggtttaccggcaaacgtttttgtatgtgtgccgtgtgtttgatggatgctgttcgccatttttttaccgacagctagatgaattttaaagctttcctttacaagaccgcgctatatgtttttgtaatatccatgcgctactatgtttttttgggtacattgcctgttgctaaactatgcatttgctatatacattgctgaaaaacccgttcattatatttctagattgctctatagttcgaatgcttttggtaccattttcggtgtttggtgttgcaatgtactgttttgtccttgtttttcttaggtttctggcgctacctcagacatttgctacctgatgatcttgaacgcaccaaccaatctcgattttgtattagttagacgtttgctacatgaaaaggaattctgaagcgaatacattcatttcggcagaaagcctgaaggcacgtatacaactcaactactgcatcctgcatgtataaaaagtctgtgtgtgtgggaggggggaatgtaaggatgtgcttctttctcatgtgtgggaaaattgttaaaac

SEQ ID NO: 14386 - DNA, 3017 bp, Zea Mays
ttccagtccagcacagaaggccctgcccgccgcggcgccgcccactcgttaaaccaccaaaaccaaaacacttcgagacatgcagcttccctgagatctatcgtcacgtcgccagatctaaccaagccccaaatctgcgcgccggcaatggcggtgcgcgcgagcctcgcctgcttcccctccgacccagcgctccacgcggcttgcggcatgccgtggggcgtcgccatcaccccgttctctgccacagatgagcgcggcttcccgccggccaccggcaccgagggccacctcctcccgcgctgccagtcctgcttcgcctacttcaacttgctctgtccgctcgaccgctggtcctggaactgcgccatctgcggcgccgagaatgacctctccgccgacgcagctgcgcgctacgcccgcgacggtggccacgacccgcccgagatgcgctccgcgttcgtcgacctcctcctcccagtggaggagggcgaggcggcagcggcggcggctccgacgcccgtgtacgtggcggcgatcgacttgtcctcttcagaggagttcttggagctagtcaaaagtgctcttcaagctgctcttgaagctcttttgccaggatcactatttggacttttgacatttagcagcaaaataggattgtatgatgtccaaggtccaataccaatcgtgaagaatgtgtttatccctcctgattctgatggtgccttacaagtcgaccttgaagatatcatgcccctttgctcatttttggcttctattgatagctgcaaagaccgcattactgaagcacttgaaacaattaaaccaatgtcttcctgggaagtagcagcaaatgcgcacgatggacaggatcatgtattgcatcacatacgtggttttggtgtagcgttggatgttcttatcaactacctaagttcagaatatggaaatgcatttgagcttgctaggatatttgcgtttttatctggtccacccaattatggggctgggcagctggatataaatgaggaccaaaattctggtaaagcaaggggtgctgatcatatattgcttcaagagcagacaagtttctacagaaatctgtgctgttcaagcaggtgtatgcgtggacctttttgcaattacaaatgaatacactgatcttacttctctgaaagttctgagtgttgagagtggtggatcactgtttctatattccagtacagatgaatcaacacttccacaagatatatacaagatgttgagtcgtccttatgcttttggatgtgtaatgcgattgagaacatcgtcgcagttcaagattgttgattctgtaaatactctgagggatatgtgaactacctaaatcagcttcttcacatgtagctatgtctgatgtgtttttttttgttcaacagtatggccatttcttcccagacccccagtacatgcatgttcagcacataaattgttgcgactcttttgctacatacagttatgactttgagtttgaaaaggattcccaattttccaggaagtcaagccctcccattattcaaattgcatttaagtacactgtgcttgtgcacaatggtgatatatcagatcttccaaattctgggtgcagatttaaatacttgttagaaaggaggctaagagtgcggactatccagtacaacacaactgctaatatctgggacctttacgattttgttgatccagatgttgttttgacaatattggtacaccaggttattttggcttctttaagtgatgcactggaaacaaggctgtggctccaagattggttggtggttgtcatcgctcagtacaacaaagcatacaagaatgtcacatctggaggtggtactgagatttataatattgatgtcaatttctcacactgctcgcaactgcagcctttgtcacggtttgtgtttgctattctgttgagccccctgcttcaagtcagcagtgaaggcattcatccagattatgtgacatatttgcaatgcctcttgagtgcactggagccagcttcgcttcggcaggctatttggcctacgttgatttcatactcctcccccgatgtagaagcagaagtacatcaatcactaagccggactgtgttcaccagtctactgagatcaacagtcgatagactaaaacaagaaaggaatataacacccaaactggttttcattcacggagcacatgatgacactacagaatttgagaaataccttgttgaggatcagaccttggatgggtccccgttatctagctccacaggtttcagctcattccttgatgaggttagaagtaaagtggctgagcatggcatttgaggaccagtgtcacctgtctcccgattgctggactgtgatgttaaacgggtgatgactgatgacccatgcaacccagaaatactgtcatgaatagaaagagtaagtgctttgctggtttaccggcaaacgtttttgtatgtgtgccgtgtgtttgatggatgctgttcgccatttttttaccgacagctagatgaattttaaagctttcctttacaagaccgcgctatatgtttttgtaatatccatgcgctactatgtttttttgggtacattgcctgttgctaaactatgcatttgctatatacattgctgaaaaacccgttcattatatttctagattgctctatagttcgaatgcttttggtaccattttcggtgtttggtgttgcaatgtactgttttgtccttgtttttcttaggtttctggcgctacctcagacatttgctacctgatgatcttgaacgcaccaaccaatctcgattttgtattagttagacgtttgctacatgaaaaggaattctgaagcgaatacattcatttcggcagaaagcctgaaggcacgtatacaactcaactactgcatcctgcatgtataaaaagtctgtgtgtgtgggaggggggaatgtaaggatgtgcttctttctcatgtgtgggaaaattgttaaaac

SEQ ID NO: 14387 - DNA, 3031 bp, Zea Mays
ttccagtccagcacagaaggccctgcccgccgcggcgccgcccactcgttaaaccaccaaaaccaaaacacttcgagacatgcagcttccctgagatctatcgtcacgtcgccagatctaaccaagccccaaatctgcgcgccggcaatggcggtgcgcgcgagcctcgcctgcttcccctccgacccagcgctccacgcggcttgcggcatgccgtggggcgtcgccatcaccccgttctctgccacagatgagcgcggcttcccgccggccaccggcaccgagggccacctcctcccgcgctgccagtcctgcttcgcctacttcaacttgctctgtccgctcgaccgctggtcctggaactgcgccatctgcggcgccgagaatgacctctccgccgacgcagctgcgcgctacgcccgcgacggtggccacgacccgcccgagatgcgctccgcgttcgtcgacctcctcctcccagtggaggagggcgaggcggcagcggcggcggctccgacgcccgtgtacgtggcggcgatcgacttgtcctcttcagaggagttcttggagctagtcaaaagtgctcttcaagctgctcttgaagctcttttgccaggatcactatttggacttttgacatttagcagcaaaataggattgtatgatgtccaaggtccaataccaatcgtgaagaatgtgtttatccctcctgattctgatggtgccttacaagtcgaccttgaagatatcatgcccctttgctcatttttggcttctattgatagctgcaaagaccgcattactgaagcacttgaaacaattaaaccaatgtcttcctgggaagtagcagcaaatgcgcacgatggacaggatcatgtattgcatcacatacgtggttttggtgtagcgttggatgttcttatcaactacctaagttcagaatatggaaatgcatttgagcttgctaggatatttgcgtttttatctggtccacccaattatggggctgggcagctggatataaatgaggaccaaaattctggtaaagcaaggggtgctgatcatatattgcttcaagagcagacaagtttctacagaaatctgtgctgttcaagcaggtgtatgcgtggacctttttgcaattacaaatgaatacactgatcttacttctctgaaagttctgagtgttgagagtggtggatcactgtttctatattccagtacagatgaatcaacacttccacaagatatatacaagatgttgagtcgtccttatgcttttggatgtgtaatgcgattgagaacatcgtcgcagttcaagattgttgattcttatggccatttcttcccagacccccagtacatgcatgttcagcacataaattgttgcgactcttttgctacatacagttatgactttgagtttgaaaaggattcccaattttccaggaagtcaagccctcccattattcaaattgcatttaagtacactgtgcttgtgcacaatggtgatatatcagatcttccaaattctgggtgcagatttaaatacttgttagaaaggaggctaagagtgcggactatccagtacaacacaactgctaatatctgggacctttacgattttgttgatccagatgttgttttgacaatattggtacaccaggttattttggcttctttaagtgatgcactggaaacaaggctgtggctccaagattggttggtggttgtcatcgctcagtacaacaaagcatacaagaatgtcacatctggaggtggtactgagatttataatattgatgtcaatttctcacactgctcgcaactgcagcctttgtcacggtttgtgtttgctattctgttgagccccctgcttcaagtcagcagtgaaggcattcatccagattatgtgacatatttgcaatgcctcttgagtgcactggagccagcttcgcttcggcaggctatttggcctacgttgatttcatactcctcccccgatgtagaagcagaagtacatcaatcactaagccggactgtgttcaccagtgagaggccaatatatattcttgatgcatacaaagaccttctggtgtattactcacctacagctagtagcgaaatcccttttcctcctccacgaaactgtctactgagatcaacagtcgatagactaaaacaagaaaggaatataacacccaaactggttttcattcacggagcacatgatgacactacagaatttgagaaataccttgttgaggatcagaccttggatgggtccccgttatctagctccacaggtttcagctcattccttgatgaggttagaagtaaagtggctgagcatggcatttgaggaccagtgtcacctgtctcccgattgctggactgtgatgttaaacgggtgatgactgatgacccatgcaacccagaaatactgtcatgaatagaaagagtaagtgctttgctggtttaccggcaaacgtttttgtatgtgtgccgtgtgtttgatggatgctgttcgccatttttttaccgacagctagatgaattttaaagctttcctttacaagaccgcgctatatgtttttgtaatatccatgcgctactatgtttttttgggtacattgcctgttgctaaactatgcatttgctatatacattgctgaaaaacccgttcattatatttctagattgctctatagttcgaatgcttttggtaccattttcggtgtttggtgttgcaatgtactgttttgtccttgtttttcttaggtttctggcgctacctcagacatttgctacctgatgatcttgaacgcaccaaccaatctcgattttgtattagttagacgtttgctacatgaaaaggaattctgaagcgaatacattcatttcggcagaaagcctgaaggcacgtatacaactcaactactgcatcctgcatgtataaaaagtctgtgtgtgtgggaggggggaatgtaaggatgtgcttctttctcatgtgtgggaaaattgttaaaac

SEQ ID NO: 14388 - DNA, 2346 bp, Zea Mays
gttgggcatctatcattcatcagagctgcaacggactgctacccccaagcaaggccactttgtaaggtgtcccagcatataacagtacaaaatataactcatgactatatggagaagactacggtctccttgttacatcaataattctgaccttactttcagtttcggtgggtttttatgtcagtcacatcacaccaaatggcaccaaattaaacctaaattatccagctccttttccctactttccacacacctaattcagctttcttccctttagtatattcacaaaaactctcctctgatccacgagtcatcgatcatcatcatgtgtcctaaatccaaagccagcgaagaagagattccgctggtaccgtagccgctgagctaaccaccagccggttcttgtcgcgttgtctgcaactttgcaagtaagcaactcgtcacccgtcagccaccaccaagtcaccttcgttaggctgtttgcccatccatccacccatcgtcttgcacgtccaagaaatcgagaactcacgcaggcgtcgcccacttgccctcttcgtcctcctcccgtcgtgaattccacgctggttcagggatgtcgatcgagctcctgacgaaattcctcacattgctgttcgggtatgccatgccagcgctggagtgcttcaaggcgatcgagcagcggcccggccgggcagatcagctccgcttctggtgcgagtattggtaatgattcagctccccgtggtttcatttgctcagatgggtgtcgggtggtggtccgaattggatggaactggtaccagtagagagggttgggtacttggatctgtcgaacctggtgctcatccacaaaaaggggatcggtttcttctatctagtaggtgcagtgttgtctcgcttgatgtggaattcagtagcaagttactccctccgtttcttttaagttgtcgctggatagtttaattttgcactatccagcgacaactaaaacgaagcggagggagtattatttagcaaaataaattcagcagcaaatcccgttctcctcttatgatatttgttaaggattatgtagcaacttcgtaccatcttccctacttcattgctgtttttttctttgtgtgtgtgtgcgtgtgtgtggtggtggttgactttcagacgatagagtaaaagcctgcagcgtgcgctgatgggtcttggtcttgctgtgtttgactggtttcagcaatcttgcaggatcatcctagtcctcctcgtcatgttcgacgaaattgctggggttctcatttctaagatcccaatgtactacgagctgaagctagccttcctcgtctacttgtggtacccaaagacaaggggaacggacatcgtgtacgagaccttcctccagccgctggtgatgcagtaccagcccaacatcgaggccaggctccagtacctgcgcgccaatgccggtgacatcctcgtcttctacctcaagaacttcaccgagagaggctacgagctcttcctccgagtgcttgactacgtccggtcgcaggcgtccagagggtcaagaacacggagtttcttctcgttccgaggtgaacgttcggagaggccaagcttcaccgatgactatgtcactggcggcgaccggagggacgggggaaggcaccgtcgaccacgcagtggctactagtagaccaagtagtcactggatgtataggatgtgcacagaaacatatacgattactggtatagtgttaggtaggagtaggatcaaatcaagcaaaccttacggacagaacttgtaggatccactggaaaaacagatagcttcttataaattttctattcatattgtcactttgtcagcaaccatctctttccgtgcttcttgcagtgctgcatagtggttttgtgttttttttgaaatggaaacatcgttccggccttttgcatttgcatgcatacagccttacaactcaattattacatcatcctgcagcaatttgtagttcaaatagacttcaactaaatcatgatatggaggaaaataaaacacgtgcactaagctgcttcaattcttgaatggaaccgccactcgtgactcgtgaagaactctatggccaccacctccaaagactggcacatgacgaggatttgttgttgcgtttcttccttctgcaatagtctccaaaatctgaaccagtgtgtgcccttgaagatagtctgtataattgacggtataggtttatgattaaacaccacatcattacggcaaagccaaatcgaccaaaacaatgctgcaacaccattaagaagcaattttttatgcgtgcaacctttgttggattccca

SEQ ID NO: 14389 - DNA, 1557 bp, Zea Mays
aaaactctcctctgatccacgagtcatcgatcatcatcatgtgtcctaaatccaaagccagcgaagaagagattccgctggtaccgtagccgctgagctaaccaccagccggttcttgtcgcgttgtctgcaactttgcaagtaagcaactcgtcacccgtcagccaccaccaagtcaccttcgttaggctgtttgcccatccatccacccatcgtcttgcacgtccaagaaatcgagaactcacgcaggcgtcgcccacttgccctcttcgtcctcctcccgtcgtgaattccacgctggttcagggatgtcgatcgagctcctgacgaaattcctcacattgctgttcgggtatgccatgccagcgctggagtgcttcaaggcgatcgagcagcggcccggccgggcagatcagctccgcttctggtgcgagtattgcaatcttgcaggatcatcctagtcctcctcgtcatgttcgacgaaattgctggggttctcatttctaagatcccaatgtactacgagctgaagctagccttcctcgtctacttgtggtacccaaagacaaggggaacggacatcgtgtacgagaccttcctccagccgctggtgatgcagtaccagcccaacatcgaggccaggctccagtacctgcgcgccaatgccggtgacatcctcgtcttctacctcaagaacttcaccgagagaggctacgagctcttcctccgagtgcttgactacgtccggtcgcaggcgtccagagggtcaagaacacggagtttcttctcgttccgaggtgaacgttcggagaggccaagcttcaccgatgactatgtcactggcggcgaccggagggacgggggaaggcaccgtcgaccacgcagtggctactagtagaccaagtagtcactggatgtataggatgtgcacagaaacatatacgattactggtatagtgttaggtaggagtaggatcaaatcaagcaaaccttacggacagaacttgtaggatccactggaaaaacagatagcttcttataaattttctattcatattgtcactttgtcagcaaccatctctttccgtgcttcttgcagtgctgcatagtggttttgtgttttttttgaaatggaaacatcgttccggccttttgcatttgcatgcatacagccttacaactcaattattacatcatcctgcagcaatttgtagttcaaatagacttcaactaaatcatgatatggaggaaaataaaacacgtgcactaagctgcttcaattcttgaatggaaccgccactcgtgactcgtgaagaactctatggccaccacctccaaagactggcacatgacgaggatttgttgttgcgtttcttccttctgcaatagtctccaaaatctgaaccagtgtgtgcccttgaagatagtctgtataattgacggtataggtttatgattaaacaccacatcattacggcaaagccaaatcgaccaaaacaatgctgcaacaccattaagaagcaattttttatgcgtgcaacctttgttggattccca

SEQ ID NO: 14390 - DNA, 3098 bp, Zea Mays
cctgcagctcaaaagatgagcaacactcaccaacatacaaagcagcagccacctgcagctacagtgatcgaccccctctatatctacgcacacatctccctgatctcgtcttcagttcagcctcgcaactgccaccggatctttcagcactgactgccgtcgttgctgcatcaaatctgtcttggcaggtgtagctaccagctagctataggtggctcgctggagagatgagggccggggggtgcacggtgcagcagtcgctgacggcggaggccgcggcggtggtgaagcaggcggtgagccttgcgcggcggcgcgggaacgcgcaggtgacgccgctacacgtggcgagcgcgatgctagcggcgcccacggggttgctgcgcgcggcgtgcctccgctcgcactcccacccgctgcagtgcaaggcgctggagctgtgcttcaacgtggcgctgaaccgcctccccgcgtcggccgcggtcgcctcgtcgccgctgctcggcgggcacggccaccaccaccaccaccactactacccgccgtccctgtccaacgcgctcgtggcggcgttcaagcgcgcgcaggcgcaccagcggcgcgggtccgtggagagccagcagcagccggtgctcgccgtcaagatcgagctggagcagctcgtggtgtccatcctcgacgaccccagcgtcagccgcgtgatgcgcgaggctggcttctccagcacccaggtgaaggccaacgtggagcaggccgtgtgcagcagcaccaccacaacaagcaccgcggccgcggccaccgctcccagcaaaaaccctaatcctagcagctctgctgccaccgcaagcccacctcaggaagccgccaaaggcaacaagctgccgctccaccaagcgcgcgacgaggacgtcgccgccgtcctggactgcctggcctcgcggagcaagaggagggtggtcgtcatcgcggagagcgcggcggcggccgaggccacggcgcatgcggccatggacaagatcaagagcgccgaggcgaagcacgacgcgctgcgaggcgcgcaggtcgtcagcgtccgcgtgtcgtcgttccgcgagatggcgagggaggagaccgagcggcggcttggcgagctgcggtgcctcgtcaggggcaggagggggcaggtcgtcgtgctcgtcgtggaggacctcaagtgggcggccgagttctgggcgggtcacgtcgtccagagcgggaggagagggtactactactgctccgtcgagcacgtcgtcaccgagctgcgcgccctggcgagcggcggcggcggcagcctgtgctggctcctcgggttcgggacgtaccaggcctacacgaggtgtcgggtggggcagccgtcgctggagagcctgtgggagctccagacgctcaccgtgcccgccggcagcctcgcgctgagcctcaactgcgccttcgacgacagtgctctaggtctaggcacggtcaatcagtccatgaaagcgggctcatctgacacggatgggaacggaccagcgtcttgctggccgcttttggccggcagcaagctgatctccagatgctgcggcggcgactgctccgccgcgaggatcgagacgacgaaggcggcgctgcctcggacgccgttcgtctcgtcgtccagcctcccttcctggctccagcattgccgtgatcatcagacatggagctccatctgcagcagcagcaggccgtcacagcgaacgacgacgctgcatttctcggcgccggtgtctccggcctcctccatctcttcctacgagcacggcggcggccagtcgcagcagcctcgccactcgtggctcctcgccggcctcgacgccgcgcaccacccgtggagacccaagcgcgaggccagcatcaggtcccacgactccggcgcctccaacggctccgtggaggtggagtgccgcgccaggttcaaggagctcaacgccgagaacctcaagctgctctgcggcgcgctggagaaggaggtgccgtggcagaaggagatcgtccccgaggtcgcgagcgccgtcctgcagtgccggtcggggatcgccaagaggcgcgacaagtccaggtcggcggacgccaaggaggagacgtggatgctcttcctcggaggcgacgccgacggcaaggagagggttgcgagggagctcgccaggctcgtgttcgggttacgcagcagctttttgtccatcaggcctggcggtgtcgtctccgcctcgtcgccaccgccggcctcgtcaggctcctccgaggggcacaggagtagtaagcgcccacggatgccggaggaggagccggcggcctactacctagagcggttgcacgaggctgtctccgaaaacccacaccgggtcatattcatggaggacgtcgagcgggctgaccgggactgccagctccgcatcaaggaggcgatcgagagcggggtggtgcggaaccatgctggtcaagaggtcggcgtgggcgacgccatcgtcatcctcagctgcgagagctttggcgacagcaggtctagtagagcttgctcgccgccgagcaagaaggtgaaggtagagatggaggaggccaaggaggagcgcgcaggtgaccatgaacacaaccaagatggtgtttccaagccgtctccatcttgcatagatttgaacgtggacatggagagtgatcaggcggacgagccaagtctcggtgatcagtgtctgctcacggccgtcgacagggccctattcttcagaagacaggacaactagtgactgacagtgtacattggagttgaaggctccgtggtcgttccaacgtgctcagttctgataagaacctagattagttgcatgggcaatagggcatccagtctaattggcattttctttagttcatgttttttaggtttatctttttttttgctgtcttcgttttagagaattggatcgctggtgtatttgggcttcactaaagacaaacatacagctgctgtaaatttacctgcagattctaattcgcagtaccatatccggccaagttcactctctttctttttcacctagagataagcttgcaatttcaagatt

SEQ ID NO: 14391 - DNA, 448 bp, Zea Mays
gcgggatggtttttaaattaagttactatgggctccggagggtgtgcgtggaggacgcaaaatttataatggttcgaacaggacgtccctacatcatatcgtcgatggcttgcgctaccgacaccatttatgatcaaactcataataagagttacaagcggccgagagagggaggagggactctcagatctcttatcggggtggaagtggagcttagaagctgagaggtggagtcctagctaagtcttggcttagcgggcctcggttctcctagtcctcatcggcgctttcctttgctcgaaacctccatttcccttttagtttgagactacacacataagcttgaaaacatgattagtctcaaaagttcaagttgtagaccatcctccccctaaatatgtgcatataagtgtagaatacttgtttagcttatacacttggacttgtg

SEQ ID NO: 14392 - DNA, 525 bp, Zea Mays
ttttgtttgttcttattacatgtataaattggagagtcgaagggcaacggggagacagtttcctttcttcccttttttccatacatttagaaaccgttcatgaaccgaaagagtttttactggtattgtgaattctgtaccggctacttctacttatacggtgttttatcactgtgccattgccccgtgagatcgaccgcctggacggaacagagaacagcgagaatccagagcgcgccactcacctactgcgagagccctcgacggccactccccaagccacccccgccgccgccgcagccgacgacgacgacgccgatcttctctcgccgccacgcgccatcccggttgcggtagggtcagaggaggaggaggatggcccgcccgactcggaggcgcggagtgtgtttggagggggcaggacgggggggaatgggaggcggggcttggggttggggaggcgcggattgtgcgcttcctgcgctctcgagtccggccggcggccgcctcgtttgctccggtccc

SEQ ID NO: 14393 - DNA, 2567 bp, Zea Mays
tttatctctttttcttaaaattatatcttagagacatattccgtgattaaaaaaacattatcatgtgttctcttcgttctttttatttatcgtggtttagtataaaaatgaactaacggacaacaaataattgataacgaaggtatgtttcaaccaaaaggaataaaatcacctgggaaactaagccgcatagaaaggtaatttatagaaaggttattattgtgagtaagatatctagtttcaaaattcaacgacccacgaggccacgcaacgcaattttttccttggtcaccgaatacctctgctgggctttgtctgtgtctcagcatgtccggttcgacgactcgtgccaacggccgaaccaacttagccacaggccacaacacagcccacagcccacattgtggaggcagcggcggagccttcgccggaggaactggggccaccgaggtagttggtggtgggagcctgggagggcttgcaaggggcgaaggaggtcgacgcagtctacaaggtcgtcggggagagggagatcgacgtcctcgcggcccggtgttgccgctgcctggtcgcctcgtcggtagcaccaagcgccacctagttatactataaaaccaaacttgtttgcgcctttggaatgtgcacacccatgggaatttttcttgatggtccactgctgacatgcacagacatctcttctacctctgccaattcaaaggccatgctgttataccagcagtagctgcaacgattcaactagttgtggcaaatttcggcacatccccaacactcgagatatcaagaaagcaaaggtgtgctaaccttcaaaatgcattgagaattttggaccttgtaccatccaagcatcatcatgaccaagaggaagttccgtcacatcaccgccttatcaatggctgtatgggtgacatctcgggagtccaatcaagactgcacactatgcgtaggggtaaagagagctttgctaactcaaactcaaatcaagcacagcctaaacacggtaacattgtctcaaataatacctcggtttgcccctccataactagactcacaaaggaagacatgtttatgcaaattgtggagttacataggaggggacaaatcagttcagatgcatccattttggcatctgcactgagttactgtgctgatgagaaaactcttaccacaggtgtacagttccatgctcaactagtgaaagtaggatatgtctcatctatccccattggcagctcgctgatcagtttttattcacgatgcagccaattggaaattgctcatcggattttccaaaatatgacagcaaaaagtactgtgacatggacagcattaatttctggttatgcccaagataatcaggtcgaaccatgtctccatttatttgcactgatgaggcagtctgtgtgcaagccaaatgacatcacatttgcaactatcttgagtgtctgcactaatcatgcatttcttgtacttggtaaaagtgtgcaagccctacaaatgagaatgggttttggttcctatgtgcatgtgtccaatgcattgatatcaatgtatgcaaaatgcgggagcattggtgaagcacgagctgtatttgagagcattacatgcaaagacctggtctcttggaactccttgatctttggatattcacagcatggccttgctgagcattgcctatacttgctaagagaaatggaaggacatataataccggatgcaatctccttcctaggtgtgctctcatcatgccggcatgcatgccttgtggcagagggccgacgctgcttcagggcaatgattgaacatggagtaataccagagatagatcactactcatgtatggttgatctttttggccgtgcaggactgcttgatgaagcatgggatctgatccagacgatgcccatgcctccaaatggtgtcatatggggctccctgctagcttcctgtaggctgcatgggagcatttcgatcggcatacaagctgcagagcaccgtctaaagctggaaccaagttgtgctgcaactcatgtccagctagcgaatttgtatgggagcattgggtgctgggatgatgtggcaagagtgaggaaagtgatgaaggagagagggctgaaaacaaatatcgggtgcagttggatagaagttggcaataaagtttatacatttacagcagaaaacagatcaaagaaccaggtaaacaatgtcctagttgttctcgattgcttgcagtcacatatggatcacaagtatgatatactgattgagggtctggattgggatgatcctgaacatataaagttgagtttaaacaatatataaatttgaagatcattgcccgccatgttcagcttcatttgaagaggcactcaataggaattgacatgtgtcattcacacctcaaatatcttcaatctcgatgtaacatgtaagcaaagatatcaaggtcattttatctcatcgttttggttttcaccttgttaatctttgtggctatgttgcacaagaatgcaggcaaggtagaaatggccagatgcattcctgtaact

SEQ ID NO: 14394 - DNA, 2201 bp, Zea Mays
caaataattgataacgaaggtatgtttcaaccaaaaggaataaaatcacctgggaaactaagccgcatagaaaggtaatttatagaaaggttattattgtgagtaagatatctagtttcaaaattcaacgacccacgaggccacgcaacgcaattttttccttggtcaccgaatacctctgctgggctttgtctgtgtctcagcatgtccggttcgacgactcgtgccaacggccgaaccaacttagccacaggccacaacacagcccacagcccacattgtggaggcagcggcggagccttcgccggaggaactggggccaccgaggtagttggtggtgggagcctgggagggcttgcaaggggcgaaggaggtcgacgcagtctacaaggtcgtcggggagagggagatcgacgtcctcgcggcccggtgttgccgctgcctggtcgcctcgtcggtagcaccaagcgccacctagttatactataaaaccaaacttgtttgcgcctttggaatgtgcacacccatgggaatttttcttgatggtccactgctgacatgcacagacatctcttctacctctgccaattcaaaggccatgctgttataccagcagtagctgcaacgattcaactagttgtggcaaatttcggcacatccccaacactcgagatatcaagaaagcaaaggtgtgctaaccttcaaaatgcattgagaattttggaccttgtaccatccaagcatcatcatgaccaagaggaagttccgtcacatcaccgccttatcaatggctgtatgggtgacatctcgggagtccaatcaagactgcacactatgcgtagggccaattggaaattgctcatcggattttccaaaatatgacagcaaaaagtactgtgacatggacagcattaatttctggttatgcccaagataatcaggtcgaaccatgtctccatttatttgcactgatgaggcagtctgtgtgcaagccaaatgacatcacatttgcaactatcttgagtgtctgcactaatcatgcatttcttgtacttggtaaaagtgtgcaagccctacaaatgagaatgggttttggttcctatgtgcatgtgtccaatgcattgatatcaatgtatgcaaaatgcgggagcattggtgaagcacgagctgtatttgagagcattacatgcaaagacctggtctcttggaactccttgatctttggatattcacagcatggccttgctgagcattgcctatacttgctaagagaaatggaaggacatataataccggatgcaatctccttcctaggtgtgctctcatcatgccggcatgcatgccttgtggcagagggccgacgctgcttcagggcaatgattgaacatggagtaataccagagatagatcactactcatgtatggttgatctttttggccgtgcaggactgcttgatgaagcatgggatctgatccagacgatgcccatgcctccaaatggtgtcatatggggctccctgctagcttcctgtaggctgcatgggagcatttcgatcggcatacaagctgcagagcaccgtctaaagctggaaccaagttgtgctgcaactcatgtccagctagcgaatttgtatgggagcattgggtgctgggatgatgtggcaagagtgaggaaagtgatgaaggagagagggctgaaaacaaatatcgggtgcagttggatagaagttggcaataaagtttatacatttacagcagaaaacagatcaaagaaccaggtaaacaatgtcctagttgttctcgattgcttgcagtcacatatggatcacaagtatgatatactgattgagggtctggattgggatgatcctgaacatataaagttgagtttaaacaatatataaatttgaagatcattgcccgccatgttcagcttcatttgaagaggcactcaataggaattgacatgtgtcattcacacctcaaatatcttcaatctcgatgtaacatgtaagtttaacacctgtgtttgagcatttgaaaagatttggtttgctcagtttactttcatctgagctactgctgatatccatattcattttgtactaaatatatttttcacaattgaaacctctgtatacaagaatgcatgttcaatctcttgagtaatgtgcagttctgcatggaagatgatgggcaat

SEQ ID NO: 14395 - DNA, 2348 bp, Zea Mays
caaataattgataacgaaggtatgtttcaaccaaaaggaataaaatcacctgggaaactaagccgcatagaaaggtaatttatagaaaggttattattgtgagtaagatatctagtttcaaaattcaacgacccacgaggccacgcaacgcaattttttccttggtcaccgaatacctctgctgggctttgtctgtgtctcagcatgtccggttcgacgactcgtgccaacggccgaaccaacttagccacaggccacaacacagcccacagcccacattgtggaggcagcggcggagccttcgccggaggaactggggccaccgaggtagttggtggtgggagcctgggagggcttgcaaggggcgaaggaggtcgacgcagtctacaaggtcgtcggggagagggagatcgacgtcctcgcggcccggtgttgccgctgcctggtcgcctcgtcggtagcaccaagcgccacctagttatactataaaaccaaacttgtttgcgcctttggaatgtgcacacccatgggaatttttcttgatggtccactgctgacatgcacagacatctcttctacctctgccaattcaaaggccatgctgttataccagcagtagctgcaacgattcaactagttgtggcaaatttcggcacatccccaacactcgagatatcaagaaagcaaaggtgtgctaaccttcaaaatgcattgagaattttggaccttgtaccatccaagcatcatcatgaccaagaggaagttccgtcacatcaccgccttatcaatggctgtatgggtgacatctcgggagtccaatcaagactgcacactatgcgtaggggtaaagagagctttgctaactcaaactcaaatcaagcacagcctaaacacggtaacattgtctcaaataatacctcggtttgcccctccataactagactcacaaaggaagacatgtttatgcaaattgtggagttacataggaggggacaaatcagttcagatgcatccattttggcatctgcactgagttactgtgctgatgagaaaactcttaccacaggtgtacagttccatgctcaactagtgaaagtaggatatgtctcatctatccccattggcagctcgctgatcagtttttattcacgatgcagccaattggaaattgctcatcggattttccaaaatatgacagcaaaaagtactgtgacatggacagcattaatttctggttatgcccaagataatcaggtcgaaccatgtctccatttatttgcactgatgaggcagtctgtgtgcaagccaaatgacatcacatttgcaactatcttgagtgtctgcactaatcatgcatttcttgtacttggtaaaagtgtgcaagccctacaaatgagaatgggttttggttcctatgtgcatgtgtccaatgcattgatatcaatgtatgcaaaatgcgggagcattggtgaagcacgagctgtatttgagagcattacatgcaaagacctggtctcttggaactccttgatctttggatattcacagcatggccttgctgagcattgcctatacttgctaagagaaatggaaggacatataataccggatgcaatctccttcctaggtgtgctctcatcatgccggcatgcatgccttgtggcagagggccgacgctgcttcagggcaatgattgaacatggagtaataccagagatagatcactactcatgtatggttgatctttttggccgtgcaggactgcttgatgaagcatgggatctgatccagacgatgcccatgcctccaaatggtgtcatatggggctccctgctagcttcctgtaggctgcatgggagcatttcgatcggcatacaagctgcagagcaccgtctaaagctggaaccaagttgtgctgcaactcatgtccagctagcgaatttgtatgggagcattgggtgctgggatgatgtggcaagagtgaggaaagtgatgaaggagagagggctgaaaacaaatatcgggtgcagttggatagaagttggcaataaagtttatacatttacagcagaaaacagatcaaagaaccaggtaaacaatgtcctagttgttctcgattgcttgcagtcacatatggatcacaagtatgatatactgattgagggtctggattgggatgatcctgaacatataaagttgagtttaaacaatatataaatttgaagatcattgcccgccatgttcagcttcatttgaagaggcactcaataggaattgacatgtgtcattcacacctcaaatatcttcaatctcgatgtaacatttctgcatggaagatgatgggcaat

SEQ ID NO: 14396 - DNA, 2248 bp, Zea Mays
caaataattgataacgaaggtatgtttcaaccaaaaggaataaaatcacctgggaaactaagccgcatagaaaggtaatttatagaaaggttattattgtgagtaagatatctagtttcaaaattcaacgacccacgaggccacgcaacgcaattttttccttggtcaccgaatacctctgctgggctttgtctgtgtctcagcatgtccggttcgacgactcgtgccaacggccgaaccaacttagccacaggccacaacacagcccacagcccacattgtggaggcagcggcggagccttcgccggaggaactggggccaccgaggtagttggtggtgggagcctgggagggcttgcaaggggcgaaggaggtcgacgcagtctacaaggtcgtcggggagagggagatcgacgtcctcgcggcccggtgttgccgctgcctggtcgcctcgtcggtagcaccaagcgccacctagttatactataaaaccaaacttgtttgcgcctttggaatgtgcacacccatgggaatttttcttgatggtccactgctgacatgcacagacatctcttctacctctgccaattcaaaggccatgctgttataccagcagtagctgcaacgattcaactagttgtggcaaatttcggcacatccccaacactcgagatatcaagaaagcaaaggtgtgctaaccttcaaaatgcattgagaattttggaccttgtaccatccaagcatcatcatgaccaagaggaagttccgtcacatcaccgccttatcaatggctgtatgggtgacatctcgggagtccaatcaagactgcacactatgcgtaggggtaaagagagctttgctaactcaaactcaaatcaagcacagcctaaacacggtaacattgtctcaaataatacctcggtttgcccctccataactagactcacaaaggaagacatgtttatgcaaattgtggagttacataggaggggacaaatcagttcagatgcatccattttggcatctgcactgagttactgtgctgatgagaaaactcttaccacaggtgtacagttccatgctcaactagtgaaagtaggatatgtctcatctatccccattggcagctcgctgatcagtttttattcacgatgcagccaattggaaattgctcatcggattttccaaaatatgacagcaaaaagtactgtgacatggacagcattaatttctggttatgcccaagataatcaggtcgaaccatgtctccatttatttgcactgatgaggcagtctgtgtgcaagccaaatgacatcacatttgcaactatcttgagtgtctgcactaatcatgcatttcttgtacttggtaaaagtgtgcaagccctacaaatgagaatgggttttggttcctatgtgcatgtgtccaatgcattgatatcaatgtatgcaaaatgcgggagcattggtgaagcacgagctgtatttgagagcattacatgcaaagacctggtctcttggaactccttgatctttggatattcacagcatggccttgctgagcattgcctatacttgctaagagaaatggaaggacatataataccggatgcaatctccttcctaggtgtgctctcatcatgccggcatgcatgccttgtggcagagggccgacgctgcttcagggcaatgattgaacatggagtaataccagagatagatcactactcatgtatggttgatctttttggccgtgcaggactgcttgatgaagcatgggatctgatccagacgatgcccatgcctccaaatggtgtcatatggggctccctgctagcttcctgtaggctgcatgggagcatttcgatcggcatacaagctgcagagcaccgtctaaagctggaaccaagttgtgctgcaactcatgtccagctagcgaatttgtatgggagcattgggtgctgggatgatgtggcaagagtgaggaaagtgatgaaggagagagggctgaaaacaaatatcgggtgcagttggatagaagttggcaataaagtttatacatttacagcagaaaacagatcaaagaaccagttgagtttaaacaatatataaatttgaagatcattgcccgccatgttcagcttcatttgaagaggcactcaataggaattgacatgtgtcattcacacctcaaatatcttcaatctcgatgtaacatctaatggtgtaatggaccgggcattgcaac

SEQ ID NO: 14397 - DNA, 3568 bp, Zea Mays
caaataattgataacgaaggtatgtttcaaccaaaaggaataaaatcacctgggaaactaagccgcatagaaaggtaatttatagaaaggttattattgtgagtaagatatctagtttcaaaattcaacgacccacgaggccacgcaacgcaattttttccttggtcaccgaatacctctgctgggctttgtctgtgtctcagcatgtccggttcgacgactcgtgccaacggccgaaccaacttagccacaggccacaacacagcccacagcccacattgtggaggcagcggcggagccttcgccggaggaactggggccaccgaggtagttggtggtgggagcctgggagggcttgcaaggggcgaaggaggtcgacgcagtctacaaggtcgtcggggagagggagatcgacgtcctcgcggcccggtgttgccgctgcctggtcgcctcgtcggtagcaccaagcgccacctagttatactataaaaccaaacttgtttgcgcctttggaatgtgcacacccatgggaatttttcttgatggtccactgctgacatgcacagacatctcttctacctctgccaattcaaaggccatgctgttataccagcagtagctgcaacgattcaactagttgtggcaaatttcggcacatccccaacactcgagatatcaagaaagcaaaggtgtgctaaccttcaaaatgcattgagaattttggaccttgtaccatccaagcatcatcatgaccaagaggaagttccgtcacatcaccgccttatcaatggctgtatgggtgacatctcgggagtccaatcaagactgcacactatgcgtaggggtaaagagagctttgctaactcaaactcaaatcaagcacagcctaaacacggtaacattgtctcaaataatacctcggtttgcccctccataactagactcacaaaggaagacatgtttatgcaaattgtggagttacataggaggggacaaatcagttcagatgcatccattttggcatctgcactgagttactgtgctgatgagaaaactcttaccacaggtgtacagttccatgctcaactagtgaaagtaggatatgtctcatctatccccattggcagctcgctgatcagtttttattcacgatgcagccaattggaaattgctcatcggattttccaaaatatgacagcaaaaagtactgtgacatggacagcattaatttctggttatgcccaagataatcaggtcgaaccatgtctccatttatttgcactgatgaggcagtctgtgtgcaagccaaatgacatcacatttgcaactatcttgagtgtctgcactaatcatgcatttcttgtacttggtaaaagtgtgcaagccctacaaatgagaatgggttttggttcctatgtgcatgtgtccaatgcattgatatcaatgtatgcaaaatgcgggagcattggtgaagcacgagctgtatttgagagcattacatgcaaagacctggtctcttggaactccttgatctttggatattcacagcatggccttgctgagcattgcctatacttgctaagagaaatggaaggacatataataccggatgcaatctccttcctaggtgtgctctcatcatgccggcatgcatgccttgtggcagagggccgacgctgcttcagggcaatgattgaacatggagtaataccagagatagatcactactcatgtatggttgatctttttggccgtgcaggactgcttgatgaagcatgggatctgatccagacgatgcccatgcctccaaatggtgtcatatggggctccctgctagcttcctgtaggctgcatgggagcatttcgatcggcatacaagctgcagagcaccgtctaaagctggaaccaagttgtgctgcaactcatgtccagctagcgaatttgtatgggagcattgggtgctgggatgatgtggcaagagtgaggaaagtgatgaaggagagagggctgaaaacaaatatcgggtgcagttggatagaagttggcaataaagtttatacatttacagcagaaaacagatcaaagaaccagttaggagtcttgtttgcataaagtaaagaggaatcgcaccgagggataggcattgtgagtatgacgtgtgctttgcatgggccagcacctgactcagttcctgtgaaatcatgaatccaccaacggaggtcaaatacctgactgcagccagccagaatgtttacagccacacatgatgatcctatagctggctagaagaagaagaaatatttacagccatccagcataaccttagagctggtttgaagaggatgcaaccggtgcagctgcacaaatgcacaaggacatggagtacccaagaaggacactgctgcacacccctttctccgggcatccctctggtccaagccagccaatagatggagccacggccacagacggaagcaacttcgacgcgaacgtggtcatgatcctggctgtcctcctgtgcgcgctgatctgcgctctcgggctcaactccatcgtccggtgcgcgctgcggtgctcgagccgggtggtggtgggtcctgaaccgaaccaggtgacgcggcttgtccagagcgggctgaggaggaaggcgctccgagccatgccggtcctggtctactcgcctgggctgaggatcaatgctgccaacccgacatgcgcgatctgcctctcggacttcgaggcaggggagcatgtcagggtcctccccaaatgcaaccacggcttccatgtcaggtgcatcgaccggtggctgctggcgcggtcgacgtgcccgacgtgccggcagtccctgttcggagtgccgcagaaggcctccggctgctccgaggcgagccgggctgccgagccagagcctgcgcctgcgcctgcgcctgctcgctctgtccttgtgccgctcagacctgaaggtttggtcactcattatgatttttagaatgttcggttgcttcttagtcgttgcataaatgatgagagggaggctgagaaaaagtagaaacaaaaactgtgagcattagatcttactgccaatctggtttgtacattgttggttgctagagaaaaaaaagatgtgaaggttttctagttttttttttacttgctgtgtcagtgccaattgttgctggggaatgtgccatggaaaataccagctggtgctatctgctatgggttccttttctgaatcaccattcaatgttggttttgtaaaaagaagaagaagaagagggacatgattggccggtctgatcatatggctgggagtgcagagtgctgcgccaccactatggtgactggagatcaggctttagctgctaagcttcttcggggcttcagatttcagtgggagcagcatattctatgccattatggagaggtccggggctcagggcctgtgatattctatgcttttgcttcgaggccatggttttaggctttttatcagtggtgtatgcacccgcaggtgggcccacacccagctattgatgtgcattggctagttagtagtgtttct

SEQ ID NO: 14398 - DNA, 4053 bp, Zea Mays
caaataattgataacgaaggtatgtttcaaccaaaaggaataaaatcacctgggaaactaagccgcatagaaaggtaatttatagaaaggttattattgtgagtaagatatctagtttcaaaattcaacgacccacgaggccacgcaacgcaattttttccttggtcaccgaatacctctgctgggctttgtctgtgtctcagcatgtccggttcgacgactcgtgccaacggccgaaccaacttagccacaggccacaacacagcccacagcccacattgtggaggcagcggcggagccttcgccggaggaactggggccaccgaggtagttggtggtgggagcctgggagggcttgcaaggggcgaaggaggtcgacgcagtctacaaggtcgtcggggagagggagatcgacgtcctcgcggcccggtgttgccgctgcctggtcgcctcgtcggtagcaccaagcgccacctagttatactataaaaccaaacttgtttgcgcctttggaatgtgcacacccatgggaatttttcttgatggtccactgctgacatgcacagacatctcttctacctctgccaattcaaaggccatgctgttataccagcagtagctgcaacgattcaactagttgtggcaaatttcggcacatccccaacactcgagatatcaagaaagcaaaggtgtgctaaccttcaaaatgcattgagaattttggaccttgtaccatccaagcatcatcatgaccaagaggaagttccgtcacatcaccgccttatcaatggctgtatgggtgacatctcgggagtccaatcaagactgcacactatgcgtaggggtaaagagagctttgctaactcaaactcaaatcaagcacagcctaaacacggtaacattgtctcaaataatacctcggtttgcccctccataactagactcacaaaggaagacatgtttatgcaaattgtggagttacataggaggggacaaatcagttcagatgcatccattttggcatctgcactgagttactgtgctgatgagaaaactcttaccacaggtgtacagttccatgctcaactagtgaaagtaggatatgtctcatctatccccattggcagctcgctgatcagtttttattcacgatgcagccaattggaaattgctcatcggattttccaaaatatgacagcaaaaagtactgtgacatggacagcattaatttctggttatgcccaagataatcaggtcgaaccatgtctccatttatttgcactgatgaggcagtctgtgtgcaagccaaatgacatcacatttgcaactatcttgagtgtctgcactaatcatgcatttcttgtacttggtaaaagtgtgcaagccctacaaatgagaatgggttttggttcctatgtgcatgtgtccaatgcattgatatcaatgtatgcaaaatgcgggagcattggtgaagcacgagctgtatttgagagcattacatgcaaagacctggtctcttggaactccttgatctttggatattcacagcatggccttgctgagcattgcctatacttgctaagagaaatggaaggacatataataccggatgcaatctccttcctaggtgtgctctcatcatgccggcatgcatgccttgtggcagagggccgacgctgcttcagggcaatgattgaacatggagtaataccagagatagatcactactcatgtatggttgatctttttggccgtgcaggactgcttgatgaagcatgggatctgatccagacgatgcccatgcctccaaatggtgtcatatggggctccctgctagcttcctgtaggctgcatgggagcatttcgatcggcatacaagctgcagagcaccgtctaaagctggaaccaagttgtgctgcaactcatgtccagctagcgaatttgtatgggagcattgggtgctgggatgatgtggcaagagtgaggaaagtgatgaaggagagagggctgaaaacaaatatcgggtgcagttggatagaagttggcaataaagtttatacatttacagcagaaaacagatcaaagaaccagttgagtttaaacaatatataaatttgaagatcattgcccgccatgttcagcttcatttgaagaggcactcaataggaattgacatgtgtcattcacacctcaaatatcttcaatctcgatgtaacatgatgttgttgatagcccaatcagttttaagctgacaaatcagactccaatttcgctagatggctatggttcacacaaagtggacaggatcaattcagagcaataaaaggataaacatatgctctgtgagtgtgcaacgaatatagagctgctccatttcctttttgtttatgcctagatgattccttttacttttttttagtattagctgcagtcttatctttcttgtagctatagtttaaataatgccgctgtgggctttggctatatattttattccaagttgccatcgatcagtttacacatggatcgagttaattcaaaacgatcgacttattcagcatgttctttttctgcagttaggagtcttgtttgcataaagtaaagaggaatcgcaccgagggataggcattgtgagtatgacgtgtgctttgcatgggccagcacctgactcagttcctgtgaaatcatgaatccaccaacggaggtcaaatacctgactgcagccagccagaatgtttacagccacacatgatgatcctatagctggctagaagaagaagaaatatttacagccatccagcataaccttagagctggtttgaagaggatgcaaccggtgcagctgcacaaatgcacaaggacatggagtacccaagaaggacactgctgcacacccctttctccgggcatccctctggtccaagccagccaatagatggagccacggccacagacggaagcaacttcgacgcgaacgtggtcatgatcctggctgtcctcctgtgcgcgctgatctgcgctctcgggctcaactccatcgtccggtgcgcgctgcggtgctcgagccgggtggtggtgggtcctgaaccgaaccaggtgacgcggcttgtccagagcgggctgaggaggaaggcgctccgagccatgccggtcctggtctactcgcctgggctgaggatcaatgctgccaacccgacatgcgcgatctgcctctcggacttcgaggcaggggagcatgtcagggtcctccccaaatgcaaccacggcttccatgtcaggtgcatcgaccggtggctgctggcgcggtcgacgtgcccgacgtgccggcagtccctgttcggagtgccgcagaaggcctccggctgctccgaggcgagccgggctgccgagccagagcctgcgcctgcgcctgcgcctgctcgctctgtccttgtgccgctcagacctgaaggtttggtcactcattatgatttttagaatgttcggttgcttcttagtcgttgcataaatgatgagagggaggctgagaaaaagtagaaacaaaaactgtgagcattagatcttactgccaatctggtttgtacattgttggttgctagagaaaaaaaagatgtgaaggttttctagttttttttttacttgctgtgtcagtgccaattgttgctggggaatgtgccatggaaaataccagctggtgctatctgctatgggttccttttctgaatcaccattcaatgttggttttgtaaaaagaagaagaagaagagggacatgattggccggtctgatcatatggctgggagtgcagagtgctgcgccaccactatggtgactggagatcaggctttagctgctaagcttcttcggggcttcagatttcagtgggagcagcatattctatgccattatggagaggtccggggctcagggcctgtgatattctatgcttttgcttcgaggccatggttttaggctttttatcagtggtgtatgcacccgcaggtgggcccacacccagctattgatgtgcattggctagttagtagtgtttct

SEQ ID NO: 14399 - DNA, 4064 bp, Zea Mays
caaataattgataacgaaggtatgtttcaaccaaaaggaataaaatcacctgggaaactaagccgcatagaaaggtaatttatagaaaggttattattgtgagtaagatatctagtttcaaaattcaacgacccacgaggccacgcaacgcaattttttccttggtcaccgaatacctctgctgggctttgtctgtgtctcagcatgtccggttcgacgactcgtgccaacggccgaaccaacttagccacaggccacaacacagcccacagcccacattgtggaggcagcggcggagccttcgccggaggaactggggccaccgaggtagttggtggtgggagcctgggagggcttgcaaggggcgaaggaggtcgacgcagtctacaaggtcgtcggggagagggagatcgacgtcctcgcggcccggtgttgccgctgcctggtcgcctcgtcggtagcaccaagcgccacctagttatactataaaaccaaacttgtttgcgcctttggaatgtgcacacccatgggaatttttcttgatggtccactgctgacatgcacagacatctcttctacctctgccaattcaaaggccatgctgttataccagcagtagctgcaacgattcaactagttgtggcaaatttcggcacatccccaacactcgagatatcaagaaagcaaaggtgtgctaaccttcaaaatgcattgagaattttggaccttgtaccatccaagcatcatcatgaccaagaggaagttccgtcacatcaccgccttatcaatggctgtatgggtgacatctcgggagtccaatcaagactgcacactatgcgtaggggtaaagagagctttgctaactcaaactcaaatcaagcacagcctaaacacggtaacattgtctcaaataatacctcggtttgcccctccataactagactcacaaaggaagacatgtttatgcaaattgtggagttacataggaggggacaaatcagttcagatgcatccattttggcatctgcactgagttactgtgctgatgagaaaactcttaccacaggtgtacagttccatgctcaactagtgaaagtaggatatgtctcatctatccccattggcagctcgctgatcagtttttattcacgatgcagccaattggaaattgctcatcggattttccaaaatatgacagcaaaaagtactgtgacatggacagcattaatttctggttatgcccaagataatcaggtcgaaccatgtctccatttatttgcactgatgaggcagtctgtgtgcaagccaaatgacatcacatttgcaactatcttgagtgtctgcactaatcatgcatttcttgtacttggtaaaagtgtgcaagccctacaaatgagaatgggttttggttcctatgtgcatgtgtccaatgcattgatatcaatgtatgcaaaatgcgggagcattggtgaagcacgagctgtatttgagagcattacatgcaaagacctggtctcttggaactccttgatctttggatattcacagcatggccttgctgagcattgcctatacttgctaagagaaatggaaggacatataataccggatgcaatctccttcctaggtgtgctctcatcatgccggcatgcatgccttgtggcagagggccgacgctgcttcagggcaatgattgaacatggagtaataccagagatagatcactactcatgtatggttgatctttttggccgtgcaggactgcttgatgaagcatgggatctgatccagacgatgcccatgcctccaaatggtgtcatatggggctccctgctagcttcctgtaggctgcatgggagcatttcgatcggcatacaagctgcagagcaccgtctaaagctggaaccaagttgtgctgcaactcatgtccagctagcgaatttgtatgggagcattgggtgctgggatgatgtggcaagagtgaggaaagtgatgaaggagagagggctgaaaacaaatatcgggtgcagttggatagaagttggcaataaagtttatacatttacagcagaaaacagatcaaagaaccagttgagtttaaacaatatataaatttgaagatcattgcccgccatgttcagcttcatttgaagaggcactcaataggaattgacatgtgtcattcacacctcaaatatcttcaatctcgatgtaacatttaggagtcttgtttgcataaagtaaagaggaatcgcaccgagggataggcattgtgagtatgacgtgtgctttgcatgggccagcacctgactcagttcctgtgaaatcatgaatccaccaacggaggtcaaatacctgactgcagccagccagaatgtttacagccacacatgatgatcctatagctggctagaagaagaagaaatatttacagccatccagcataaccttagagctggtttgaagaggatgcaaccggtgcagctgcacaaatggcagacaagagattgtgctgtgtgtggccctctgattcccaaaaaaaaacaccactgagatgcagtccacttgccacaagcaaagaagcttccatttgtgcacattccaacctttgccaaatgctttttgtctcaattggctggcagagacgaaagggacaagggcgaaagaggcagcatatcatattaccaaataaaataatccgcgtactgtattattgcagcctcaaagagcctataaatacttgagcacagaccagtttatggttctacatgaggcagactaaaaacaagaacatacctacgcaactagcagagcttacagatttgcacccacaggactctgaataaagctggggctttttgcagcacaaggacatggagtacccaagaaggacactgctgcacacccctttctccgggcatccctctggtccaagccagccaatagatggagccacggccacagacggaagcaacttcgacgcgaacgtggtcatgatcctggctgtcctcctgtgcgcgctgatctgcgctctcgggctcaactccatcgtccggtgcgcgctgcggtgctcgagccgggtggtggtgggtcctgaaccgaaccaggtgacgcggcttgtccagagcgggctgaggaggaaggcgctccgagccatgccggtcctggtctactcgcctgggctgaggatcaatgctgccaacccgacatgcgcgatctgcctctcggacttcgaggcaggggagcatgtcagggtcctccccaaatgcaaccacggcttccatgtcaggtgcatcgaccggtggctgctggcgcggtcgacgtgcccgacgtgccggcagtccctgttcggagtgccgcagaaggcctccggctgctccgaggcgagccgggctgccgagccagagcctgcgcctgcgcctgcgcctgctcgctctgtccttgtgccgctcagacctgaaggtttggtcactcattatgatttttagaatgttcggttgcttcttagtcgttgcataaatgatgagagggaggctgagaaaaagtagaaacaaaaactgtgagcattagatcttactgccaatctggtttgtacattgttggttgctagagaaaaaaaagatgtgaaggttttctagttttttttttacttgctgtgtcagtgccaattgttgctggggaatgtgccatggaaaataccagctggtgctatctgctatgggttccttttctgaatcaccattcaatgttggttttgtaaaaagaagaagaagaagagggacatgattggccggtctgatcatatggctgggagtgcagagtgctgcgccaccactatggtgactggagatcaggctttagctgctaagcttcttcggggcttcagatttcagtgggagcagcatattctatgccattatggagaggtccggggctcagggcctgtgatattctatgcttttgcttcgaggccatggttttaggctttttatcagtggtgtatgcacccgcaggtgggcccacacccagctattgatgtgcattggctagttagtagtgtttct

SEQ ID NO: 14400 - DNA, 3695 bp, Zea Mays
caaataattgataacgaaggtatgtttcaaccaaaaggaataaaatcacctgggaaactaagccgcatagaaaggtaatttatagaaaggttattattgtgagtaagatatctagtttcaaaattcaacgacccacgaggccacgcaacgcaattttttccttggtcaccgaatacctctgctgggctttgtctgtgtctcagcatgtccggttcgacgactcgtgccaacggccgaaccaacttagccacaggccacaacacagcccacagcccacattgtggaggcagcggcggagccttcgccggaggaactggggccaccgaggtagttggtggtgggagcctgggagggcttgcaaggggcgaaggaggtcgacgcagtctacaaggtcgtcggggagagggagatcgacgtcctcgcggcccggtgttgccgctgcctggtcgcctcgtcggtagcaccaagcgccacctagttatactataaaaccaaacttgtttgcgcctttggaatgtgcacacccatgggaatttttcttgatggtccactgctgacatgcacagacatctcttctacctctgccaattcaaaggccatgctgttataccagcagtagctgcaacgattcaactagttgtggcaaatttcggcacatccccaacactcgagatatcaagaaagcaaaggtgtgctaaccttcaaaatgcattgagaattttggaccttgtaccatccaagcatcatcatgaccaagaggaagttccgtcacatcaccgccttatcaatggctgtatgggtgacatctcgggagtccaatcaagactgcacactatgcgtaggggtaaagagagctttgctaactcaaactcaaatcaagcacagcctaaacacggtaacattgtctcaaataatacctcggtttgcccctccataactagactcacaaaggaagacatgtttatgcaaattgtggagttacataggaggggacaaatcagttcagatgcatccattttggcatctgcactgagttactgtgctgatgagaaaactcttaccacaggtgtacagttccatgctcaactagtgaaagtaggatatgtctcatctatccccattggcagctcgctgatcagtttttattcacgatgcagccaattggaaattgctcatcggattttccaaaatatgacagcaaaaagtactgtgacatggacagcattaatttctggttatgcccaagataatcaggtcgaaccatgtctccatttatttgcactgatgaggcagtctgtgtgcaagccaaatgacatcacatttgcaactatcttgagtgtctgcactaatcatgcatttcttgtacttggtaaaagtgtgcaagccctacaaatgagaatgggttttggttcctatgtgcatgtgtccaatgcattgatatcaatgtatgcaaaatgcgggagcattggtgaagcacgagctgtatttgagagcattacatgcaaagacctggtctcttggaactccttgatctttggatattcacagcatggccttgctgagcattgcctatacttgctaagagaaatggaaggacatataataccggatgcaatctccttcctaggtgtgctctcatcatgccggcatgcatgccttgtggcagagggccgacgctgcttcagggcaatgattgaacatggagtaataccagagatagatcactactcatgtatggttgatctttttggccgtgcaggactgcttgatgaagcatgggatctgatccagacgatgcccatgcctccaaatggtgtcatatggggctccctgctagcttcctgtaggctgcatgggagcatttcgatcggcatacaagctgcagagcaccgtctaaagctggaaccaagttgtgctgcaactcatgtccagctagcgaatttgtatgggagcattgggtgctgggatgatgtggcaagagtgaggaaagtgatgaaggagagagggctgaaaacaaatatcgggtgcagttggatagaagttggcaataaagtttatacatttacagcagaaaacagatcaaagaaccagttgagtttaaacaatatataaatttgaagatcattgcccgccatgttcagcttcatttgaagaggcactcaataggaattgacatgtgtcattcacacctcaaatatcttcaatctcgatgtaacatttaggagtcttgtttgcataaagtaaagaggaatcgcaccgagggataggcattgtgagtatgacgtgtgctttgcatgggccagcacctgactcagttcctgtgaaatcatgaatccaccaacggaggtcaaatacctgactgcagccagccagaatgtttacagccacacatgatgatcctatagctggctagaagaagaagaaatatttacagccatccagcataaccttagagctggtttgaagaggatgcaaccggtgcagctgcacaaatgcacaaggacatggagtacccaagaaggacactgctgcacacccctttctccgggcatccctctggtccaagccagccaatagatggagccacggccacagacggaagcaacttcgacgcgaacgtggtcatgatcctggctgtcctcctgtgcgcgctgatctgcgctctcgggctcaactccatcgtccggtgcgcgctgcggtgctcgagccgggtggtggtgggtcctgaaccgaaccaggtgacgcggcttgtccagagcgggctgaggaggaaggcgctccgagccatgccggtcctggtctactcgcctgggctgaggatcaatgctgccaacccgacatgcgcgatctgcctctcggacttcgaggcaggggagcatgtcagggtcctccccaaatgcaaccacggcttccatgtcaggtgcatcgaccggtggctgctggcgcggtcgacgtgcccgacgtgccggcagtccctgttcggagtgccgcagaaggcctccggctgctccgaggcgagccgggctgccgagccagagcctgcgcctgcgcctgcgcctgctcgctctgtccttgtgccgctcagacctgaaggtttggtcactcattatgatttttagaatgttcggttgcttcttagtcgttgcataaatgatgagagggaggctgagaaaaagtagaaacaaaaactgtgagcattagatcttactgccaatctggtttgtacattgttggttgctagagaaaaaaaagatgtgaaggttttctagttttttttttacttgctgtgtcagtgccaattgttgctggggaatgtgccatggaaaataccagctggtgctatctgctatgggttccttttctgaatcaccattcaatgttggttttgtaaaaagaagaagaagaagagggacatgattggccggtctgatcatatggctgggagtgcagagtgctgcgccaccactatggtgactggagatcaggctttagctgctaagcttcttcggggcttcagatttcagtgggagcagcatattctatgccattatggagaggtccggggctcagggcctgtgatattctatgcttttgcttcgaggccatggttttaggctttttatcagtggtgtatgcacccgcaggtgggcccacacccagctattgatgtgcattggctagttagtagtgtttct

SEQ ID NO: 14401 - DNA, 3121 bp, Zea Mays
caaataattgataacgaaggtatgtttcaaccaaaaggaataaaatcacctgggaaactaagccgcatagaaaggtaatttatagaaaggttattattgtgagtaagatatctagtttcaaaattcaacgacccacgaggccacgcaacgcaattttttccttggtcaccgaatacctctgctgggctttgtctgtgtctcagcatgtccggttcgacgactcgtgccaacggccgaaccaacttagccacaggccacaacacagcccacagcccacattgtggaggcagcggcggagccttcgccggaggaactggggccaccgaggtagttggtggtgggagcctgggagggcttgcaaggggcgaaggaggtcgacgcagtctacaaggtcgtcggggagagggagatcgacgtcctcgcggcccggtgttgccgctgcctggtcgcctcgtcggtagcaccaagcgccacctagccaattggaaattgctcatcggattttccaaaatatgacagcaaaaagtactgtgacatggacagcattaatttctggttatgcccaagataatcaggtcgaaccatgtctccatttatttgcactgatgaggcagtctgtgtgcaagccaaatgacatcacatttgcaactatcttgagtgtctgcactaatcatgcatttcttgtacttggtaaaagtgtgcaagccctacaaatgagaatgggttttggttcctatgtgcatgtgtccaatgcattgatatcaatgtatgcaaaatgcgggagcattggtgaagcacgagctgtatttgagagcattacatgcaaagacctggtctcttggaactccttgatctttggatattcacagcatggccttgctgagcattgcctatacttgctaagagaaatggaaggacatataataccggatgcaatctccttcctaggtgtgctctcatcatgccggcatgcatgccttgtggcagagggccgacgctgcttcagggcaatgattgaacatggagtaataccagagatagatcactactcatgtatggttgatctttttggccgtgcaggactgcttgatgaagcatgggatctgatccagacgatgcccatgcctccaaatggtgtcatatggggctccctgctagcttcctgtaggctgcatgggagcatttcgatcggcatacaagctgcagagcaccgtctaaagctggaaccaagttgtgctgcaactcatgtccagctagcgaatttgtatgggagcattgggtgctgggatgatgtggcaagagtgaggaaagtgatgaaggagagagggctgaaaacaaatatcgggtgcagttggatagaagttggcaataaagtttatacatttacagcagaaaacagatcaaagaaccaggtaaacaatgtcctagttgttctcgattgcttgcagtcacatatggatcacaagtatgatatactgattgagggtctggattgggatgatcctgaacatataaagttgagtttaaacaatatataaatttgaagatcattgcccgccatgttcagcttcatttgaagaggcactcaataggaattgacatgtgtcattcacacctcaaatatcttcaatctcgatgtaacatttaggagtcttgtttgcataaagtaaagaggaatcgcaccgagggataggcattgtgagtatgacgtgtgctttgcatgggccagcacctgactcagttcctgtgaaatcatgaatccaccaacggaggtcaaatacctgactgcagccagccagaatgtttacagccacacatgatgatcctatagctggctagaagaagaagaaatatttacagccatccagcataaccttagagctggtttgaagaggatgcaaccggtgcagctgcacaaatgcacaaggacatggagtacccaagaaggacactgctgcacacccctttctccgggcatccctctggtccaagccagccaatagatggagccacggccacagacggaagcaacttcgacgcgaacgtggtcatgatcctggctgtcctcctgtgcgcgctgatctgcgctctcgggctcaactccatcgtccggtgcgcgctgcggtgctcgagccgggtggtggtgggtcctgaaccgaaccaggtgacgcggcttgtccagagcgggctgaggaggaaggcgctccgagccatgccggtcctggtctactcgcctgggctgaggatcaatgctgccaacccgacatgcgcgatctgcctctcggacttcgaggcaggggagcatgtcagggtcctccccaaatgcaaccacggcttccatgtcaggtgcatcgaccggtggctgctggcgcggtcgacgtgcccgacgtgccggcagtccctgttcggagtgccgcagaaggcctccggctgctccgaggcgagccgggctgccgagccagagcctgcgcctgcgcctgcgcctgctcgctctgtccttgtgccgctcagacctgaaggtttggtcactcattatgatttttagaatgttcggttgcttcttagtcgttgcataaatgatgagagggaggctgagaaaaagtagaaacaaaaactgtgagcattagatcttactgccaatctggtttgtacattgttggttgctagagaaaaaaaagatgtgaaggttttctagttttttttttacttgctgtgtcagtgccaattgttgctggggaatgtgccatggaaaataccagctggtgctatctgctatgggttccttttctgaatcaccattcaatgttggttttgtaaaaagaagaagaagaagagggacatgattggccggtctgatcatatggctgggagtgcagagtgctgcgccaccactatggtgactggagatcaggctttagctgctaagcttcttcggggcttcagatttcagtgggagcagcatattctatgccattatggagaggtccggggctcagggcctgtgatattctatgcttttgcttcgaggccatggttttaggctttttatcagtggtgtatgcacccgcaggtgggcccacacccagctattgatgtgcattggctagttagtagtgtttct

SEQ ID NO: 14402 - DNA, 4035 bp, Zea Mays
caaataattgataacgaaggtatgtttcaaccaaaaggaataaaatcacctgggaaactaagccgcatagaaaggtaatttatagaaaggttattattgtgagtaagatatctagtttcaaaattcaacgacccacgaggccacgcaacgcaattttttccttggtcaccgaatacctctgctgggctttgtctgtgtctcagcatgtccggttcgacgactcgtgccaacggccgaaccaacttagccacaggccacaacacagcccacagcccacattgtggaggcagcggcggagccttcgccggaggaactggggccaccgaggtagttggtggtgggagcctgggagggcttgcaaggggcgaaggaggtcgacgcagtctacaaggtcgtcggggagagggagatcgacgtcctcgcggcccggtgttgccgctgcctggtcgcctcgtcggtagcaccaagcgccacctagttatactataaaaccaaacttgtttgcgcctttggaatgtgcacacccatgggaatttttcttgatggtccactgctgacatgcacagacatctcttctacctctgccaattcaaaggccatgctgttataccagcagtagctgcaacgattcaactagttgtggcaaatttcggcacatccccaacactcgagatatcaagaaagcaaaggtgtgctaaccttcaaaatgcattgagaattttggaccttgtaccatccaagcatcatcatgaccaagaggaagttccgtcacatcaccgccttatcaatggctgtatgggtgacatctcgggagtccaatcaagactgcacactatgcgtaggggtaaagagagctttgctaactcaaactcaaatcaagcacagcctaaacacggtaacattgtctcaaataatacctcggtttgcccctccataactagactcacaaaggaagacatgtttatgcaaattgtggagttacataggaggggacaaatcagttcagatgcatccattttggcatctgcactgagttactgtgctgatgagaaaactcttaccacaggtgtacagttccatgctcaactagtgaaagtaggatatgtctcatctatccccattggcagctcgctgatcagtttttattcacgatgcagccaattggaaattgctcatcggattttccaaaatatgacagcaaaaagtactgtgacatggacagcattaatttctggttatgcccaagataatcaggtcgaaccatgtctccatttatttgcactgatgaggcagtctgtgtgcaagccaaatgacatcacatttgcaactatcttgagtgtctgcactaatcatgcatttcttgtacttggtaaaagtgtgcaagccctacaaatgagaatgggttttggttcctatgtgcatgtgtccaatgcattgatatcaatgtatgcaaaatgcgggagcattggtgaagcacgagctgtatttgagagcattacatgcaaagacctggtctcttggaactccttgatctttggatattcacagcatggccttgctgagcattgcctatacttgctaagagaaatggaaggacatataataccggatgcaatctccttcctaggtgtgctctcatcatgccggcatgcatgccttgtggcagagggccgacgctgcttcagggcaatgattgaacatggagtaataccagagatagatcactactcatgtatggttgatctttttggccgtgcaggactgcttgatgaagcatgggatctgatccagacgatgcccatgcctccaaatggtgtcatatggggctccctgctagcttcctgtaggctgcatgggagcatttcgatcggcatacaagctgcagagcaccgtctaaagctggaaccaagttgtgctgcaactcatgtccagctagcgaatttgtatgggagcattgggtgctgggatgatgtggcaagagtgaggaaagtgatgaaggagagagggctgaaaacaaatatcgggtgcagttggatagaagttggcaataaagtttatacatttacagcagaaaacagatcaaagaaccagatcattgcccgccatgttcagcttcatttgaagaggcactcaataggaattgacatgtgtcattcacacctcaaatatcttcaatctcgatgtaacatttaggagtcttgtttgcataaagtaaagaggaatcgcaccgagggataggcattgtgagtatgacgtgtgctttgcatgggccagcacctgactcagttcctgtgaaatcatgaatccaccaacggaggtcaaatacctgactgcagccagccagaatgtttacagccacacatgatgatcctatagctggctagaagaagaagaaatatttacagccatccagcataaccttagagctggtttgaagaggatgcaaccggtgcagctgcacaaatggcagacaagagattgtgctgtgtgtggccctctgattcccaaaaaaaaacaccactgagatgcagtccacttgccacaagcaaagaagcttccatttgtgcacattccaacctttgccaaatgctttttgtctcaattggctggcagagacgaaagggacaagggcgaaagaggcagcatatcatattaccaaataaaataatccgcgtactgtattattgcagcctcaaagagcctataaatacttgagcacagaccagtttatggttctacatgaggcagactaaaaacaagaacatacctacgcaactagcagagcttacagatttgcacccacaggactctgaataaagctggggctttttgcagcacaaggacatggagtacccaagaaggacactgctgcacacccctttctccgggcatccctctggtccaagccagccaatagatggagccacggccacagacggaagcaacttcgacgcgaacgtggtcatgatcctggctgtcctcctgtgcgcgctgatctgcgctctcgggctcaactccatcgtccggtgcgcgctgcggtgctcgagccgggtggtggtgggtcctgaaccgaaccaggtgacgcggcttgtccagagcgggctgaggaggaaggcgctccgagccatgccggtcctggtctactcgcctgggctgaggatcaatgctgccaacccgacatgcgcgatctgcctctcggacttcgaggcaggggagcatgtcagggtcctccccaaatgcaaccacggcttccatgtcaggtgcatcgaccggtggctgctggcgcggtcgacgtgcccgacgtgccggcagtccctgttcggagtgccgcagaaggcctccggctgctccgaggcgagccgggctgccgagccagagcctgcgcctgcgcctgcgcctgctcgctctgtccttgtgccgctcagacctgaaggtttggtcactcattatgatttttagaatgttcggttgcttcttagtcgttgcataaatgatgagagggaggctgagaaaaagtagaaacaaaaactgtgagcattagatcttactgccaatctggtttgtacattgttggttgctagagaaaaaaaagatgtgaaggttttctagttttttttttacttgctgtgtcagtgccaattgttgctggggaatgtgccatggaaaataccagctggtgctatctgctatgggttccttttctgaatcaccattcaatgttggttttgtaaaaagaagaagaagaagagggacatgattggccggtctgatcatatggctgggagtgcagagtgctgcgccaccactatggtgactggagatcaggctttagctgctaagcttcttcggggcttcagatttcagtgggagcagcatattctatgccattatggagaggtccggggctcagggcctgtgatattctatgcttttgcttcgaggccatggttttaggctttttatcagtggtgtatgcacccgcaggtgggcccacacccagctattgatgtgcattggctagttagtagtgtttct

SEQ ID NO: 14403 - DNA, 2677 bp, Zea Mays
caaataattgataacgaaggtatgtttcaaccaaaaggaataaaatcacctgggaaactaagccgcatagaaaggtaatttatagaaaggttattattgtgagtaagatatctagtttcaaaattcaacgacccacgaggccacgcaacgcaattttttccttggtcaccgaatacctctgctgggctttgtctgtgtctcagcatgtccggttcgacgactcgtgccaacggccgaaccaacttagccacaggccacaacacagcccacagcccacattgtggaggcagcggcggagccttcgccggaggaactggggccaccgaggtagttggtggtgggagcctgggagggcttgcaaggggcgaaggaggtcgacgcagtctacaaggtcgtcggggagagggagatcgacgtcctcgcggcccggtgttgccgctgcctggtcgcctcgtcggtagcaccaagcgccacctagttatactataaaaccaaacttgtttgcgcctttggaatgtgcacacccatgggaatttttcttgatggtccactgctgacatgcacagacatctcttctacctctgccaattcaaaggccatgctgttataccagcagtagctgcaacgattcaactagttgtggcaaatttcggcacatccccaacactcgagatatcaagaaagcaaaggtgtgctaaccttcaaaatgcattgagaattttggaccttgtaccatccaagcatcatcatgaccaagaggaagttccgtcacatcaccgccttatcaatggctgtatgggtgacatctcgggagtccaatcaagactgcacactatgcgtaggggtaaagagagctttgctaactcaaactcaaatcaagcacagcctaaacacggtaacattgtctcaaataatacctcggtttgcccctccataactagactcacaaaggaagacatgtttatgcaaattgtggagttacataggaggggacaaatcagttcagatgcatccattttggcatctgcactgagttactgtgctgatgagaaaactcttaccacaggtgtacagttccatgctcaactagtgaaagtaggatatgtctcatctatccccattggcagctcgctgatcagtttttattcacgatgcagccaattggaaattgctcatcggattttccaaaatatgacagcaaaaagtactgtgacatggacagcattaatttctggttatgcccaagataatcaggtcgaaccatgtctccatttatttgcactgatgaggcagtctgtgtgcaagccaaatgacatcacatttgcaactatcttgagtgtctgcactaatcatgcatttcttgtacttggtaaaagtgtgcaagccctacaaatgagaatgggttttggttcctatgtgcatgtgtccaatgcattgatatcaatgtatgcaaaatgcgggagcattggtgaagcacgagctgtatttgagagcattacatgcaaagacctggtctcttggaactccttgatctttggatattcacagcatggccttgctgagcattgcctatacttgctaagagaaatggaaggacatataataccggatgcaatctccttcctaggtgtgctctcatcatgccggcatgcatgccttgtggcagagggccgacgctgcttcagggcaatgattgaacatggagtaataccagagatagatcactactcatgtatggttgatctttttggccgtgcaggactgcttgatgaagcatgggatctgatccagacgatgcccatgcctccaaatggtgtcatatggggctccctgctagcttcctgtaggctgcatgggagcatttcgatcggcatacaagctgcagagcaccgtctaaagctggaaccaagttgtgctgcaactcatgtccagctagcgaatttgtatgggagcattgggtgctgggatgatgtggcaagagtgaggaaagtgatgaaggagagagggctgaaaacaaatatcgggtgcagttggatagaagttggcaataaagtttatacatttacagcagaaaacagatcaaagaaccagttgagtttaaacaatatataaatttgaagatcattgcccgccatgttcagcttcatttgaagaggcactcaataggaattgacatgtgtcattcacacctcaaatatcttcaatctcgatgtaacatttaggagtcttgtttgcataaagtaaagaggaatcgcaccgagggataggcattgtgagtatgacgtgtgctttgcatgggccagcacctgactcagttcctgtgaaatcatgaatccaccaacggaggtcaaatacctgactgcagccagccagaatgtttacagccacacatgatgatcctatagctggctagaagaagaagaaatatttacagccatccagcataaccttagagctggtttgaagaggatgcaaccggtgcagctgcacaaatgaaggacggattggccagtgataaagcttgggcgctgtgtcaaattgctattgctcgtgataattttctcctgtttgcttaggcgatgtggctctcgtatcagctgctttagagaatcgacaagaacgttggtttgtgctcgctgagagagaagtgcctggatgcccactcataagctttttg

SEQ ID NO: 14404 - DNA, 1603 bp, Zea Mays
ttgtctcactgagtcaccaagttgtgggttcgaagcaatatctttgcatttacattttatagagggaagacttgcctcggtttatcccttctccagatcctactcatgtgggagcctctggcctagttaggagtcttgtttgcataaagtaaagaggaatcgcaccgagggataggcattgtgagtatgacgtgtgctttgcatgggccagcacctgactcagttcctgtgaaatcatgaatccaccaacggaggtcaaatacctgactgcagccagccagaatgtttacagccacacatgatgatcctatagctggctagaagaagaagaaatatttacagccatccagcataaccttagagctggtttgaagaggatgcaaccggtgcagctgcacaaatgcacaaggacatggagtacccaagaaggacactgctgcacacccctttctccgggcatccctctggtccaagccagccaatagatggagccacggccacagacggaagcaacttcgacgcgaacgtggtcatgatcctggctgtcctcctgtgcgcgctgatctgcgctctcgggctcaactccatcgtccggtgcgcgctgcggtgctcgagccgggtggtggtgggtcctgaaccgaaccaggtgacgcggcttgtccagagcgggctgaggaggaaggcgctccgagccatgccggtcctggtctactcgcctgggctgaggatcaatgctgccaacccgacatgcgcgatctgcctctcggacttcgaggcaggggagcatgtcagggtcctccccaaatgcaaccacggcttccatgtcaggtgcatcgaccggtggctgctggcgcggtcgacgtgcccgacgtgccggcagtccctgttcggagtgccgcagaaggcctccggctgctccgaggcgagccgggctgccgagccagagcctgcgcctgcgcctgcgcctgctcgctctgtccttgtgccgctcagacctgaaggtttggtcactcattatgatttttagaatgttcggttgcttcttagtcgttgcataaatgatgagagggaggctgagaaaaagtagaaacaaaaactgtgagcattagatcttactgccaatctggtttgtacattgttggttgctagagaaaaaaaagatgtgaaggttttctagttttttttttacttgctgtgtcagtgccaattgttgctggggaatgtgccatggaaaataccagctggtgctatctgctatgggttccttttctgaatcaccattcaatgttggttttgtaaaaagaagaagaagaagagggacatgattggccggtctgatcatatggctgggagtgcagagtgctgcgccaccactatggtgactggagatcaggctttagctgctaagcttcttcggggcttcagatttcagtgggagcagcatattctatgccattatggagaggtccggggctcagggcctgtgatattctatgcttttgcttcgaggccatggttttaggctttttatcagtggtgtatgcacccgcaggtgggcccacacccagctattgatgtgcattggctagttagtagtgtttct

SEQ ID NO: 14405 - DNA, 3850 bp, Zea Mays
ccaaatttccctaaaatattagatttgaaacggatgttgttaaatcattccgatccacgcagtttaacgccatcaagatcgcaagtccagatcgaaatttctctcttcaccaaacacacgctctctctccccttcccatctccttcctcccgccccagatccgagcccggcgcccgagttcatggcgagcgacagcgacgtcgacgaggacgagctcctgcagattgcgctgcaggagcaggcggcgcgggacctcagccaccagcgcccgcccgccgccaacaagcccgttgtcaacctcgtccgcccacccgcccccaatgctcgcggcggcaacgccagggccgggggcgccgcagcgaaggcgcgccagcccagccgcggcggcgacgaggacgacgactcggaggtcgagctgctctccatctcctccggcgacgaggacgacaatccccgcgcccgcggcccgccgccgccccgcgggggcgggggtggacgcgccggagcgcggagggccgcgtcacgggacgatggggacttcgacgatgaggagcccagaagctggaagcgcgtcgacgaggcagagcttgctcgcagggttcgagaaatgcgtgaagcaaaggtggctcctaacattcaagaacttgatcagaaagcagcagctgctgctgcagctgctgctcgaaaggccctcacgagtgtacagactttaccaaaaggagttgaggttttagatcctttgggccttggtgtcattgataataaatccctgcggttgatcactgacgcttcagtaagttctccaatttcaagggagaagtctcaaggtttggaccccaatatgcgagacaaagttatctattcatctccaaattttgatcccaaagttttcctttcgtgggtccacaaagacacgagcgctgctgacttagaggctggtgctctcaccttgaaaactgatctcaaagggagaacacagcagaaaaaacagttagtcaaggagaacttcgattgttttgtctcgtgcaaaactacaatagatgacattgagtcgaaattgagacagatagaggaagatcctgaaggtgcaggtactgctcacttgtattcagtgacacaaaaaattagcggtgtggcaaatcgtgcatttgagcctctatttgagaggcccaagctgaaaagatcagatctgttcagggaatgcttcaaagattccgaacactatttaacctaccaagtgcaatccgtgggaacattagaaaaggagaatatgatcttgctgtcagagagtaccaaaaagcaaagtcaattgttcttccttctcatgtatggcaacttcctgttttgttttatctgcctatgttatccaattggatggtgaagcatgcatgcatgaatgagcgcatggtatggcgtaatcccacagctgataagatattgtgcatgcattgtccagctcatgcactcaatgaaattaggtggggatactaaaacgtgtactcgaagaggtcgaaaaggtgatgcaagaattcaggggcatgctttataagtccatggaggatcctcatcttgatcttgctgagattgagaacattgttcgtctattgttggagttggaacctgaaacagatccagtgtggcattatttaaatattcagaatagcaggattcatggattgtttgaaaagtgtactcaagatcatgactcgagaatggaagttttgcaaaataaaattcgcgaaaaagtgctctctgattcgaagtggaggcagctgcaacaagattcaaataaatctctggaagttgattctaccattggtgattctcctcgagttgatcagttgtcaacaaactttatggctgaggaagctgatagtttaagggccacctacattcgtaggctaacttctgtactgatccagcatgttccagctttctggagattagctttatctgttttcagtggaaaatttgccaaggcagcttctggtaacgtagtttctgattttgatgtgaatgcaaagccgactgcaaataagaatgatgaaaaaggtggagaagtaaagtacacaaaccacactcttgatgaagttggtagtatggttcaggctactatatcggcttttgacactaaggttcagagtaccttccgtgattttgaggaatgcaacattctttgtccatacatgagtgacactataaaagaaatagctaaggcctgtcagactcttgaagggaaggattcgtctccaactgctgtatgattcttaatctgatgagcgagactgcgaagtcatatgacatttctcaaccacttcaggaaatcaatgagtctgttagacttgcatttttgaattcctttctggactttgctggttatctggagaggtttggaggtgaactaaccgagaacagaccaaacaaagaaaacaattatgtctcaaatggatacataaatggtactagagaaacatttgttaacacagatggagatttgcacaaaaagctgctggttgttttgagtaacattgggtattgtaaagctgaactttcagaagaactttacagcaaatatagacacatttggtctccagtcaggaataatgaggagcgaagttctgacatgcgagacctgaggacttctttctctgcacttgaagagaaagtcctggaccaatatacttttgcaaagtcaaacttgatcagaagtgctgcacaaagttatcttttggattctgggatttattggggagcagcgccaatggtaaagggcattcgagatgcaactcttgacttactgcacatccttgtagcagtacatgcagaggtatactctggcgctcggcctctgttggagaagacaatgaaaattttggttgagggtttggtcgacatctttcttagtgtttttcatgagaataagaccaaagatattagattgttggatgcgaatggtttttgtcaactgatgcttgagcttgagtattttgagactgtactgcacacgtacttctcacctgaggcgcaacaggctatgaaatctttacaagagaatttgttggaaaaggcctgtgaaagtgttgcagaagccatggaaaatcctggacaccaacgtcgaccaacccgtggcagtgaagatacagcatcggatgacagacagccatcagtatcacctgatgatttgcttgtgcttgctcagcagtgcagtagtgatctgctgcaaggggagttggagaggactcgattgaacatagcctgtttcatggagtcgacccttcaaccaacagctgcgccagcaggcccaaagcctgccgcacattcttcttaccaagcacagcatgctcccgtccaaacgtcctcgcctagttttagaaggcagcagactggtacaagttcccctgtagtctccaggcggcgccggtgagcttagtgcatctttccatcattggcgtagcctcttcccggagtttccttccttttcccccctcacatgtgtgctttttttaatcacttgtaattgtcatcctgttgtcatgtgttacgaatttcgatccattcttttggtgttgtataagatgaaaaggaggagtacagtactggtgctgctgcacgggatcatggaattgtataatatcgacgagtcaaatattattgctgcttgaagataccaccacagctttatgtatatggaattctggagttgtcggtctgcgccaacttccttcctgcggtcgtcaccgcatgtttgtacattcgtcgcttggacagttttatgtatcccgagatttgttaatattgtatcagttggttcgtgattgttgatatgtctgcatgctttgtgctgtggagg

SEQ ID NO: 14406 - DNA, 3776 bp, Zea Mays
cgcagtttaacgccatcaagatcgcaagtccagatcgaaatttctctcttcaccaaacacacgctctctctccccttcccatctccttcctcccgccccagatccgagcccggcgcccgagttcatggcgagcgacagcgacgtcgacgaggacgagctcctgcagattgcgctgcaggagcaggcggcgcgggacctcagccaccagcgcccgcccgccgccaacaagcccgttgtcaacctcgtccgcccacccgcccccaatgctcgcggcggcaacgccagggccgggggcgccgcagcgaaggcgcgccagcccagccgcggcggcgacgaggacgacgactcggaggtcgagctgctctccatctcctccggcgacgaggacgacaatccccgcgcccgcggcccgccgccgccccgcgggggcgggggtggacgcgccggagcgcggagggccgcgtcacgggacgatggggacttcgacgatgaggagcccagaagctggaagcgcgtcgacgaggcagagcttgctcgcagggttcgagaaatgcgtgaagcaaaggtggctcctaacattcaagaacttgatcagaaagcagcagctgctgctgcagctgctgctcgaaaggccctcacgagtgtacagactttaccaaaaggagttgaggttttagatcctttgggccttggtgtcattgataataaatccctgcggttgatcactgacgcttcagtaagttctccaatttcaagggagaagtctcaaggtttggaccccaatatgcgagacaaagttatctattcatctccaaattttgatcccaaagttttcctttcgtgggtccacaaagacacgagcgctgctgacttagaggctggtgctctcaccttgaaaactgatctcaaagggagaacacagcagaaaaaacagttagtcaaggagaacttcgattgttttgtctcgtgcaaaactacaatagatgacattgagtcgaaattgagacagatagaggaagatcctgaaggtgcaggcccaagctgaaaagatcagatctgttcagggaatgcttcaaagattccgaacactatttaacctaccaagtgcaatccgtgggaacattagaaaaggagaatatgatcttgctgtcagagagtaccaaaaagcaaagtcaattgttcttccttctcatgtggggatactaaaacgtgtactcgaagaggtcgaaaaggtgatgcaagaattcaggggcatgctttataagtccatggaggatcctcatcttgatcttgctgagattgagaacattgttcgtctattgttggagttggaacctgaaacagatccagtgtggcattatttaaatattcagaatagcaggattcatggattgtttgaaaagtgtactcaagatcatgactcgagaatggaagttttgcaaaataaaattcgcgaaaaagtgctctctgattcgaagtggaggcagctgcaacaagattcaaataaatctctggaagttgattctaccattggtgattctcctcgagttgatcagttgtcaacaaactttatggctgaggaagctgatagtttaagggccacctacattcgtaggctaacttctgtactgatccagcatgttccagctttctggagattagctttatctgttttcagtggaaaatttgccaaggcagcttctggtaacgtagtttctgattttgatgtgaatgcaaagccgactgcaaataagaatgatgaaaaaggtggagaagtaaagtacacaaaccacactcttgatgaagttggtagtatggttcaggctactatatcggcttttgacactaaggttcagagtaccttccgtgattttgaggaatgcaacattctttgtccatacatgagtgacactataaaagaaatagctaaggcctgtcagactcttgaagggaaggattcgtctccaactgctgtaaaaatgttgcgcacacttcattttgaaatgacaaagctttacattctacggctttgttcatggatgcgggcaacaacaaaggagatatcaaaagatgagacttgggttactttatccacccttgagagaaacaagtcccagtatgcgatttcatgcttgcccctggagttccgtgacataacagtttcagctatggaccgaattgatactatgattcttaatctgatgagcgagactgcgaagtcatatgacatttctcaaccacttcaggaaatcaatgagtctgttagacttgcatttttgaattcctttctggactttgctggttatctggagaggtttggaggtgaactaaccgagaacagaccaaacaaagaaaacaattatgtctcaaatggatacataaatggtactagagaaacatttgttaacacagatggagatttgcacaaaaagctgctggttgttttgagtaacattgggtattgtaaagctgaactttcagaagaactttacagcaaatatagacacatttggtctccagtcaggaataatgaggagcgaagttctgacatgcgagacctgaggacttctttctctgcacttgaagagaaagtcctggaccaatatacttttgcaaagtcaaacttgatcagaagtgctgcacaaagttatcttttggattctgggatttattggggagcagcgccaatggtaaagggcattcgagatgcaactcttgacttactgcacatccttgtagcagtacatgcagaggtatactctggcgctcggcctctgttggagaagacaatgaaaattttggttgagggtttggtcgacatctttcttagtgtttttcatgagaataagaccaaagatattagattgttggatgcgaatggtttttgtcaactgatgcttgagcttgagtattttgagactgtactgcacacgtacttctcacctgaggcgcaacaggctatgaaatctttacaagagaatttgttggaaaaggcctgtgaaagtgttgcagaagccatggaaaatcctggacaccaacgtcgaccaacccgtggcagtgaagatacagcatcggatgacagacagccatcagtatcacctgatgatttgcttgtgcttgctcagcagtgcagtagtgatctgctgcaaggggagttggagaggactcgattgaacatagcctgtttcatggagtcgacccttcaaccaacagctgcgccagcaggcccaaagcctgccgcacattcttcttaccaagcacagcatgctcccgtccaaacgtcctcgcctagttttagaaggcagcagactggtacaagttcccctgtagtctccaggcggcgccggtgagcttagtgcatctttccatcattggcgtagcctcttcccggagtttccttccttttcccccctcacatgtgtgctttttttaatcacttgtaattgtcatcctgttgtcatgtgttacgaatttcgatccattcttttggtgttgtataagatgaaaaggaggagtacagtactggtgctgctgcacgggatcatggaattgtataatatcgacgagtcaaatattattgctgcttgaagataccaccacagctttatgtatatggaattctggagttgtcggtctgcgccaacttccttcctgcggtcgtcaccgcatgtttgtacattcgtcgcttggacagttttatgtatcccgagatttgttaatattgtatcagttggttcgtgattgttgatatgtctgcatgctttgtgctgtggagg

SEQ ID NO: 14407 - DNA, 3771 bp, Zea Mays
cgcaagtccagatcgaaatttctctcttcaccaaacacacgctctctctccccttcccatctccttcctcccgccccagatccgagcccggcgcccgagttcatggcgagcgacagcgacgtcgacgaggacgagctcctgcagattgcgctgcaggagcaggcggcgcgggacctcagccaccagcgcccgcccgccgccaacaagcccgttgtcaacctcgtccgcccacccgcccccaatgctcgcggcggcaacgccagggccgggggcgccgcagcgaaggcgcgccagcccagccgcggcggcgacgaggacgacgactcggaggtcgagctgctctccatctcctccggcgacgaggacgacaatccccgcgcccgcggcccgccgccgccccgcgggggcgggggtggacgcgccggagcgcggagggccgcgtcacgggacgatggggacttcgacgatgaggagcccagaagctggaagcgcgtcgacgaggcagagcttgctcgcagggttcgagaaatgcgtgaagcaaaggtggctcctaacattcaagaacttgatcagaaagcagcagctgctgctgcagctgctgctcgaaaggccctcacgagtgtacagactttaccaaaaggagttgaggttttagatcctttgggccttggtgtcattgataataaatccctgcggttgatcactgacgcttcagtaagttctccaatttcaagggagaagtctcaaggtttggaccccaatatgcgagacacgagcgctgctgacttagaggctggtgctctcaccttgaaaactgatctcaaagggagaacacagcagaaaaaacagttagtcaaggagaacttcgattgttttgtctcgtgcaaaactacaatagatgacattgagtcgaaattgagacagatagaggaagatcctgaaggtgcaggtactgctcacttgtattcagtgacacaaaaaattagcggtgtggcaaatcgtgcatttgagcctctatttgagaggcaggcccaagctgaaaagatcagatctgttcagggaatgcttcaaagattccgaacactatttaacctaccaagtgcaatccgtgggaacattagaaaaggagaatatgatcttgctgtcagagagtaccaaaaagcaaagtcaattgttcttccttctcatgtggggatactaaaacgtgtactcgaagaggtcgaaaaggtgatgcaagaattcaggggcatgctttataagtccatggaggatcctcatcttgatcttgctgagattgagaacattgttcgtctattgttggagttggaacctgaaacagatccagtgtggcattatttaaatattcagaatagcaggattcatggattgtttgaaaagtgtactcaagatcatgactcgagaatggaagttttgcaaaataaaattcgcgaaaaagtgctctctgattcgaagtggaggcagctgcaacaagattcaaataaatctctggaagttgattctaccattggtgattctcctcgagttgatcagttgtcaacaaactttatggctgaggaagctgatagtttaagggccacctacattcgtaggctaacttctgtactgatccagcatgttccagctttctggagattagctttatctgttttcagtggaaaatttgccaaggcagcttctggtaacgtagtttctgattttgatgtgaatgcaaagccgactgcaaataagaatgatgaaaaaggtggagaagtaaagtacacaaaccacactcttgatgaagttggtagtatggttcaggctactatatcggcttttgacactaaggttcagagtaccttccgtgattttgaggaatgcaacattctttgtccatacatgagtgacactataaaagaaatagctaaggcctgtcagactcttgaagggaaggattcgtctccaactgctgtaaaaatgttgcgcacacttcattttgaaatgacaaagctttacattctacggctttgttcatggatgcgggcaacaacaaaggagatatcaaaagatgagacttgggttactttatccacccttgagagaaacaagtcccagtatgcgatttcatgcttgcccctggagttccgtgacataacagtttcagctatggaccgaattgatactatgattcttaatctgatgagcgagactgcgaagtcatatgacatttctcaaccacttcaggaaatcaatgagtctgttagacttgcatttttgaattcctttctggactttgctggttatctggagaggtttggaggtgaactaaccgagaacagaccaaacaaagaaaacaattatgtctcaaatggatacataaatggtactagagaaacatttgttaacacagatggagatttgcacaaaaagctgctggttgttttgagtaacattgggtattgtaaagctgaactttcagaagaactttacagcaaatatagacacatttggtctccagtcaggaataatgaggagcgaagttctgacatgcgagacctgaggacttctttctctgcacttgaagagaaagtcctggaccaatatacttttgcaaagtcaaacttgatcagaagtgctgcacaaagttatcttttggattctgggatttattggggagcagcgccaatggtaaagggcattcgagatgcaactcttgacttactgcacatccttgtagcagtacatgcagaggtatactctggcgctcggcctctgttggagaagacaatgaaaattttggttgagggtttggtcgacatctttcttagtgtttttcatgagaataagaccaaagatattagattgttggatgcgaatggtttttgtcaactgatgcttgagcttgagtattttgagactgtactgcacacgtacttctcacctgaggcgcaacaggctatgaaatctttacaagagaatttgttggaaaaggcctgtgaaagtgttgcagaagccatggaaaatcctggacaccaacgtcgaccaacccgtggcagtgaagatacagcatcggatgacagacagccatcagtatcacctgatgatttgcttgtgcttgctcagcagtgcagtagtgatctgctgcaaggggagttggagaggactcgattgaacatagcctgtttcatggagtcgacccttcaaccaacagctgcgccagcaggcccaaagcctgccgcacattcttcttaccaagcacagcatgctcccgtccaaacgtcctcgcctagttttagaaggcagcagactggtacaagttcccctgtagtctccaggcggcgccggtgagcttagtgcatctttccatcattggcgtagcctcttcccggagtttccttccttttcccccctcacatgtgtgctttttttaatcacttgtaattgtcatcctgttgtcatgtgttacgaatttcgatccattcttttggtgttgtataagatgaaaaggaggagtacagtactggtgctgctgcacgggatcatggaattgtataatatcgacgagtcaaatattattgctgcttgaagataccaccacagctttatgtatatggaattctggagttgtcggtctgcgccaacttccttcctgcggtcgtcaccgcatgtttgtacattcgtcgcttggacagttttatgtatcccgagatttgttaatattgtatcagttggttcgtgattgttgatatgtctgcatgctttgtgctgtggagg

SEQ ID NO: 14408 - DNA, 3761 bp, Zea Mays
tccagatcgaaatttctctcttcaccaaacacacgctctctctccccttcccatctccttcctcccgccccagatccgagcccggcgcccgagttcatggcgagcgacagcgacgtcgacgaggacgagctcctgcagattgcgctgcaggagcaggcggcgcgggacctcagccaccagcgcccgcccgccgccaacaagcccgttgtcaacctcgtccgcccacccgcccccaatgctcgcggcggcaacgccagggccgggggcgccgcagcgaaggcgcgccagcccagccgcggcggcgacgaggacgacgactcggaggtcgagctgctctccatctcctccggcgacgaggacgacaatccccgcgcccgcggcccgccgccgccccgcgggggcgggggtggacgcgccggagcgcggagggccgcgtcacgggacgatggggacttcgacgatgaggagcccagaagctggaagcgcgtcgacgaggcagagcttgctcgcagggttcgagaaatgcgtgaagcaaaggtggctcctaacattcaagaacttgatcagaaagcagcagctgctgctgcagctgctgctcgaaaggccctcacgagtgtacagactttaccaaaaggagttgaggttttagatcctttgggccttggtgtcattgataataaatccctgcggttgatcactgacgcttcagtaagttctccaatttcaagggagaagtctcaaggtttggaccccaatatgcgagacacgagcgctgctgacttagaggctggtgctctcaccttgaaaactgatctcaaagggagaacacagcagaaaaaacagttagtcaaggagaacttcgattgttttgtctcgtgcaaaactacaatagatgacattgagtcgaaattgagacagatagaggaagatcctgaaggtgcaggtactgctcacttgtattcagtgacacaaaaaattagcggtgtggcaaatcgtgcatttgagcctctatttgagaggcccaagctgaaaagatcagatctgttcagggaatgcttcaaagattccgaacactatttaacctaccaagtgcaatccgtgggaacattagaaaaggagaatatgatcttgctgtcagagagtaccaaaaagcaaagtcaattgttcttccttctcatgtggggatactaaaacgtgtactcgaagaggtcgaaaaggtgatgcaagaattcaggggcatgctttataagtccatggaggatcctcatcttgatcttgctgagattgagaacattgttcgtctattgttggagttggaacctgaaacagatccagtgtggcattatttaaatattcagaatagcaggattcatggattgtttgaaaagtgtactcaagatcatgactcgagaatggaagttttgcaaaataaaattcgcgaaaaagtgctctctgattcgaagtggaggcagctgcaacaagattcaaataaatctctggaagttgattctaccattggtgattctcctcgagttgatcagttgtcaacaaactttatggctgaggaagctgatagtttaagggccacctacattcgtaggctaacttctgtactgatccagcatgttccagctttctggagattagctttatctgttttcagtggaaaatttgccaaggcagcttctggtaacgtagtttctgattttgatgtgaatgcaaagccgactgcaaataagaatgatgaaaaaggtggagaagtaaagtacacaaaccacactcttgatgaagttggtagtatggttcaggctactatatcggcttttgacactaaggttcagagtaccttccgtgattttgaggaatgcaacattctttgtccatacatgagtgacactataaaagaaatagctaaggcctgtcagactcttgaagggaaggattcgtctccaactgctgtaaaaatgttgcgcacacttcattttgaaatgacaaagctttacattctacggctttgttcatggatgcgggcaacaacaaaggagatatcaaaagatgagacttgggttactttatccacccttgagagaaacaagtcccagtatgcgatttcatgcttgcccctggagttccgtgacataacagtttcagctatggaccgaattgatactatgattcttaatctgatgagcgagactgcgaagtcatatgacatttctcaaccacttcaggaaatcaatgagtctgttagacttgcatttttgaattcctttctggactttgctggttatctggagaggtttggaggtgaactaaccgagaacagaccaaacaaagaaaacaattatgtctcaaatggatacataaatggtactagagaaacatttgttaacacagatggagatttgcacaaaaagctgctggttgttttgagtaacattgggtattgtaaagctgaactttcagaagaactttacagcaaatatagacacatttggtctccagtcaggaataatgaggagcgaagttctgacatgcgagacctgaggacttctttctctgcacttgaagagaaagtcctggaccaatatacttttgcaaagtcaaacttgatcagaagtgctgcacaaagttatcttttggattctgggatttattggggagcagcgccaatggtaaagggcattcgagatgcaactcttgacttactgcacatccttgtagcagtacatgcagaggtatactctggcgctcggcctctgttggagaagacaatgaaaattttggttgagggtttggtcgacatctttcttagtgtttttcatgagaataagaccaaagatattagattgttggatgcgaatggtttttgtcaactgatgcttgagcttgagtattttgagactgtactgcacacgtacttctcacctgaggcgcaacaggctatgaaatctttacaagagaatttgttggaaaaggcctgtgaaagtgttgcagaagccatggaaaatcctggacaccaacgtcgaccaacccgtggcagtgaagatacagcatcggatgacagacagccatcagtatcacctgatgatttgcttgtgcttgctcagcagtgcagtagtgatctgctgcaaggggagttggagaggactcgattgaacatagcctgtttcatggagtcgacccttcaaccaacagctgcgccagcaggcccaaagcctgccgcacattcttcttaccaagcacagcatgctcccgtccaaacgtcctcgcctagttttagaaggcagcagactggtacaagttcccctgtagtctccaggcggcgccggtgagcttagtgcatctttccatcattggcgtagcctcttcccggagtttccttccttttcccccctcacatgtgtgctttttttaatcacttgtaattgtcatcctgttgtcatgtgttacgaatttcgatccattcttttggtgttgtataagatgaaaaggaggagtacagtactggtgctgctgcacgggatcatggaattgtataatatcgacgagtcaaatattattgctgcttgaagataccaccacagctttatgtatatggaattctggagttgtcggtctgcgccaacttccttcctgcggtcgtcaccgcatgtttgtacattcgtcgcttggacagttttatgtatcccgagatttgttaatattgtatcagttggttcgtgattgttgatatgtctgcatgctttgtgctgtggagg

SEQ ID NO: 14409 - DNA, 3823 bp, Zea Mays
ccagatcgaaatttctctcttcaccaaacacacgctctctctccccttcccatctccttcctcccgccccagatccgagcccggcgcccgagttcatggcgagcgacagcgacgtcgacgaggacgagctcctgcagattgcgctgcaggagcaggcggcgcgggacctcagccaccagcgcccgcccgccgccaacaagcccgttgtcaacctcgtccgcccacccgcccccaatgctcgcggcggcaacgccagggccgggggcgccgcagcgaaggcgcgccagcccagccgcggcggcgacgaggacgacgactcggaggtcgagctgctctccatctcctccggcgacgaggacgacaatccccgcgcccgcggcccgccgccgccccgcgggggcgggggtggacgcgccggagcgcggagggccgcgtcacgggacgatggggacttcgacgatgaggagcccagaagctggaagcgcgtcgacgaggcagagcttgctcgcagggttcgagaaatgcgtgaagcaaaggtggctcctaacattcaagaacttgatcagaaagcagcagctgctgctgcagctgctgctcgaaaggccctcacgagtgtacagactttaccaaaaggagttgaggttttagatcctttgggccttggtgtcattgataataaatccctgcggttgatcactgacgcttcagtaagttctccaatttcaagggagaagtctcaaggtttggaccccaatatgcgagacaaagttatctattcatctccaaattttgatcccaaagttttcctttcgtgggtccacaaagacacgagcgctgctgacttagaggctggtgctctcaccttgaaaactgatctcaaagggagaacacagcagaaaaaacagttagtcaaggagaacttcgattgttttgtctcgtgcaaaactacaatagatgacattgagtcgaaattgagacagatagaggaagatcctgaaggtgcaggtactgctcacttgtattcagtgacacaaaaaattagcggtgtggcaaatcgtgcatttgagcctctatttgagaggcccaagctgaaaagatcagatctgttcagggaatgcttcaaagattccgaacactatttaacctaccaagtgcaatccgtgggaacattagaaaaggagaatatgatcttgctgtcagagagtaccaaaaagcaaagtcaattgttcttccttctcatgtggggatactaaaacgtgtactcgaagaggtcgaaaaggtgatgcaagaattcaggggcatgctttataagtccatggaggatcctcatcttgatcttgctgagattgagaacattgttcgtctattgttggagttggaacctgaaacagatccagtgtggcattatttaaatattcagaatagcaggattcatggattgtttgaaaagtgtactcaagatcatgactcgagaatggaagttttgcaaaataaaattcgcgaaaaagtgctctctgattcgaagtggaggcagctgcaacaagattcaaataaatctctggaagttgattctaccattggtgattctcctcgagttgatcagttgtcaacaaactttatggctgaggaagctgatagtttaagggccacctacattcgtaggctaacttctgtactgatccagcatgttccagctttctggagattagctttatctgttttcagtggaaaatttgccaaggcagcttctggtaacgtagtttctgattttgatgtgaatgcaaagccgactgcaaataagaatgatgaaaaaggtggagaagtaaagtacacaaaccacactcttgatgaagttggtagtatggttcaggctactatatcggcttttgacactaaggttcagagtaccttccgtgattttgaggaatgcaacattctttgtccatacatgagtgacactataaaagaaatagctaaggcctgtcagactcttgaagggaaggattcgtctccaactgctgtaaaaatgttgcgcacacttcattttgaaatgacaaagctttacattctacggctttgttcatggatgcgggcaacaacaaaggagatatcaaaagatgagacttgggttactttatccacccttgagagaaacaagtcccagtatgcgatttcatgcttgcccctggagttccgtgacataacagtttcagctatggaccgaattgatactatgattcttaatctgatgagcgagactgcgaagtcatatgacatttctcaaccacttcaggaaatcaatgagtctgttagacttgcatttttgaattcctttctggactttgctggttatctggagaggtttggaggtgaactaaccgagaacagaccaaacaaagaaaacaattatgtctcaaatggatacataaatggtactagagaaacatttgttaacacagatggagatttgcacaaaaagctgctggttgttttgagtaacattgggtattgtaaagctgaactttcagaagaactttacagcaaatatagacacatttggtctccagtcaggaataatgaggagcgaagttctgacatgcgagacctgaggacttctttctctgcacttgaagagaaagtcctggaccaatatacttttgcaaagtcaaacttgatcagaagtgctgcacaaagttatcttttggattctgggatttattggggagcagcgccaatggtaaagggcattcgagatgcaactcttgacttactgcacatccttgtagcagtacatgcagaggtatactctggcgctcggcctctgttggagaagacaatgaaaattttggttgagggtttggtcgacatctttcttagtgtttttcatgagaataagaccaaagatattagattgttggatgcgaatggtttttgtcaactgatgcttgagcttgagtattttgagactgtactgcacacgtacttctcacctgaggcgcaacaggctatgaaatctttacaagagaatttgttggaaaaggcctgtgaaagtgttgcagaagccatggaaaatcctggacaccaacgtcgaccaacccgtggcagtgaagatacagcatcggatgacagacagccatcagtatcacctgatgatttgcttgtgcttgctcagcagtgcagtagtgatctgctgcaaggggagttggagaggactcgattgaacatagcctgtttcatggagtcgacccttcaaccaacagctgcgccagcaggcccaaagcctgccgcacattcttcttaccaagcacagcatgctcccgtccaaacgtcctcgcctagttttagaaggcagcagactggtacaagttcccctgtagtctccaggcggcgccggtgagcttagtgcatctttccatcattggcgtagcctcttcccggagtttccttccttttcccccctcacatgtgtgctttttttaatcacttgtaattgtcatcctgttgtcatgtgttacgaatttcgatccattcttttggtgttgtataagatgaaaaggaggagtacagtactggtgctgctgcacgggatcatggaattgtataatatcgacgagtcaaatattattgctgcttgaagataccaccacagctttatgtatatggaattctggagttgtcggtctgcgccaacttccttcctgcggtcgtcaccgcatgtttgtacattcgtcgcttggacagttttatgtatcccgagatttgttaatattgtatcagttggttcgtgattgttgatatgtctgcatgctttgtgctgtggagg

SEQ ID NO: 14410 - DNA, 3969 bp, Zea Mays
cgaaatttctctcttcaccaaacacacgctctctctccccttcccatctccttcctcccgccccagatccgagcccggcgcccgagttcatggcgagcgacagcgacgtcgacgaggacgagctcctgcagattgcgctgcaggagcaggcggcgcgggacctcagccaccagcgcccgcccgccgccaacaagcccgttgtcaacctcgtccgcccacccgcccccaatgctcgcggcggcaacgccagggccgggggcgccgcagcgaaggcgcgccagcccagccgcggcggcgacgaggacgacgactcggaggtcgagctgctctccatctcctccggcgacgaggacgacaatccccgcgcccgcggcccgccgccgccccgcgggggcgggggtggacgcgccggagcgcggagggccgcgtcacgggacgatggggacttcgacgatgaggagcccagaagctggaagcgcgtcgacgaggcagagcttgctcgcagggttcgagaaatgcgtgaagcaaaggtggctcctaacattcaagaacttgatcagaaagcagcagctgctgctgcagctgctgctcgaaaggccctcacgagtgtacagactttaccaaaaggagttgaggttttagatcctttgggccttggtgtcattgataataaatccctgcggttgatcactgacgcttcagtaagttctccaatttcaagggagaagtctcaaggtttggaccccaatatgcgagacaaagttatctattcatctccaaattttgatcccaaagttttcctttcgtgggtccacaaagacacgagcgctgctgacttagaggctggtgctctcaccttgaaaactgatctcaaagggagaacacagcagaaaaaacagttagtcaaggagaacttcgattgttttgtctcgtgcaaaactacaatagatgacattgagtcgaaattgagacagatagaggaagatcctgaaggtgcaggtactgctcacttgtattcagtgacacaaaaaattagcggtgtggcaaatcgtgcatttgagcctctatttgagaggcccaagctgaaaagatcagatctgttcagggaatgcttcaaagattccgaacactatttaacctaccaagtgcaatccgtgggaacattagaaaaggagaatatgatcttgctgtcagagagtaccaaaaagcaaagtcaattgttcttccttctcatgtatggcaacttcctgttttgttttatctgcctatgttatccaattggatggtgaagcatgcatgcatgaatgagcgcatggtatggcgtaatcccacagctgataagatattgtgcatgcattgtccagctcatgcactcaatgaaattaggtggggatactaaaacgtgtactcgaagaggtcgaaaaggtgatgcaagaattcaggggcatgctttataagtccatggaggatcctcatcttgatcttgctgagattgagaacattgttcgtctattgttggagttggaacctgaaacagatccagtgtggcattatttaaatattcagaatagcaggattcatggattgtttgaaaagtgtactcaagatcatgactcgagaatggaagttttgcaaaataaaattcgcgaaaaagtgctctctgattcgaagtggaggcagctgcaacaagattcaaataaatctctggaagttgattctaccattggtgattctcctcgagttgatcagttgtcaacaaactttatggctgaggaagctgatagtttaagggccacctacattcgtaggctaacttctgtactgatccagcatgttccagctttctggagattagctttatctgttttcagtggaaaatttgccaaggcagcttctggtaacgtagtttctgattttgatgtgaatgcaaagccgactgcaaataagaatgatgaaaaaggtggagaagtaaagtacacaaaccacactcttgatgaagttggtagtatggttcaggctactatatcggcttttgacactaaggttcagagtaccttccgtgattttgaggaatgcaacattctttgtccatacatgagtgacactataaaagaaatagctaaggcctgtcagactcttgaagggaaggattcgtctccaactgctgtaaaaatgttgcgcacacttcattttgaaatgacaaagctttacattctacggctttgttcatggatgcgggcaacaacaaaggagatatcaaaagatgagacttgggttactttatccacccttgagagaaacaagtcccagtatgcgatttcatgcttgcccctggagttccgtgacataacagtttcagctatggaccgaattgatactatgattcttaatctgatgagcgagactgcgaagtcatatgacatttctcaaccacttcaggaaatcaatgagtctgttagacttgcatttttgaattcctttctggactttgctggttatctggagaggtttggaggtgaactaaccgagaacagaccaaacaaagaaaacaattatgtctcaaatggatacataaatggtactagagaaacatttgttaacacagatggagatttgcacaaaaagctgctggttgttttgagtaacattgggtattgtaaagctgaactttcagaagaactttacagcaaatatagacacatttggtctccagtcaggaataatgaggagcgaagttctgacatgcgagacctgaggacttctttctctgcacttgaagagaaagtcctggaccaatatacttttgcaaagtcaaacttgatcagaagtgctgcacaaagttatcttttggattctgggatttattggggagcagcgccaatggtaaagggcattcgagatgcaactcttgacttactgcacatccttgtagcagtacatgcagaggtatactctggcgctcggcctctgttggagaagacaatgaaaattttggttgagggtttggtcgacatctttcttagtgtttttcatgagaataagaccaaagatattagattgttggatgcgaatggtttttgtcaactgatgcttgagcttgagtattttgagactgtactgcacacgtacttctcacctgaggcgcaacaggctatgaaatctttacaagagaatttgttggaaaaggcctgtgaaagtgttgcagaagccatggaaaatcctggacaccaacgtcgaccaacccgtggcagtgaagatacagcatcggatgacagacagccatcagtatcacctgatgatttgcttgtgcttgctcagcagtgcagtagtgatctgctgcaaggggagttggagaggactcgattgaacatagcctgtttcatggagtcgacccttcaaccaacagctgcgccagcaggcccaaagcctgccgcacattcttcttaccaagcacagcatgctcccgtccaaacgtcctcgcctagttttagaaggcagcagactggtacaagttcccctgtagtctccaggcggcgccggtgagcttagtgcatctttccatcattggcgtagcctcttcccggagtttccttccttttcccccctcacatgtgtgctttttttaatcacttgtaattgtcatcctgttgtcatgtgttacgaatttcgatccattcttttggtgttgtataagatgaaaaggaggagtacagtactggtgctgctgcacgggatcatggaattgtataatatcgacgagtcaaatattattgctgcttgaagataccaccacagctttatgtatatggaattctggagttgtcggtctgcgccaacttccttcctgcggtcgtcaccgcatgtttgtacattcgtcgcttggacagttttatgtatcccgagatttgttaatattgtatcagttggttcgtgattgttgatatgtctgcatgctttgtgctgtggagg

SEQ ID NO: 14411 - DNA, 3962 bp, Zea Mays
tcttcaccaaacacacgctctctctccccttcccatctccttcctcccgccccagatccgagcccggcgcccgagttcatggcgagcgacagcgacgtcgacgaggacgagctcctgcagattgcgctgcaggagcaggcggcgcgggacctcagccaccagcgcccgcccgccgccaacaagcccgttgtcaacctcgtccgcccacccgcccccaatgctcgcggcggcaacgccagggccgggggcgccgcagcgaaggcgcgccagcccagccgcggcggcgacgaggacgacgactcggaggtcgagctgctctccatctcctccggcgacgaggacgacaatccccgcgcccgcggcccgccgccgccccgcgggggcgggggtggacgcgccggagcgcggagggccgcgtcacgggacgatggggacttcgacgatgaggagcccagaagctggaagcgcgtcgacgaggcagagcttgctcgcagggttcgagaaatgcgtgaagcaaaggtggctcctaacattcaagaacttgatcagaaagcagcagctgctgctgcagctgctgctcgaaaggccctcacgagtgtacagactttaccaaaaggagttgaggttttagatcctttgggccttggtgtcattgataataaatccctgcggttgatcactgacgcttcagtaagttctccaatttcaagggagaagtctcaaggtttggaccccaatatgcgagacaaagttatctattcatctccaaattttgatcccaaagttttcctttcgtgggtccacaaagacacgagcgctgctgacttagaggctggtgctctcaccttgaaaactgatctcaaagggagaacacagcagaaaaaacagttagtcaaggagaacttcgattgttttgtctcgtgcaaaactacaatagatgacattgagtcgaaattgagacagatagaggaagatcctgaaggtgcaggtactgctcacttgtattcagtgacacaaaaaattagcggtgtggcaaatcgtgcatttgagcctctatttgagaggcaggcccaagctgaaaagatcagatctgttcagggaatgcttcaaagattccgaacactatttaacctaccaagtgcaatccgtgggaacattagaaaaggagaatatgatcttgctgtcagagagtaccaaaaagcaaagtcaattgttcttccttctcatgtatggcaacttcctgttttgttttatctgcctatgttatccaattggatggtgaagcatgcatgcatgaatgagcgcatggtatggcgtaatcccacagctgataagatattgtgcatgcattgtccagctcatgcactcaatgaaattaggtggggatactaaaacgtgtactcgaagaggtcgaaaaggtgatgcaagaattcaggggcatgctttataagtccatggaggatcctcatcttgatcttgctgagattgagaacattgttcgtctattgttggagttggaacctgaaacagatccagtgtggcattatttaaatattcagaatagcaggattcatggattgtttgaaaagtgtactcaagatcatgactcgagaatggaagttttgcaaaataaaattcgcgaaaaagtgctctctgattcgaagtggaggcagctgcaacaagattcaaataaatctctggaagttgattctaccattggtgattctcctcgagttgatcagttgtcaacaaactttatggctgaggaagctgatagtttaagggccacctacattcgtaggctaacttctgtactgatccagcatgttccagctttctggagattagctttatctgttttcagtggaaaatttgccaaggcagcttctggtaacgtagtttctgattttgatgtgaatgcaaagccgactgcaaataagaatgatgaaaaaggtggagaagtaaagtacacaaaccacactcttgatgaagttggtagtatggttcaggctactatatcggcttttgacactaaggttcagagtaccttccgtgattttgaggaatgcaacattctttgtccatacatgagtgacactataaaagaaatagctaaggcctgtcagactcttgaagggaaggattcgtctccaactgctgtaaaaatgttgcgcacacttcattttgaaatgacaaagctttacattctacggctttgttcatggatgcgggcaacaacaaaggagatatcaaaagatgagacttgggttactttatccacccttgagagaaacaagtcccagtatgcgatttcatgcttgcccctggagttccgtgacataacagtttcagctatggaccgaattgatactatgattcttaatctgatgagcgagactgcgaagtcatatgacatttctcaaccacttcaggaaatcaatgagtctgttagacttgcatttttgaattcctttctggactttgctggttatctggagaggtttggaggtgaactaaccgagaacagaccaaacaaagaaaacaattatgtctcaaatggatacataaatggtactagagaaacatttgttaacacagatggagatttgcacaaaaagctgctggttgttttgagtaacattgggtattgtaaagctgaactttcagaagaactttacagcaaatatagacacatttggtctccagtcaggaataatgaggagcgaagttctgacatgcgagacctgaggacttctttctctgcacttgaagagaaagtcctggaccaatatacttttgcaaagtcaaacttgatcagaagtgctgcacaaagttatcttttggattctgggatttattggggagcagcgccaatggtaaagggcattcgagatgcaactcttgacttactgcacatccttgtagcagtacatgcagaggtatactctggcgctcggcctctgttggagaagacaatgaaaattttggttgagggtttggtcgacatctttcttagtgtttttcatgagaataagaccaaagatattagattgttggatgcgaatggtttttgtcaactgatgcttgagcttgagtattttgagactgtactgcacacgtacttctcacctgaggcgcaacaggctatgaaatctttacaagagaatttgttggaaaaggcctgtgaaagtgttgcagaagccatggaaaatcctggacaccaacgtcgaccaacccgtggcagtgaagatacagcatcggatgacagacagccatcagtatcacctgatgatttgcttgtgcttgctcagcagtgcagtagtgatctgctgcaaggggagttggagaggactcgattgaacatagcctgtttcatggagtcgacccttcaaccaacagctgcgccagcaggcccaaagcctgccgcacattcttcttaccaagcacagcatgctcccgtccaaacgtcctcgcctagttttagaaggcagcagactggtacaagttcccctgtagtctccaggcggcgccggtgagcttagtgcatctttccatcattggcgtagcctcttcccggagtttccttccttttcccccctcacatgtgtgctttttttaatcacttgtaattgtcatcctgttgtcatgtgttacgaatttcgatccattcttttggtgttgtataagatgaaaaggaggagtacagtactggtgctgctgcacgggatcatggaattgtataatatcgacgagtcaaatattattgctgcttgaagataccaccacagctttatgtatatggaattctggagttgtcggtctgcgccaacttccttcctgcggtcgtcaccgcatgtttgtacattcgtcgcttggacagttttatgtatcccgagatttgttaatattgtatcagttggttcgtgattgttgatatgtctgcatgctttgtgctgtggagg

SEQ ID NO: 14412 - DNA, 4667 bp, Zea Mays
tcttcaccaaacacacgctctctctccccttcccatctccttcctcccgccccagatccgagcccggcgcccgagttcatggcgagcgacagcgacgtcgacgaggacgagctcctgcagattgcgctgcaggagcaggcggcgcgggacctcagccaccagcgcccgcccgccgccaacaagcccgttgtcaacctcgtccgcccacccgcccccaatgctcgcggcggcaacgccagggccgggggcgccgcagcgaaggcgcgccagcccagccgcggcggcgacgaggacgacgactcggaggtcgagctgctctccatctcctccggcgacgaggacgacaatccccgcgcccgcggcccgccgccgccccgcgggggcgggggtggacgcgccggagcgcggagggccgcgtcacgggacgatggggacttcgacgatgaggagcccagaagctggaagcgcgtcgacgaggcagagcttgctcgcagggttcgagaaatgcgtgaagcaaaggtggctcctaacattcaagaacttgatcagaaagcagcagctgctgctgcagctgctgctcgaaaggccctcacgagtgtacagactttaccaaaaggagttgaggttttagatcctttgggccttggtgtcattgataataaatccctgcggttgatcactgacgcttcagtaagttctccaatttcaagggagaagtctcaaggtttggaccccaatatgcgagacacgagcgctgctgacttagaggctggtgctctcaccttgaaaactgatctcaaagggagaacacagcagaaaaaacagttagtcaaggagaacttcgattgttttgtctcgtgcaaaactacaatagatgacattgagtcgaaattgagacagatagaggaagatcctgaaggtgcaggtactgctcacttgtattcagtgacacaaaaaattagcggtgtggcaaatcgtgcatttgagcctctatttgagaggcaggcccaagctgaaaagatcagatctgttcagggaatgcttcaaagattccgaacactatttaacctaccaagtgcaatccgtgggaacattagaaaaggagaatatgatcttgctgtcagagagtaccaaaaagcaaagtcaattgttcttccttctcatgtggggatactaaaacgtgtactcgaagaggtcgaaaaggtgatgcaagaattcaggggcatgctttataagtccatggaggatcctcatcttgatcttgctgagattgagaacattgttcgtctattgttggagttggaacctgaaacagatccagtgtggcattatttaaatattcagaatagcaggattcatggattgtttgaaaagtgtactcaagatcatgactcgagaatggaagttttgcaaaataaaattcgcgaaaaagtgctctctgattcgaagtggaggcagctgcaacaagattcaaataaatctctggaagttgattctaccattggtgattctcctcgagttgatcagttgtcaacaaactttatggctgaggaagctgatagtttaagggccacctacattcgtaggctaacttctgtactgatccagcatgttccagctttctggagattagctttatctgttttcagtggaaaatttgccaaggcagcttctggtaacgtagtttctgattttgatgtgaatgcaaagccgactgcaaataagaatgatgaaaaaggtggagaagtaaagtacacaaaccacactcttgatgaagttggtagtatggttcaggctactatatcggcttttgacactaaggttcagagtaccttccgtgattttgaggaatgcaacattctttgtccatacatgagtgacactataaaagaaatagctaaggcctgtcagactcttgaagggaaggattcgtctccaactgctgtaaaaatgttgcgcacacttcattttgaaatgacaaagctttacattctacggctttgttcatggatgcgggcaacaacaaaggagatatcaaaagatgagacttgggttactttatccacccttgagagaaacaagtcccagtatgcgatttcatgcttgcccctggagttccgtgacataacagtttcagctatggaccgaattgatacgtaagactgctctatttctatgtagtattgcatctttttgcagtttcttatgctgcattatttccaaagccctgtgaaagttgttttgttgcattgttgctttgcaattggccgtcttttttaatatctactccctatattccaaattgcaagatgttttgacttctcgaaattcgtagctttgactatgcacttagatatacaccacgtcaagagtaatcagtaatgtatctaaaaaaccaaaaatgccttttaatttgtaagctggaacagaaggagtgtttgctaatagataactatttcttttgttgcacttaagcagtattcctttttggcagtaagtatagttgttagtgtcaggattcagaaaggaatttgtcatactgtgttttataattttattgctacatcagtcttgctttaattgttattgtaatgattacacgtaagcttttgctattaataaccttttaggtttctggttatcctgtcttacctagaaatgaatccttttatctgagcaatgccatcaatatcaaatcgtctaatcgttcctagtcgccatggcaccaatcagtctgacttatcatgattagttgtgattaatcaccactgatcgtgactaattgtagtgcatagctgatcgctatggcaccgatcagcctaattaatcgcgatcattgcatctgagtttcaaggtttgtgtctctcttgtctcttgctctgcaaaatctgaaatttttcttgagcacaaccttctaaagtgacgacacaccagtctccaggctctatgttcagtatattctgagttctctccccccttctccccacgctgcaaaatttggggatggcaagtactttcctgccttcattttaggtagtgttgaacaggtccataatctgtgtttcttttttttcagtatgattcttaatctgatgagcgagactgcgaagtcatatgacatttctcaaccacttcaggaaatcaatgagtctgttagacttgcatttttgaattcctttctggactttgctggttatctggagaggtttggaggtgaactaaccgagaacagaccaaacaaagaaaacaattatgtctcaaatggatacataaatggtactagagaaacatttgttaacacagatggagatttgcacaaaaagctgctggttgttttgagtaacattgggtattgtaaagctgaactttcagaagaactttacagcaaatatagacacatttggtctccagtcaggaataatgaggagcgaagttctgacatgcgagacctgaggacttctttctctgcacttgaagagaaagtcctggaccaatatacttttgcaaagtcaaacttgatcagaagtgctgcacaaagttatcttttggattctgggatttattggggagcagcgccaatggtaaagggcattcgagatgcaactcttgacttactgcacatccttgtagcagtacatgcagaggtatactctggcgctcggcctctgttggagaagacaatgaaaattttggttgagggtttggtcgacatctttcttagtgtttttcatgagaataagaccaaagatattagattgttggatgcgaatggtttttgtcaactgatgcttgagcttgagtattttgagactgtactgcacacgtacttctcacctgaggcgcaacaggctatgaaatctttacaagagaatttgttggaaaaggcctgtgaaagtgttgcagaagccatggaaaatcctggacaccaacgtcgaccaacccgtggcagtgaagatacagcatcggatgacagacagccatcagtatcacctgatgatttgcttgtgcttgctcagcagtgcagtagtgatctgctgcaaggggagttggagaggactcgattgaacatagcctgtttcatggagtcgacccttcaaccaacagctgcgccagcaggcccaaagcctgccgcacattcttcttaccaagcacagcatgctcccgtccaaacgtcctcgcctagttttagaaggcagcagactggtacaagttcccctgtagtctccaggcggcgccggtgagcttagtgcatctttccatcattggcgtagcctcttcccggagtttccttccttttcccccctcacatgtgtgctttttttaatcacttgtaattgtcatcctgttgtcatgtgttacgaatttcgatccattcttttggtgttgtataagatgaaaaggaggagtacagtactggtgctgctgcacgggatcatggaattgtataatatcgacgagtcaaatattattgctgcttgaagataccaccacagctttatgtatatggaattctggagttgtcggtctgcgccaacttccttcctgcggtcgtcaccgcatgtttgtacattcgtcgcttggacagttttatgtatcccgagatttgttaatattgtatcagttggttcgtgattgttgatatgtctgcatgctttgtgctgtggagg

SEQ ID NO: 14413 - DNA, 2848 bp, Zea Mays
gatagaggaagatcctgaaggtgcaggtactgctcacttgtattcagtgacacaaaaaattagcggtgtggcaaatcgtgcatttgagcctctatttgagaggcaggcccaagctgaaaagatcagatctgttcagggaatgcttcaaagattccgaacactatttaacctaccaagtgcaatccgtgggaacattagaaaaggagaatatgatcttgctgtcagagagtaccaaaaagcaaagtcaattgttcttccttctcatgtggggatactaaaacgtgtactcgaagaggtcgaaaaggtgatgcaagaattcaggggcatgctttataagtccatggaggatcctcatcttgatcttgctgagattgagaacattgttcgtctattgttggagttggaacctgaaacagatccagtgtggcattatttaaatattcagaatagcaggattcatggattgtttgaaaagtgtactcaagatcatgactcgagaatggaagttttgcaaaataaaattcgcgaaaaagtgctctctgattcgaagtggaggcagctgcaacaagattcaaataaatctctggaagttgattctaccattggtgattctcctcgagttgatcagttgtcaacaaactttatggctgaggaagctgatagtttaagggccacctacattcgtaggctaacttctgtactgatccagcatgttccagctttctggagattagctttatctgttttcagtggaaaatttgccaaggcagcttctggtaacgtagtttctgattttgatgtgaatgcaaagccgactgcaaataagaatgatgaaaaaggtggagaagtaaagtacacaaaccacactcttgatgaagttggtagtatggttcaggctactatatcggcttttgacactaaggttcagagtaccttccgtgattttgaggaatgcaacattctttgtccatacatgagtgacactataaaagaaatagctaaggcctgtcagactcttgaagggaaggattcgtctccaactgctgtaaaaatgttgcgcacacttcattttgaaatgacaaagctttacattctacggctttgttcatggatgcgggcaacaacaaaggagatatcaaaagatgagacttgggttactttatccacccttgagagaaacaagtcccagtatgcgatttcatgcttgcccctggagttccgtgacataacagtttcagctatggaccgaattgatactatgattcttaatctgatgagcgagactgcgaagtcatatgacatttctcaaccacttcaggaaatcaatgagtctgttagacttgcatttttgaattcctttctggactttgctggttatctggagaggtttggaggtgaactaaccgagaacagaccaaacaaagaaaacaattatgtctcaaatggatacataaatggtactagagaaacatttgttaacacagatggagatttgcacaaaaagctgctggttgttttgagtaacattgggtattgtaaagctgaactttcagaagaactttacagcaaatatagacacatttggtctccagtcaggaataatgaggagcgaagttctgacatgcgagacctgaggacttctttctctgcacttgaagagaaagtcctggaccaatatacttttgcaaagtcaaacttgatcagaagtgctgcacaaagttatcttttggattctgggatttattggggagcagcgccaatggtaaagggcattcgagatgcaactcttgacttactgcacatccttgtagcagtacatgcagaggtatactctggcgctcggcctctgttggagaagacaatgaaaattttggttgagggtttggtcgacatctttcttagtgtttttcatgagaataagaccaaagatattagattgttggatgcgaatggtttttgtcaactgatgcttgagcttgagtattttgagactgtactgcacacgtacttctcacctgaggcgcaacaggctatgaaatctttacaagagaatttgttggaaaaggcctgtgaaagtgttgcagaagccatggaaaatcctggacaccaacgtcgaccaacccgtggcagtgaagatacagcatcggatgacagacagccatcagtatcacctgatgatttgcttgtgcttgctcagcagtgcagtagtgatctgctgcaaggggagttggagaggactcgattgaacatagcctgtttcatggagtcgacccttcaaccaacagctgcgccagcaggcccaaagcctgccgcacattcttcttaccaagcacagcatgctcccgtccaaacgtcctcgcctagttttagaaggcagcagactggtacaagttcccctgtagtctccaggcggcgccggtgagcttagtgcatctttccatcattggcgtagcctcttcccggagtttccttccttttcccccctcacatgtgtgctttttttaatcacttgtaattgtcatcctgttgtcatgtgttacgaatttcgatccattcttttggtgttgtataagatgaaaaggaggagtacagtactggtgctgctgcacgggatcatggaattgtataatatcgacgagtcaaatattattgctgcttgaagataccaccacagctttatgtatatggaattctggagttgtcggtctgcgccaacttccttcctgcggtcgtcaccgcatgtttgtacattcgtcgcttggacagttttatgtatcccgagatttgttaatattgtatcagttggttcgtgattgttgatatgtctgcatgctttgtgctgtggagg

SEQ ID NO: 14414 - DNA, 2613 bp, Zea Mays
gtgaagcatgcatgcatgaatgagcgcatggtggggatactaaaacgtgtactcgaagaggtcgaaaaggtgatgcaagaattcaggggcatgctttataagtccatggaggatcctcatcttgatcttgctgagattgagaacattgttcgtctattgttggagttggaacctgaaacagatccagtgtggcattatttaaatattcagaatagcaggattcatggattgtttgaaaagtgtactcaagatcatgactcgagaatggaagttttgcaaaataaaattcgcgaaaaagtgctctctgattcgaagtggaggcagctgcaacaagattcaaataaatctctggaagttgattctaccattggtgattctcctcgagttgatcagttgtcaacaaactttatggctgaggaagctgatagtttaagggccacctacattcgtaggctaacttctgtactgatccagcatgttccagctttctggagattagctttatctgttttcagtggaaaatttgccaaggcagcttctggtaacgtagtttctgattttgatgtgaatgcaaagccgactgcaaataagaatgatgaaaaaggtggagaagtaaagtacacaaaccacactcttgatgaagttggtagtatggttcaggctactatatcggcttttgacactaaggttcagagtaccttccgtgattttgaggaatgcaacattctttgtccatacatgagtgacactataaaagaaatagctaaggcctgtcagactcttgaagggaaggattcgtctccaactgctgtaaaaatgttgcgcacacttcattttgaaatgacaaagctttacattctacggctttgttcatggatgcgggcaacaacaaaggagatatcaaaagatgagacttgggttactttatccacccttgagagaaacaagtcccagtatgcgatttcatgcttgcccctggagttccgtgacataacagtttcagctatggaccgaattgatactatgattcttaatctgatgagcgagactgcgaagtcatatgacatttctcaaccacttcaggaaatcaatgagtctgttagacttgcatttttgaattcctttctggactttgctggttatctggagaggtttggaggtgaactaaccgagaacagaccaaacaaagaaaacaattatgtctcaaatggatacataaatggtactagagaaacatttgttaacacagatggagatttgcacaaaaagctgctggttgttttgagtaacattgggtattgtaaagctgaactttcagaagaactttacagcaaatatagacacatttggtctccagtcaggaataatgaggagcgaagttctgacatgcgagacctgaggacttctttctctgcacttgaagagaaagtcctggaccaatatacttttgcaaagtcaaacttgatcagaagtgctgcacaaagttatcttttggattctgggatttattggggagcagcgccaatggtaaagggcattcgagatgcaactcttgacttactgcacatccttgtagcagtacatgcagaggtatactctggcgctcggcctctgttggagaagacaatgaaaattttggttgagggtttggtcgacatctttcttagtgtttttcatgagaataagaccaaagatattagattgttggatgcgaatggtttttgtcaactgatgcttgagcttgagtattttgagactgtactgcacacgtacttctcacctgaggcgcaacaggctatgaaatctttacaagagaatttgttggaaaaggcctgtgaaagtgttgcagaagccatggaaaatcctggacaccaacgtcgaccaacccgtggcagtgaagatacagcatcggatgacagacagccatcagtatcacctgatgatttgcttgtgcttgctcagcagtgcagtagtgatctgctgcaaggggagttggagaggactcgattgaacatagcctgtttcatggagtcgacccttcaaccaacagctgcgccagcaggcccaaagcctgccgcacattcttcttaccaagcacagcatgctcccgtccaaacgtcctcgcctagttttagaaggcagcagactggtacaagttcccctgtagtctccaggcggcgccggtgagcttagtgcatctttccatcattggcgtagcctcttcccggagtttccttccttttcccccctcacatgtgtgctttttttaatcacttgtaattgtcatcctgttgtcatgtgttacgaatttcgatccattcttttggtgttgtataagatgaaaaggaggagtacagtactggtgctgctgcacgggatcatggaattgtataatatcgacgagtcaaatattattgctgcttgaagataccaccacagctttatgtatatggaattctggagttgtcggtctgcgccaacttccttcctgcggtcgtcaccgcatgtttgtacattcgtcgcttggacagttttatgtatcccgagatttgttaatattgtatcagttggttcgtgattgttgatatgtctgcatgctttgtgctgtggagg

SEQ ID NO: 14415 - DNA, 2610 bp, Zea Mays
gcattgtccagctcatgcactcaatgaaattaggtggggatactaaaacgtgtactcgaagaggtcgaaaaggtgatgcaagaattcaggggcatgctttataagtccatggaggatcctcatcttgatcttgctgagattgagaacattgttcgtctattgttggagttggaacctgaaacagatccagtgtggcattatttaaatattcagaatagcaggattcatggattgtttgaaaagtgtactcaagatcatgactcgagaatggaagttttgcaaaataaaattcgcgaaaaagtgctctctgattcgaagtggaggcagctgcaacaagattcaaataaatctctggaagttgattctaccattggtgattctcctcgagttgatcagttgtcaacaaactttatggctgaggaagctgatagtttaagggccacctacattcgtaggctaacttctgtactgatccagcatgttccagctttctggagattagctttatctgttttcagtggaaaatttgccaaggcagcttctggtaacgtagtttctgattttgatgtgaatgcaaagccgactgcaaataagaatgatgaaaaaggtggagaagtaaagtacacaaaccacactcttgatgaagttggtagtatggttcaggctactatatcggcttttgacactaagagtaccttccgtgattttgaggaatgcaacattctttgtccatacatgagtgacactataaaagaaatagctaaggcctgtcagactcttgaagggaaggattcgtctccaactgctgtaaaaatgttgcgcacacttcattttgaaatgacaaagctttacattctacggctttgttcatggatgcgggcaacaacaaaggagatatcaaaagatgagacttgggttactttatccacccttgagagaaacaagtcccagtatgcgatttcatgcttgcccctggagttccgtgacataacagtttcagctatggaccgaattgatactatgattcttaatctgatgagcgagactgcgaagtcatatgacatttctcaaccacttcaggaaatcaatgagtctgttagacttgcatttttgaattcctttctggactttgctggttatctggagaggtttggaggtgaactaaccgagaacagaccaaacaaagaaaacaattatgtctcaaatggatacataaatggtactagagaaacatttgttaacacagatggagatttgcacaaaaagctgctggttgttttgagtaacattgggtattgtaaagctgaactttcagaagaactttacagcaaatatagacacatttggtctccagtcaggaataatgaggagcgaagttctgacatgcgagacctgaggacttctttctctgcacttgaagagaaagtcctggaccaatatacttttgcaaagtcaaacttgatcagaagtgctgcacaaagttatcttttggattctgggatttattggggagcagcgccaatggtaaagggcattcgagatgcaactcttgacttactgcacatccttgtagcagtacatgcagaggtatactctggcgctcggcctctgttggagaagacaatgaaaattttggttgagggtttggtcgacatctttcttagtgtttttcatgagaataagaccaaagatattagattgttggatgcgaatggtttttgtcaactgatgcttgagcttgagtattttgagactgtactgcacacgtacttctcacctgaggcgcaacaggctatgaaatctttacaagagaatttgttggaaaaggcctgtgaaagtgttgcagaagccatggaaaatcctggacaccaacgtcgaccaacccgtggcagtgaagatacagcatcggatgacagacagccatcagtatcacctgatgatttgcttgtgcttgctcagcagtgcagtagtgatctgctgcaaggggagttggagaggactcgattgaacatagcctgtttcatggagtcgacccttcaaccaacagctgcgccagcaggcccaaagcctgccgcacattcttcttaccaagcacagcatgctcccgtccaaacgtcctcgcctagttttagaaggcagcagactggtacaagttcccctgtagtctccaggcggcgccggtgagcttagtgcatctttccatcattggcgtagcctcttcccggagtttccttccttttcccccctcacatgtgtgctttttttaatcacttgtaattgtcatcctgttgtcatgtgttacgaatttcgatccattcttttggtgttgtataagatgaaaaggaggagtacagtactggtgctgctgcacgggatcatggaattgtataatatcgacgagtcaaatattattgctgcttgaagataccaccacagctttatgtatatggaattctggagttgtcggtctgcgccaacttccttcctgcggtcgtcaccgcatgtttgtacattcgtcgcttggacagttttatgtatcccgagatttgttaatattgtatcagttggttcgtgattgttgatatgtctgcatgctttgtgctgtggagg

SEQ ID NO: 14416 - DNA, 2530 bp, Zea Mays
ctcatgcactcaatgaaattaggtggggatactaaaacgtgtactcgaagaggtcgaaaaggtgatgcaagaattcaggggcatgctttataagtccatggaggatcctcatcttgatcttgctgagaatagcaggattcatggattgtttgaaaagtgtactcaagatcatgactcgagaatggaagttttgcaaaataaaattcgcgaaaaagtgctctctgattcgaagtggaggcagctgcaacaagattcaaataaatctctggaagttgattctaccattggtgattctcctcgagttgatcagttgtcaacaaactttatggctgaggaagctgatagtttaagggccacctacattcgtaggctaacttctgtactgatccagcatgttccagctttctggagattagctttatctgttttcagtggaaaatttgccaaggcagcttctggtaacgtagtttctgattttgatgtgaatgcaaagccgactgcaaataagaatgatgaaaaaggtggagaagtaaagtacacaaaccacactcttgatgaagttggtagtatggttcaggctactatatcggcttttgacactaaggttcagagtaccttccgtgattttgaggaatgcaacattctttgtccatacatgagtgacactataaaagaaatagctaaggcctgtcagactcttgaagggaaggattcgtctccaactgctgtaaaaatgttgcgcacacttcattttgaaatgacaaagctttacattctacggctttgttcatggatgcgggcaacaacaaaggagatatcaaaagatgagacttgggttactttatccacccttgagagaaacaagtcccagtatgcgatttcatgcttgcccctggagttccgtgacataacagtttcagctatggaccgaattgatactatgattcttaatctgatgagcgagactgcgaagtcatatgacatttctcaaccacttcaggaaatcaatgagtctgttagacttgcatttttgaattcctttctggactttgctggttatctggagaggtttggaggtgaactaaccgagaacagaccaaacaaagaaaacaattatgtctcaaatggatacataaatggtactagagaaacatttgttaacacagatggagatttgcacaaaaagctgctggttgttttgagtaacattgggtattgtaaagctgaactttcagaagaactttacagcaaatatagacacatttggtctccagtcaggaataatgaggagcgaagttctgacatgcgagacctgaggacttctttctctgcacttgaagagaaagtcctggaccaatatacttttgcaaagtcaaacttgatcagaagtgctgcacaaagttatcttttggattctgggatttattggggagcagcgccaatggtaaagggcattcgagatgcaactcttgacttactgcacatccttgtagcagtacatgcagaggtatactctggcgctcggcctctgttggagaagacaatgaaaattttggttgagggtttggtcgacatctttcttagtgtttttcatgagaataagaccaaagatattagattgttggatgcgaatggtttttgtcaactgatgcttgagcttgagtattttgagactgtactgcacacgtacttctcacctgaggcgcaacaggctatgaaatctttacaagagaatttgttggaaaaggcctgtgaaagtgttgcagaagccatggaaaatcctggacaccaacgtcgaccaacccgtggcagtgaagatacagcatcggatgacagacagccatcagtatcacctgatgatttgcttgtgcttgctcagcagtgcagtagtgatctgctgcaaggggagttggagaggactcgattgaacatagcctgtttcatggagtcgacccttcaaccaacagctgcgccagcaggcccaaagcctgccgcacattcttcttaccaagcacagcatgctcccgtccaaacgtcctcgcctagttttagaaggcagcagactggtacaagttcccctgtagtctccaggcggcgccggtgagcttagtgcatctttccatcattggcgtagcctcttcccggagtttccttccttttcccccctcacatgtgtgctttttttaatcacttgtaattgtcatcctgttgtcatgtgttacgaatttcgatccattcttttggtgttgtataagatgaaaaggaggagtacagtactggtgctgctgcacgggatcatggaattgtataatatcgacgagtcaaatattattgctgcttgaagataccaccacagctttatgtatatggaattctggagttgtcggtctgcgccaacttccttcctgcggtcgtcaccgcatgtttgtacattcgtcgcttggacagttttatgtatcccgagatttgttaatattgtatcagttggttcgtgattgttgatatgtctgcatgctttgtgctgtggagg

SEQ ID NO: 14417 - DNA, 604 bp, Zea Mays
aaacagttttagcatgtcttgggccaccaactgaaaaaactggcgaccttaatttgtagcagccgcaagcaaatgaaagcaacaagtcctcaacttcaaaacaatactagtctttgatctcctactagtacctggatatggctcaagggggtaacaagggcaagaaggcagtgtcactgcgagagaagaaagatggtgcaaataatgcagccctagcggccttaagcaaagaagcaggggagtataactctatgatgaacagggttgaaacgatggctggtccagagctgagggagtacgtctcacaaaacaaacacacactgggtagcaaactgaaagcaacaattaagaaggagatgcgtaaagggacggacggatagactgaccatgcatgcctagcaagataatatatgtattcactgtttaccatgtcgtatgggatgggaccgctgtttatgttgtatttggccggcgcaaaacgagttattataaagcctccaagagattgtcagagcatcaccgggagtctgtaaaacatctttatatttttttagtaaaaagagaaaaaaggtacccctcaaacattttggtaaaagagattatt

SEQ ID NO: 14418 - DNA, 1973 bp, Zea Mays
cgcacatcgatgatgccaaaattagcgccccgccaccccctgctgcgcgcggtgagcatagcactcctccaatcctcctatctgctgcacgtacgagctaccccgggcagctgtccagggccacgcttcccacgcccgaacgatcgatggccagtggcggcggcaacgcggcggcggacgccaagcacgtcgatgcggaggtcgtcatcgtgggcggcggcatcgcggggctggcgacggcgctggcgctccggcgggcgggcgcggcgcggcgcgtgctggtgctggagcgccacgcggggcatcgtgccaccggcgccgcgctcaccatcttccccaacggctggttcgcgctgcgcgcgctcggcgtcgcgcacaagctcgcctcccgctacgacgcctacgaaacatccagggtgaccaatctcgagaccggggcgacgcaggtgtttcgctttgccggcaacaagaacaaaagtcagagtgagggcgcttgacaggaaggcgctgctggaggcgctcgcggaggagctgccgccgggcaccgtccgtttctcgtccaaggtcgtctccatcgacaccgagcgagcagccggcgactcgtcggtgaccgtcgtccttggattggacgacggcacggtgatccgagccaaggtcttgatcgggtgtgacggcgtgcactcggtggtggcgcggtggctgggcctgtcggaaccggcgagctcgggccggtctgccgtccgcgggctctccgtcttccctggcgggcacggcgtaaagcgggagctccggcagttcctatcggagggtctcagagccggcatggtgcccatcagcgacaccgacatctactggttcctcgtcaacaacacggtcgccgcagagaaagaagccgccggggacccggtgaagaccctgctcgaggtgaccgacaacctggccaggcacatgccagcggagtacctggacgtggtgcgccactccgaccacggcaacctctcgtgggcgccgctcctgtaccgcaacccggtgtccgtcctcctgggccccgcggctcgcgggcccgtcacggtggccggcgacgcgttccatcccatgacgcccgacatggcgcagggcgggtgctccgcgctggaggacgcggtggtgctcgcccgggcgctgtcgcgtgaggcgacgccggccgagggcgtgtccgcgtacgtggcgcagcggcggtggcgcgctgcctggctggtcgccggagcctacctgtcggggtggatccagcagggcgggaccaacgtcggcggcgtgcgcggccgcctggtgaaggtgttccgggactggatcttctacaggttcgtgttcccccggctcgcggacaccatgtggttcgactgcggcgacctcacgccgccgccgcccacggcagcagtaggcaagagccaccacatcgagtgaactccgaaccacggcgtgtcagtatcagctgcagctgctgggtcaggatccatgcctgtggtagcacgtgtgacgcgtgtttgtaagctgtgtaagattttacaatatttcaggttctacatgtggccgtgtatatttttggacgggcgtatgtataggagatacatatacctacacttgtgatatcatgctgtgtttgggggttccttatttgattgtgtggtcatcaggagatgctcctcctgtgcaagcaagcaagcaagagatgtcctcatgtgaaaccttttcagccacccacatttttttgctttatactcataaaacatttgtattttttatctcaccaaaatttcacttttcttcaattttcttggatagaccagttttggtttcccatgccaccatagccctttacttttatacactgaacaataaatgctgttgacgacaaccaacatgtccaccaattctcccggtatttatatttcaggcattcgtagtagaatggcaagaaaaaaatatacttgtcc

SEQ ID NO: 14419 - DNA, 530 bp, Zea Mays
ctttgaactcgcaaaaatttgccgcagccactcgctcctcgtccaaattgactgcccagcgcgctccgccactactttgcgctcgtgtagctgcttgcctcttgcgctggcatgtggcgttcccagctcgtggctgcctcctctttgcatggcagttctcccagccgtcgtctacctcacgcaagcatgaaaccgctcagccgtcaccctcctcgccctaagctcgcacggccttgtcgagactgcgccgctatctcctcttgcagctgaacatcgcgccgttcctgctccttgtcgcagtttcccatcgcgcgcccggtcacgtcctggtgccgatctcctccacgccacgctcaggacttcaccggtgccgtctgaccgtgctcatcgcgctgcaagtcttcatgttcctccgtgtcgatctcgcttcgccgaggctacagcagcaccagcatcctctccgagcttgtgtttgtaaatttcctcgtcgaaccggcatcgtaacgtcatccggagaagttttattccct

SEQ ID NO: 14420 - DNA, 2432 bp, Zea Mays
aaattccattctggtcccttccttgccttctccgcctccgcatccatccggtctccagttgtctcctcccgcctccttccggtcccctcccggcgcagcctctcccgccccctccagccaagcggaccctaggcggagccaccttccacgcttcccgaagctcgcccgtgaggggaggccaggatggcagcgacgtcggcgccgcccgcgagcgcccacgccaacggcaacggctccctcgtgggggtggcggcgccggtgggagcgcccaccaaccccatggcgacggctctgctcaccgaccagtaccagttctccatggcctacgcgtactggaaggccgggaagcacgccgaccgtgccgtgtttgacctgtactttaggaaaaatccatttggtggggaattcactgtttttgctggccttgaggagtgcatcaaatttattgcgaattttaagttcacagaacatgacatttctttcctgcaatcagtcatgccaatgtgtgagggtgcgttcttcaattatctcagggaagttgactgctctgatgtagaggtgtactccattcctgagggatcagtagtttttccaaaagtgcccttgatgagagttgagggtccagttgctgtggttcaacttctggagactccatttgtgaatcttatcaattatgcctctttggtaactactaatgctgcgcgtcatcgtcatgttgctggaaagtcaaaggttctgttagaatttggtttaagacgggcacagggacctgatggagcaataagtgcctcaaaatattgttttatgggaggttttgacgcaaccagtaatgttttggctgggaatttgtttggcataccacttcgtggaacacattctcatgcttttgttagctcatacatgagccttgatgagataccagacaaggccctcaagagcaaagatggctcaagactttgccaggattttgttagtttagtgcaagagtggcttcaaaagattcaggcagcaaattcattaggtggtgtatttggtgatacaaataaaagtgagctggctgcatttgcatcctacgcattggcttttccaagcaacttccttgctcttgtggacacatatgacgttatgcgaagtggtattccgaatttctgtgcagtggctctagcacttcatgacttagggtacaaggcatctggtattagattagattctggtgatctggcctatttgtccattgaagcacgaaaagtgtttagtgcagtagagaaggaatataatgtacctggttttgcaaagatgctcattactgctagcaacgacctgaatgaagaaacaattgatgccctcaacaaacagggtcatgaggttgatgcctttggaattggaacttaccttgtgacgtgttattcccaggctgctcttggctgtgtctttaagctagttgagataaataataaacctcgtattaagctttctgaggatgtggcaaaatatgtttcaggtttccattccatgcaaaaagagatgcttcagactgtatgggaaagaaggctacccactggtagatatcatgattcgcgaaagtgaaccatcgcctaaggcaggagaaagaatcctctgccgccatccattcattgaatcaaagagagcatatgttgtcccccagcatgttgaggagcttctacagtgctattggcctgggacatcagataaacctagagcagagctgccctccttggagaagatcagaagccgctgcatgcagcagcttgaaatgctgcgcccggatcacatccggcggctaaatccaacgccctacaaggtgagcgtgagcaccaagctgtacgatttcatccaccgcctatggctgaacgaggcgccagtaggtgaactgcagtagatgatgatcatataaaagaagttttgggtcatctgcgatacagcagcaattcatcgaagaaaattagagctcttctgcacaacatcaacagttgagcccatggcaggattttgctccccaaattttcatctctagtcaccggtatagaggcaggttaatcaggttgtctagtttatacgtcccttaattggtgggatgctatacacatcatcatcagaaaagaaccgaaatcatatggagccaaaaatgttactaggtcgtccggtgtttgtgctcgacggtgtcacatttgtttttctagccgatcgtgcatatggtcatataaaacactgcactgttgattgtactgtttatatagtgaaatttgaaatgatagatgaaataggagatagaatgagtaaacgatccaactgaccaggcacgctgcgctagcgaggcttgaattgctgctctctgcgttgcctgttctccttgaattatgcaaggatcgagactcttccgtcctttatatctatactatacttaaaacatc

SEQ ID NO: 14421 - DNA, 2410 bp, Zea Mays
gttcaggaacagagtttttatggggaaaagctataattgtgtcattcaaagaatattctaggaagaactagaagctatttgttcatggagatgaaaacaatagatgatcataagctgatcgctgcagttactaccatcatattagagctaatcgaatgggtagtggcaaaaggataatgctggatttgagaaattctgatgtcttccttttgggttttttatgtctttgaattgacgtgctgggtagtgggtactcaggcttgccttggagcctatgctaattgaatttcaatctcccagcaaatttgcaaaatcatccatttacaatgaatacagacaattggtggaaaaaggtttgacctgtactttaggaaaaatccatttggtggggaattcactgtttttgctggccttgaggagtgcatcaaatttattgcgaattttaagttcacagaacatgacatttctttcctgcaatcagtcatgccaatgtgtgagggtgcgttcttcaattatctcagggaagttgactgctctgatgtagaggtgtactccattcctgagggatcagtagtttttccaaaagtgcccttgatgagagttgagggtccagttgctgtggttcaacttctggagactccatttgtgaatcttatcaattatgcctctttggtaactactaatgctgcgcgtcatcgtcatgttgctggaaagtcaaaggttctgttagaatttggtttaagacgggcacagggacctgatggagcaataagtgcctcaaaatattgttttatgggaggttttgacgcaaccagtaatgttttggctgggaatttgtttggcataccacttcgtggaacacattctcatgcttttgttagctcatacatgagccttgatgagataccagacaaggccctcaagagcaaagatggctcaagactttgccaggattttgttagtttagtgcaagagtggcttcaaaagattcaggcagcaaattcattaggtggtgtatttggtgatacaaataaaagtgagctggctgcatttgcatcctacgcattggcttttccaagcaacttccttgctcttgtggacacatatgacgttatgcgaagtggtattccgaatttctgtgcagtggctctagcacttcatgacttagggtacaaggcatctggtattagattagattctggtgatctggcctatttgtccattgaagcacgaaaagtgtttagtgcagtagagaaggaatataatgtacctggttttgcaaagatgctcattactgctagcaacgacctgaatgaagaaacaattgatgccctcaacaaacagggtcatgaggttgatgcctttggaattggaacttaccttgtgacgtgttattcccaggctgctcttggctgtgtctttaagctagttgagataaataataaacctcgtattaagctttctgaggatgtggcaaaagtttccattccatgcaaaaagagatgcttcagactgtatgggaaagaaggctacccactggtagatatcatgattcgcgaaagtgaaccatcgcctaaggcaggagaaagaatcctctgccgccatccattcattgaatcaaagagagcatatgttgtcccccagcatgttgaggagcttctacagtgctattggcctgggacatcagataaacctagagcagagctgccctccttggagaagatcagaagccgctgcatgcagcagcttgaaatgctgcgcccggatcacatccggcggctaaatccaacgccctacaaggtgagcgtgagcaccaagctgtacgatttcatccaccgcctatggctgaacgaggcgccagtaggtgaactgcagtagatgatgatcatataaaagaagttttgggtcatctgcgatacagcagcaattcatcgaagaaaattagagctcttctgcacaacatcaacagttgagcccatggcaggattttgctccccaaattttcatctctagtcaccggtatagaggcaggttaatcaggttgtctagtttatacgtcccttaattggtgggatgctatacacatcatcatcagaaaagaaccgaaatcatatggagccaaaaatgttactaggtcgtccggtgtttgtgctcgacggtgtcacatttgtttttctagccgatcgtgcatatggtcatataaaacactgcactgttgattgtactgtttatatagtgaaatttgaaatgatagatgaaataggagatagaatgagtaaacgatccaactgaccaggcacgctgcgctagcgaggcttgaattgctgctctctgcgttgcctgttctccttgaattatgcaaggatcgagactcttccgtcctttatatctatactatacttaaaacatc

SEQ ID NO: 14422 - DNA, 2109 bp, Zea Mays
gtttttatggggaaaagctataattgtgtcattcaaagaatattctaggaaggtttgacctgtactttaggaaaaatccatttggtggggaattcactgtttttgctggccttgaggagtgcatcaaatttattgcgaattttaagttcacagaacatgacatttctttcctgcaatcagtcatgccaatgtgtgagggtgcgttcttcaattatctcagggaagttgactgctctgatgtagaggtgtactccattcctgagggatcagtagtttttccaaaagtgcccttgatgagagttgagggtccagttgctgtggttcaacttctggagactccatttgtgaatcttatcaattatgcctctttggtaactactaatgctgcgcgtcatcgtcatgttgctggaaagtcaaaggttctgttagaatttggtttaagacgggcacagggacctgatggagcaataagtgcctcaaaatattgttttatgggaggttttgacgcaaccagtaatgttttggctgggaatttgtttggcataccacttcgtggaacacattctcatgcttttgttagctcatacatgagccttgatgagataccagacaaggccctcaagagcaaagatggctcaagactttgccaggattttgttagtttagtgcaagagtggcttcaaaagattcaggcagcaaattcattaggtggtgtatttggtgatacaaataaaagtgagctggctgcatttgcatcctacgcattggcttttccaagcaacttccttgctcttgtggacacatatgacgttatgcgaagtggtattccgaatttctgtgcagtggctctagcacttcatgacttagggtacaaggcatctggtattagattagattctggtgatctggcctatttgtccattgaagcacgaaaagtgtttagtgcagtagagaaggaatataatgtacctggttttgcaaagatgctcattactgctagcaacgacctgaatgaagaaacaattgatgccctcaacaaacagggtcatgaggttgatgcctttggaattggaacttaccttgtgacgtgttattcccaggctgctcttggctgtgtctttaagctagttgagataaataataaacctcgtattaagctttctgaggatgtggcaaaagtttccattccatgcaaaaagagatgcttcagactgtatgggaaagaaggctacccactggtagatatcatgattcgcgaaagtgaaccatcgcctaaggcaggagaaagaatcctctgccgccatccattcattgaatcaaagagagcatatgttgtcccccagcatgttgaggagcttctacagtgctattggcctgggacatcagataaacctagagcagagctgccctccttggagaagatcagaagccgctgcatgcagcagcttgaaatgctgcgcccggatcacatccggcggctaaatccaacgccctacaaggtgagcgtgagcaccaagctgtacgatttcatccaccgcctatggctgaacgaggcgccagtaggtgaactgcagtagatgatgatcatataaaagaagttttgggtcatctgcgatacagcagcaattcatcgaagaaaattagagctcttctgcacaacatcaacagttgagcccatggcaggattttgctccccaaattttcatctctagtcaccggtatagaggcaggttaatcaggttgtctagtttatacgtcccttaattggtgggatgctatacacatcatcatcagaaaagaaccgaaatcatatggagccaaaaatgttactaggtcgtccggtgtttgtgctcgacggtgtcacatttgtttttctagccgatcgtgcatatggtcatataaaacactgcactgttgattgtactgtttatatagtgaaatttgaaatgatagatgaaataggagatagaatgagtaaacgatccaactgaccaggcacgctgcgctagcgaggcttgaattgctgctctctgcgttgcctgttctccttgaattatgcaaggatcgagactcttccgtcctttatatctatactatacttaaaacatc

SEQ ID NO: 14423 - DNA, 1484 bp, Zea Mays
ctcgacgccagtgacgttgagctatgtggtcacgtgggctgtcctgtctggctgccatcgcagcgctacctcggtgcgatatgccatgacgccgagatgtgttgtctgcgccatgacgacgagcataagaagaccctcgctcgctctgcgcgcatcgaaccaaaaaccacaccgcggcggcagctatataaaagccttcacctgacccgggcgctagggtttattcgctcctcccgcccgccgccgtcgccgcctcctctccccagcacccggagctcgcccgaccgccgctcaccatgatcatccccaagaagaaccgcaatgagatctgcaagtacctcttcaaggagggcgtgctgtatgccaagaaggactacaacctggcgaagcacccgcagatcgatgtgcccaacctccaggtgatcaagctcatgcagagctttaagtccaaggagtatgttagggagaccttctcctggcagtactactactggtatctcaccaacgatggcattgagcacctacgcaactacctgaacctcccgtctgagatcgtgcctgccacgctcaagaagtctgccaagccacctggccgcccatttggctctggccctcctggtgaccgcccaaggggcccaggtcgttttgacggcgacaggccaaggtttggtgacagggatgggtaccgtggtggtcctcgtggtgctcctggtgactttggtggcgataagagtggagctcctgctgagttccagccatcattcaggaggcctggctttgggcgtggtggcggcagcggcttcggcgcaggcccaacctcttcttccatggagtgaagttgcccttggtttggacatggtgtttcccttcgcatgtggcctttagttttgaaggacagttattatgtactagtaatattactcggatcggccagtgctgacatatgcaaaaaaatgttctgtcgttatacattggttccagtattattgtcttcgcaaaactcttgggttttcaagttactactttttcactgatatacgagtaatcgtcctgcgtttggtggttggctgatctgatcggttggtcatgctgggatgttgttttgttcgtatgttgtgtcgtctagctgtttctgtttggacccaagaagttctaatctgtcaagtaactgtagcagatataatctctgagaactggttgtgtagtgatattagccatgatgttctgatggtacgagccttcctggggttgtcttttatatttgcagatgattgcatgtataacatgttggtccaggattggtttgttttttttcttttgttttttccggcttgtttgcctctatgttccagcaactgatagttgtcttttatattagcggaagcagatgatgtacaagtatggcatatatgtgttgtattgagatgatgtacacgtattgcattccaatacataaaaagtcgaaagatgagccttcatgttag

SEQ ID NO: 14424 - DNA, 1930 bp, Zea Mays
aaaaaccacaccgcggcggcagctatataaaagccttcacctgacccgggcgctagggtttattcgctcctcccgcccgccgccgtcgccgcctcctctccccagcacccggagctcgcccgaccgccgctcaccatgatcatccccaagaagaaccgcaatgagatctgcaagtacctcttcaaggagggcgtgctgtatgccaagaaggactacaacctggcgaagcacccgcagatcgatgtgcccaacctccaggtgatcaagctcatgcagagctttaagtccaaggagtatgttagggagaccttctcctggcagtactactactggtatctcaccaacgatggcattgagcacctacgcaactacctgaacctcccgtctgagatcgtgcctgccacgctcaagaagtctgccaagccacctggccgcccatttggctctggccctcctggtgaccgcccaaggtaaaagccttaaatcttgtggtgctgtggcatttttgttcatgtacttaacaaatgtgtctagtgatgatttcacatgtttgcttctcatgtctggtgatgattttagatggaaaagtacagtcaaatctgaagtagctttttgtgcacctctcatcttatgatgatagggttatctagtaaatggcttgttgctgggtgcttattatgcattttccaattatgtttttgtgcaatgcaacattatttctaatactgtagctcggggatattggagataaagccttttacatgtgtgctattatgaagctggttgttgcataagaaaaaaagattacatgtttattaaagaattctgtctttgctttatgtatttatactgagttgtaattggtttgctaaaatctgctctagaatgacacattttgcagtgtaaaggatattgttgtgaagaagacaatctaaatttatgtaagattgtatttgtgtgcttattacagtgtgttttaccgaggagcagattaaagttaaccaattaggtacaaatctttaagttttgaattgttgatactgttatttaatcttctctttcctgtaacttatgtaggggcccaggtcgttttgacggcgacaggccaaggtttggtgacagggatgggtaccgtggtggtcctcgtggtgctcctggtgactttggtggcgataagagtggagctcctgctgagttccagccatcattcaggaggcctggctttgggcgtggtggcggcagcggcttcggcgcaggcccaacctcttcttccatggagtgaagttgcccttggtttggacatggtgtttcccttcgcatgtggcctttagttttgaaggacagttattatgtactagtaatattactcggatcggccagtgctgacatatgcaaaaaaatgttctgtcgttatacattggttccagtattattgtcttcgcaaaactcttgggttttcaagttactactttttcactgatatacgagtaatcgtcctgcgtttggtggttggctgatctgatcggttggtcatgctgggatgttgttttgttcgtatgttgtgtcgtctagctgtttctgtttggacccaagaagttctaatctgtcaagtaactgtagcagatataatctctgagaactggttgtgtagtgatattagccatgatgttctgatggtacgagccttcctggggttgtcttttatatttgcagatgattgcatgtataacatgttggtccaggattggtttgttttttttcttttgttttttccggcttgtttgcctctatgttccagcaactgatagttgtcttttatattagcggaagcagatgatgtacaagtatggcatatatgtgttgtattgagatgatgtacacgtattgcattccaatacataaaaagtcgaaagatgagccttcatgttag

SEQ ID NO: 14425 - DNA, 1952 bp, Zea Mays
aaaaaccacaccgcggcggcagctatataaaagccttcacctgacccgggcgctagggtttattcgctcctcccgcccgccgccgtcgccgcctcctctccccagcacccggagctcgcccgaccgccgctcaccatgatcatccccaagaagaaccgcaatgagatctgcaagtacctcttcaaggtttgatgtatttgctgctgcagagggcgtgctgtatgccaagaaggactacaacctggcgaagcacccgcagatcgatgtgcccaacctccaggtgatcaagctcatgcagagctttaagtccaaggagtatgttagggagaccttctcctggcagtactactactggtatctcaccaacgatggcattgagcacctacgcaactacctgaacctcccgtctgagatcgtgcctgccacgctcaagaagtctgccaagccacctggccgcccatttggctctggccctcctggtgaccgcccaaggtaaaagccttaaatcttgtggtgctgtggcatttttgttcatgtacttaacaaatgtgtctagtgatgatttcacatgtttgcttctcatgtctggtgatgattttagatggaaaagtacagtcaaatctgaagtagctttttgtgcacctctcatcttatgatgatagggttatctagtaaatggcttgttgctgggtgcttattatgcattttccaattatgtttttgtgcaatgcaacattatttctaatactgtagctcggggatattggagataaagccttttacatgtgtgctattatgaagctggttgttgcataagaaaaaaagattacatgtttattaaagaattctgtctttgctttatgtatttatactgagttgtaattggtttgctaaaatctgctctagaatgacacattttgcagtgtaaaggatattgttgtgaagaagacaatctaaatttatgtaagattgtatttgtgtgcttattacagtgtgttttaccgaggagcagattaaagttaaccaattaggtacaaatctttaagttttgaattgttgatactgttatttaatcttctctttcctgtaacttatgtaggggcccaggtcgttttgacggcgacaggccaaggtttggtgacagggatgggtaccgtggtggtcctcgtggtgctcctggtgactttggtggcgataagagtggagctcctgctgagttccagccatcattcaggaggcctggctttgggcgtggtggcggcagcggcttcggcgcaggcccaacctcttcttccatggagtgaagttgcccttggtttggacatggtgtttcccttcgcatgtggcctttagttttgaaggacagttattatgtactagtaatattactcggatcggccagtgctgacatatgcaaaaaaatgttctgtcgttatacattggttccagtattattgtcttcgcaaaactcttgggttttcaagttactactttttcactgatatacgagtaatcgtcctgcgtttggtggttggctgatctgatcggttggtcatgctgggatgttgttttgttcgtatgttgtgtcgtctagctgtttctgtttggacccaagaagttctaatctgtcaagtaactgtagcagatataatctctgagaactggttgtgtagtgatattagccatgatgttctgatggtacgagccttcctggggttgtcttttatatttgcagatgattgcatgtataacatgttggtccaggattggtttgttttttttcttttgttttttccggcttgtttgcctctatgttccagcaactgatagttgtcttttatattagcggaagcagatgatgtacaagtatggcatatatgtgttgtattgagatgatgtacacgtattgcattccaatacataaaaagtcgaaagatgagccttcatgttag

SEQ ID NO: 14426 - DNA, 1638 bp, Zea Mays
aaaaaccacaccgcggcggcagctatataaaagccttcacctgacccgggcgctagggtttattcgctcctcccgcccgccgccgtcgccgcctcctctccccagcacccggagctcgcccgaccgccgctcaccatgatcatccccaagaagaaccgcaatgagatctgcaagtacctcttcaagggtatgtggttcttggtccactagactcgcagtagggtaacctgggctgattggttgtttcaccttctaggaggtgacaggtcttcaaattattttcgtattactaggagggagtgctcgtgtattattttgagttcacttttttggtccaatttcagcatctcacaaacttacgatctgatatataggcttgacacagcgagcattgtcaaatatttttgtgctccaaatttatttgccccctaaactatggattccttgttatacattcatctgcgttatgttcatgcgatttctgttagtttgatgtatttgctgctgcagagggcgtgctgtatgccaagaaggactacaacctggcgaagcacccgcagatcgatgtgcccaacctccaggtgatcaagctcatgcagagctttaagtccaaggagtatgttagggagaccttctcctggcagtactactactggtatctcaccaacgatggcattgagcacctacgcaactacctgaacctcccgtctgagatcgtgcctgccacgctcaagaagtctgccaagccacctggccgcccatttggctctggccctcctggtgaccgcccaaggtcgttttgacggcgacaggccaaggtttggtgacagggatgggtaccgtggtggtcctcgtggtgctcctggtgactttggtggcgataagagtggagctcctgctgagttccagccatcattcaggaggcctggctttgggcgtggtggcggcagcggcttcggcgcaggcccaacctcttcttccatggagtgaagttgcccttggtttggacatggtgtttcccttcgcatgtggcctttagttttgaaggacagttattatgtactagtaatattactcggatcggccagtgctgacatatgcaaaaaaatgttctgtcgttatacattggttccagtattattgtcttcgcaaaactcttgggttttcaagttactactttttcactgatatacgagtaatcgtcctgcgtttggtggttggctgatctgatcggttggtcatgctgggatgttgttttgttcgtatgttgtgtcgtctagctgtttctgtttggacccaagaagttctaatctgtcaagtaactgtagcagatataatctctgagaactggttgtgtagtgatattagccatgatgttctgatggtacgagccttcctggggttgtcttttatatttgcagatgattgcatgtataacatgttggtccaggattggtttgttttttttcttttgttttttccggcttgtttgcctctatgttccagcaactgatagttgtcttttatattagcggaagcagatgatgtacaagtatggcatatatgtgttgtattgagatgatgtacacgtattgcattccaatacataaaaagtcgaaagatgagccttcatgttag

SEQ ID NO: 14427 - DNA, 1705 bp, Zea Mays
cgccggcagacacgacaaggctgacctcagctttctactctactacctgcaggagtgcaggctgcaggcgcacacgcaactcgcagccgaccacgccccccgcaggccgcgatgccgccgccgccgcagcagcagcccccgcaccggcacgccaagacggactcggaggtgacgtccagcatggcggcgtcgtccccgccgcgtgcggcctactacgtgcagtcgccgagccacgacgacggcgagaacaagacggccgcgtcctccttccactcgtcccctgcggcatccccgccgcggtcggcgtccaggcactcctcctcctcctcccgcttctccgccagcgcaaagggcaccgcctccggcgccggcggcggccggcgacgcggcagcgcgtgggcgaaggaggcggccatcgaggaggagggcctgctcggcgtggacgacggcagcggcggcgatggagacggccgcggcgggatccccaggcgggcgcgctacttgctcggcttcgcgggcgccttcctcggcctgttcctcctcttcgcgctcgtcctctggggcgccagccgcaaccagcgccccgtcgtggccctgcgcgccgtcacgttccaccgcttcgtcgtccaggccggcaccgacgcgtcgctcgtgcccaccgagatggcctcgctcaacgccaccgtcagcctcaccttccgcaacgtcggtaccttcttcggcgtccacgtctccgccgaccccgtcacgctccactacgcgcagctccagctcgcgtcgggcaacatgaagtacttctaccagccccggaggagccagcggagcctggcggtggcggtggtcggcgacaaggtgcccctgtacggcggcggggcggggctgagcagcaccccgacgacgctgccgccgccgaggaagcgcgcgccgccggtggtggtgccgccgccgcccgtgccgctgcggctggccgtgcgggtgcggtcgcgcgcgttcgtgctggggagcctggtcaagcccaagttctacagcgaggcgcagtgcagcgtcaccatggaccaggccaggctcggtaagccagtctccctcaacaaggcatgcacctacacacactagcttggctaggctacatacatacgcctgctgccgtgggtcgtctcgtcgccaccatgcatggtcgtcgcgtcgtgaactttgcccttcttcttgaacaacacacactctctctcagtctctctctcccttcgcttttctgcgtgcgtgcgtttgttggtcgcttgtcttgtacatagaaatttttagtttctggtgtacgtaggagagttttgagtgagatggaataagaatcaggcattatttccctcatacggcgtttccgattgcgtgacatgccgtggagggcatgtaaaatgtcggtgaaattcaatgcgcctgtttggtgaaattcaatgcgctcgaagcagacgtaagattctggtgaaatacacctaaaaattcacggccgcgcatgtaatatagcttcttcaggtgaagtttggaccccggccgacagtcaccgaccgcaagtgctcatccggtgaggtttgtcagttagattcaaatccactaccgttcatataaatccgattcttttttttagatctgacaaatgtaacacggagccttcgcaatgaatgaatgaatgattgaataaacaaataaataaaaa

SEQ ID NO: 14428 - DNA, 1881 bp, Zea Mays
ccgcctccgatcctccgcaggccgcgctcgtgttcccgtgctccgccacgccaccagagtgggcagcaccactaagacgcggatgatcacgtagccgcagcgcccgccgcccgccgcatgcagccacagcagccccgacccggacgtcaaaagcttagggcgagcgctccccatcgcaccgatcagccgcctgcacagcgcgctcctagctgtacgtatacgtacgtccacatggcggcgtccacgcgccggaggcacggggcggcggcgccgggggagtgggcggcggtgtccggcgcgggcgcgtggcgcgtcgaggaggtcgggaagcaccagctgatgcggcgcacggggctccccgcgcgcgacctccgcgcgctcgacccggcgctgcagttctactaccacccgtgcagcatcgtgggccgggaccgcgccgtcgttgtcaacctggagcgcgcccgcgccgtcatcacggccaccgaggtgctcgtcccggcgccgcgggaccccgccgtcgcgccgctattccgcagcctccgcgcgcgcctggtcgcctcctcggccccagctgcctcgcccgcgtccgcgccgccgccggaagcctttgaggaggacgaggccgcggaggatggaggcggtgcactgccgccgagccccggtggagtaggaggcggcaaggacgggcaagcgtctgcacgcgacaagctcccgccgttcgagttcagggcgctcgaggtgtgcctcgagttctcatgcaagtcacttgaacatgagacttgtacactggaggaggaggcgtacccagctttagacgagctcagctccaacatcagcactctcactctggagcgtgtgaggcagataaagagccggttgcttgccatctcggggagagttcagaaggtcagggatgaactagaacacttgctagacgctgacgtggatatggccgccatgcacctatccgacaagctagccgctgatggccagtcatcgagatgcaacaccaacagcgaaccaaacgaattcgacgaagagagggaccgagaagccgaagcaggcgacgcgagctccgagggcgccaatggcagcgggactgggacctccgtcggcttcacgcccaaaatcgacgagctggagaaccttctggaagcctacttcgtgcaggccgacggcaccctgaacaagctctccactctgcgcgagtacgtggacgacacggaggactacatcaacgtcatgctggacgacaagcagaaccagctgctgcaggtggggatcttgctgtcgacggccacgctggtgatgagcgtcgccatcgcgatcacgggcgtcttcggcatgaacatcacgatcccgctctacaatgctcctacaggagtcttctggcaggtcaccggcggcctcgtcgttgccaccgccgccgtctacgtcgtcgcgctgatctgctacaagaggagcgcagccgtcttcctcatcctttcaacagcaccgcacgcgcattcatcagcgggtcgcggcaggccatgggcacgccgccggccatgccctcgacgacggaccccagccggagtgcgtgacgaacgcgcccacggccgggtgccgcagcacggcggcctgcggcgcccacggcacgatgagcctggagtcggcggcggccttggctcgcatctggagcatctggagcacgcgaggacccttggccccaaggggtctgactgccacaaggccgctgtgatcggtgacactatcggtgaccccctgaaggacacctccggcccgtcccttaacatcctcatcaagctcatggccgtggagtccctcgtgtttgcccccttctttgccacccagggtggcctgctcttcaagtacctgtaa

SEQ ID NO: 14429 - DNA, 2871 bp, Zea Mays
aggaaacaaacttcttgactactacgaaacatcgaactgttctcacagatcactctcaaactttttcccattttctctcaaaaagaagaaacagcgaaatttgtaattctcagtgacgccaaccctgactccgtttgacgcggctccgatggtcaccgccggcgacctcgccgctgccgccaactcctgagacctcgtcgcgcctaggccctaggggcgtgagcttgcctccgccgcgatccgggtaccagtcctcgaggatgcagtaccagcacgctggcagtcgaagccgcatgccgccattcgcgcgcggcggcggcgcctacagccgcggacggaagcagttctacccgccgtctcccctcccgtcggcggcgctgtctctgccgctgcagaacaagtatgaggtgctcatggaggcaggccgcctcgctgccgagtacctgttggcgaagggcgtgctcccaccgggctccctgcagcaacgcagcgggacagtcgtccctggagggtggggccagcttcctcctccgcctccgctttccgtgactttggaagcccaagcttaccacggggccaggaatggccggcggcaggtcgatgatgagtgtggtattcgtaatgccagctcgcggcggaaccgtggtggtgactacagtagcagcaacagtagtaactacaatagaagggggaaaaggaaatttggggctgacaataggtattcagattgggcaaaggatagggggaggaacaggcggtattctgatatccggagttatgatgacgatgatgacaatggggctcctgggttcaaacgggagcgccgaagcagtggtgggattgacgaggttggcagtagggtgtcaggggtggctggggagggaccatcatcgaaggtggaggcgatgggggagtcggagctggaggatactgggtcaaaggctagttctaacagcaatgtccagcagaaagctgatgcttcgcaagaggcgaaggatgaaaatgaggcaagcaaaatgcaggagaatagtgtggtgtctaattcagatgtagtcgagcaagctttgaatggtgaagataatagcaacaatgattcttctgatggtgttcaagagttagagacaaaacatttgccagtatcctcaggtgaaaaggtctcagatgggaggcctgaagatagtggtgttctgaatggcaaggttgaagatggcagtacttcgcatgagaaggctgaagatgatacaacgtcagaagaggtctccattatggagaacaatttgcctaatgatgttggaaatttgctaaattattgtaattttgcaagagttccaacaagaccacgatcagtgcttgcaaacaggaatgttgaaccagctcaaaaagaaattgatgtgtccgaactggtcaatccagttactcctgaagaaatgtcccagatggcaattgatagagaagctaacaccaattccataactaatattgaggaaaacagtaaagacgagctcgttggtcaagaccaagaacgtgctgaagaaattaatatctgcaatcaagtggcggaatcaatggcattccatgaaaaggaaacacaaggtgaaactgaggaaatggaagagcagaagaacatccctcgacattatgaagttgaggataataatgagactaatgaactgtctcctacatttgcttcttgtcagaataacttcagtttgcaagtggaaaaaggaatacaaatctacaatttagataccccgccacaagatgaagtgttgattgatccacccgataaagggaagacagttgattcagagttatcacctaacatcaaagcagaagatgctgttacaatagaagaggaaaagcttggccagtctagctcatttaaaatacgtgatctcaacctggttggtagtccagaggttgccgacatgcgaggtgaccctcgtttaggccaaagcttcactgctagatgttcagtggacctacaagataatcaacaaattgaccttggaacagctcttggtaacaatccaaataatactgatacatgtaccccatttctgttggcaaacaaggcagttcaagttattgatatcgaagatgactcaccaattgaagctggtgcttgtgacacttcaaagtcaaaaggtgagatggtatattctagcatggagggctcgatgaaccctccggcaaacaacgatgctctacatggtatcccagatggttatagccttgcaatttcagattaccttggtgctgatatgtcatgctaccaatcaatacaaacagaacttcaagggcataactgttatggatgattcaatatacagttctcttggtgacataggttttatggaggtttgggaccagcaacctcaagactatgagaagttcttctgaggcgctcgtatccctgaaactgttctggagttcgactgataaatagaccagttacacttgcataggcagaaataaaacacctgatcgtgcctataaactggaaacccgtatacttgtgcgccagcagcagctctttcacttgtatgttccaggccatgcatattggggcttttgtacgggtgcatcctacgcgaagcactttcccttctgtaataccagggtctgcgtcggcagctcaaagagcagatattcgtatgaaacagttctttgactccctgccttgcccgacagcggtgtaaaaagttgtcgtatagctgccacgtaattcaaaggaattgacctaagcacgacatagtattcgtctgaaacatgtcttcatttataaacagttctatattccgaaatagaattgtttatttgttatatctatgttcttgttgcgctgtaagttgtgtggtttgtggcttc

SEQ ID NO: 14430 - DNA, 2789 bp, Zea Mays
aaacttcttgactactacgaaacatcgaactgttctcacagatcactctcaaactttttcccattttctctcaaaaagaagaaacagcgaaatttgtaattctcagtgacgccaaccctgactccgtttgacgcggctccgatggtcaccgccggcgacctcgccgctgccgccaactcctgagacctcgtcgcgcctaggccctaggggcgtgagcttgcctccgccgcgatccgggtaccagtcctcgaggatgcagtaccagcacgctggcagtcgaagccgcatgccgccattcgcgcgcggcggcggcgcctacagccgcggacggaagcagttctacccgccgtctcccctcccgtcggcggcgctgtctctgccgctgcagaacaagtatgaggtgctcatggaggcaggccgcctcgctgccgagtacctgttggcgaagggcgtgctcccaccgggctccctgcagcaacgcagcgggacagtcgtccctggagggtggggccagcttcctcctccgcctccgctttccgtgactttggaagcccaagcttaccacggggccaggaatggccggcggcaggtcgatgatgagtgtggtattcgtaatgccagctcgcggcggaaccgtggtggtgactacagtagcagcaacagtagtaactacaatagaagggggaaaaggaaatttggggctgacaataggtattcagattgggcaaaggatagggggaggaacaggcggtattctgatatccggagttatgatgacgatgatgacaatggggctcctgggttcaaacgggagcgccgaagcagtggtgggattgacgaggttggcagtagggtgtcaggggtggctggggagggaccatcatcgaaggtggaggcgatgggggagtcggagctggaggatactgggtcaaaggctagttctaacagcaatgtccagcagaaagctgatgcttcgcaagaggcgaaggatgaaaatgaggcaagcaaaatgcaggagaatagtgtggtgtctaattcagatgtagtcgagcaagctttgaatggtgaagataatagcaacaatgattcttctgatggtgttcaagagttagagacaaaacatttgccagtatcctcaggtgaaaaggtctcagatgggaggcctgaagatagtggtgttctgaatggcaaggttgaagatggcagtacttcgcatgagaaggctgaagatgatacaacgtcagaagaggtctccattatggagaacaatttgcctaatgatgttggaaatttgctaaattattgtaattttgcaagagttccaacaagaccacgatcagtgcttgcaaacaggaatgttgaaccagctcaaaaagaaattgatgtgtccgaactggtcaatccagttactcctgaagaaatgtcccagatggcaattgatagagaagctaacaccaattccataactaatattgaggaaaacagtaaagacgagctcgttggtcaagaccaagaacgtgctgaagaaattaatatctgcaatcaagtggcggaatcaatggcattccatgaaaaggaaacacaaggtgaaactgaggaaatggaagagcagaagaacatccctcgacattatgaagttgaggataataatgagactaatgaactgtctcctacatttgcttcttgtcagaataacttcagtttgcaagtggaaaaaggaatacaaatctacaatttagataccccgccacaagatgaagtgttgattgatccacccgataaagggaagacagttgattcagagttatcacctaacatcaaagcagaagatgctgttacaatagaagaggaaaagcttggccagtctagctcatttaaaatacgtgatctcaacctggttggtagtccagaggttgccgacatgcgaggtgaccctcgtttaggccaaagcttcactgctagatgttcagtggacctacaagataatcaacaaattgaccttggaacagctcttggtaacaatccaaataatactgatacatgtaccccatttctgttggcaaacaaggcagttcaagttattgatatcgaagatgactcaccaattgaagctggtgcttgtgacacttcaaagtcaaaattaccttggtgctgatatgtcatgctaccaatcaatacaaacagaacttcaaggtgggatgaacctaaatggttcagagggcataactgttatggatgattcaatatacagttctcttggtgacataggttttatggaggtttgggaccagcaacctcaagactatgagaagttcttctgaggcgctcgtatccctgaaactgttctggagttcgactgataaatagaccagttacacttgcataggcagaaataaaacacctgatcgtgcctataaactggaaacccgtatacttgtgcgccagcagcagctctttcacttgtatgttccaggccatgcatattggggcttttgtacgggtgcatcctacgcgaagcactttcccttctgtaataccagggtctgcgtcggcagctcaaagagcagatattcgtatgaaacagttctttgactccctgccttgcccgacagcggtgtaaaaagttgtcgtatagctgccacgtaattcaaaggaattgacctaagcacgacatagtattcgtctgaaacatgtcttcatttataaacagttctatattccgaaatagaattgtttatttgttatatctatgttcttgttgcgctgtaagttgtgtggtttgtggcttc

SEQ ID NO: 14431 - DNA, 1485 bp, Zea Mays
atgaagatccaacagagaacctgggcattttcaaatgatatctctgttgatattcgtcctgacataaactcatttgatcattttttaagcatgcgatacattgcaacagatagaccctggctgaaattatatggaataagagttcagcctgtgccaccattcagcagtttgagctacaaacctgatccagcgctcattcatcattgcctacctgatgaactaatgctcgagatttttacaagaatgagcccatatactttagggagggctgcatgtgtctgccgcaagtggaaatatactgcacgcaatcctactttgtggcgtgctgcatgcttgaaaacttggcagaggagtggaatggaggcaaactacatgatggttcggtcgttgtatgattcctcttggaggagaatgtggctacagagaccaagaatccgaattgatggtaaatattcaagaagccttatatcatacaatgtctctatgtgagcaggaacacatacattcatactggagttacagaatggcaattcaagaaaactgtcaatgtggtttgctactaccgttacttaagatttttcccgagcgggaagtttctctataagatctctccagataaagttaaagacgctgttaagtgcatgcatttccgggcatcaaaggctgattgtgtatttaaaggtgactacgtgctgtcagaggatggccagatagaaatggctctcctgtacccagggcatcggtacacgcttgtcaggatgcaccttaggcttaggggcaccacagttggtgcaaataacaggttggatgtactgaagattctaaccaccggagtgaatgcaactgagctgcaaaactggaaaggaagcatactagaactcgttgagggctgggaggaggatgagacgcatgacccggatgtgcctgccgtttcccacagcaggggtttgtcaccctttgtgtttgttccgtttgaggaggctgatacttcggtgttaaacctccccgtggagaagatggactactacgtccctgggtgagctcttcatgacgacgatggccattggagaatgagatgatgggtggtcatgttacaggttaaaatgatgatggccaacgatctccttccctctcagatcccttgctagagcaaatgtgtaaatacagtgttgttttgtttacacttttcggttggtcgcatgctgttgtatgacattatgtttgttgatacctggaaacaggttttattattgttggtgcttgaaaatggtgtgggaggaaactcactatcaaaaaaagtagagctaccctcctgaagtaatgtgggtctgtattattatagaaacaagcagtctatcgttgcgaactttttagtctgtatgtattttcgtattgtacagttaaaccttggcaccgtgcttcgttttttttggaacgacactgacgtttagctactcgagtactaggggtggtgtttaaatgtac

SEQ ID NO: 14432 - DNA, 1018 bp, Zea Mays
attcaagaagccttatatcatacaatgaacacatacattcatactggagttacagaatggcaattcaagaaaactgtcaatgtggtttgctactaccgttacttaagatttttcccgagcgggaagtttctctataagatctctccagataaagttaaagacgctgttaagtgcatgcatttccgggcatcaaaggctgattgtgtatttaaaggtgactacgtgctgtcagaggatggccagatagaaatggctctcctgtacccagggcatcggtacacgcttgtcaggatgcaccttaggcttaggggcaccacagttggtgcaaataacaggttggatgtactgaagattctaaccaccggagtgaatgcaactgagctgcaaaactggaaaggaagcatactagaactcgttgagggctgggaggaggatgagacgcatgacccggatgtgcctgccgtttcccacagcaggggtttgtcaccctttgtgtttgttccgtttgaggaggctgatacttcggtgttaaacctccccgtggagaagatggactactacgtccctgggtgagctcttcatgacgacgatggccattggagaatgagatgatgggtggtcatgttacaggttaaaatgatgatggccaacgatctccttccctctcagatcccttgctagagcaaatgtgtaaatacagtgttgttttgtttacacttttcggttggtcgcatgctgttgtatgacattatgtttgttgatacctggaaacaggttttattattgttggtgcttgaaaatggtgtgggaggaaactcactatcaaaaaaagtagagctaccctcctgaagtaatgtgggtctgtattattatagaaacaagcagtctatcgttgcgaactttttagtctgtatgtattttcgtattgtacagttaaaccttggcaccgtgcttcgttttttttggaacgacactgacgtttagctactcgagtactaggggtggtgtttaaatgtac

SEQ ID NO: 14433 - DNA, 908 bp, Zea Mays
ccgcaccttctctttcgtcagttttcgaagcggcgctccccttcaccgactccttcgcgcactcactgccacgccttgccccgctgctgcttgccaatcacgaaccagtgcatcgtgcggacgaggatgctgggcatagagtagaatggcgggaccgcacgccttgtcgcggtcgcgtctcgctgtccatggagcgactctctacgccctgcctgcttcgctcgctggctcaccgcagctggaacggcgccacattcctttgttagagccgccgttttgcatacgccgagggagagaaccgaggggagagagagtttggtcgtcgagtcacatggagggttcgctggtggcctaggatctccgtgtgtcgcatcgcctaggcggtggattccccgtgcgtggagccaccagcagctgcggagtccgcgccgccgccatgggtccaaatctctgttgctgttcggagcacgagctcgacccggtgagcttcaccacgacaccaagtttcttctccggttctccgcggacaaaacggtgcaggggcgcgcgacgaactgctcgtcggatcttcaaggccgcgtctcaccatgggcagggaatcccactgctccgatctcggagaagaacaggtggttcaggaggagccacgtatcgaggagttcaattcaatctaggtggtgtttctcagttgacattggtgccgacgatccttagttcgtgttatatttatcttttatttttgtaagtcttccgctatgtaataaatactctgattattgtgacatttatctctatacactcagttattatatatgttgtcttcttggcgcatgtatgagatgcacctggctttgttccttaaagccgggtgtgacactaaataacaaaacagttatttgtggtcggaa

SEQ ID NO: 14434 - DNA, 1921 bp, Zea Mays
ccgcaccttctctttcgtcagttttcgaagcggcgctccccttcaccgactccttcgcgcactcactgccacgccttgccccgctgctgcttgccaatcacgaaccagtgcatcgtgcggacgaggatgctgggcatagagtagaatggcgggaccgcacgccttgtcgcggtcgcgtctcgctgtccatggagcgactctctacgccctgcctgcttcgctcgctggctcaccgcagctggaacggcgccacattcctttgttagagccgccgttttgcatacgccgagggagagaaccgaggggagagagagtttggtcgtcgagtcacatggagggttcgctggtggcctaggatctccgtgtgtcgcatcgcctaggcggtggattccccgtgcgtggagccaccagcagctgcggagtccgcgccgccgccatgggtccaaatctctgttgctgttcggagcacgagctcgacccggtgagcttcaccacgacaccaagtttcttctccggttctccgcggacaaaacggtgcaggggcgcgcgacgaactgctcgtcggatcttcaaggccgcgtctcaccatgggcagggaatcccactgctccgatctcgtgaggtcacgaggatctgaagaatcaccctgataactggaaatcttaagtgccaggcaagttgtgcccttgattcacttttgttacccaataatgttctttataatcatttaccatgcataggtttaattttgatgggacccgataggtcaccctagattgtttatctcattaccttgtttacccctgaatcacatgggtagtgtttgctattgctttatatggttttgggataatcatttcttatatccatgttctagttattttgttattctatttatgttcatgtcaagatcattatattattgttaattggaacatggagcttaacttgagaaacacgtgccaccacaagggaggaatgggaccccttggctaactaattaggaaagctagtggaagactaccttacccgaaaggggcaagggcagtaggggagttgcatgcaaggaggttctcgggttgatttgctgcgatggcggtcagacgggggattcttgcaagtgcttttcccataactgtagcgggttttcggaagctagtggaactttgtaaaggcctcgtagtggatccctagtcattcaccttggtagtgtctaagggcctagctaaccctggcgacatgggaaacacgacttgtgggtaaagggtacaacctctgcagagtgtaaaactgatatactagccgagctcgcggtcatgagcagctcaggactctccgatgattaaattatggaacataactcaatttgtcatttgcatacgcataggattatttattaattttgttctattactttatttaaggtttggtatttacttacacttagtaattgctaataaaattttgaccaacttattaaaagcaatgctcagctttaacccctgtcattgattagccttacacatcatatgaactctcacctttggtaagttcatgccacattattccccacaacttgttgagcgatgaacatgtgtgagctcacccttactgtctcacaccccccacaggagaagaacaggtggttcaggaggagccacgtatcgaggagttcaattcaatctaggtggtgtttctcagttgacattggtgccgacgatccttagttcgtgttatatttatcttttatttttgtaagtcttccgctatgtaataaatactctgattattgtgacatttatctctatacactcagttattatatatgttgtcttcttggcgcatgtatgagatgcacctggctttgttccttaaagccgggtgtgacactaaataacaaaacagttatttgtggtcggaa

SEQ ID NO: 14435 - DNA, 970 bp, Zea Mays
ccgcaccttctctttcgtcagttttcgaagcggcgctccccttcaccgactccttcgcgcactcactgccacgccttgccccgctgctgcttgccaatcacgaaccagtgcatcgtgcggacgaggatgctgggcatagagtagaatggcgggaccgcacgccttgtcgcggtcgcgtctcgctgtccatggagcgactctctacgccctgcctgcttcgctcgctggctcaccgcagctggaacggcgccacattcctttgttagagccgccgttttgcatacgccgagggagagaaccgaggggagagagagtttggtcgtcgagtcacatggagggttcgctggtggcctaggatctccgtgtgtcgcatcgcctaggcggtggattccccgtgcgtggagccaccagcagctgcggagtccgcgccgccgccatgggtccaaatctctgttgctgttcggagcacgagctcgacccggtgagcttcaccacgacaccaagtttcttctccggttctccgcggacaaaacggtgcaggggcgcgcgacgaactgctcgtcggatcttcaaggccgcgtctcaccatgggcagggaatcccactgctccgatctcgcagtgaggtcacgaggatctgaagaatcaccctgataactggaaatcttaagtgccaggcaagagaagaacaggtggttcaggaggagccacgtatcgaggagttcaattcaatctaggtggtgtttctcagttgacattggtgccgacgatccttagttcgtgttatatttatcttttatttttgtaagtcttccgctatgtaataaatactctgattattgtgacatttatctctatacactcagttattatatatgttgtcttcttggcgcatgtatgagatgcacctggctttgttccttaaagccgggtgtgacactaaataacaaaacagttatttgtggtcggaa

SEQ ID NO: 14436 - DNA, 1096 bp, Zea Mays
gtcagttttcgaagcggcgctccccttcaccgactccttcgcgcactcactgccacgccttgccccgctgctgcttgccaatcacgaaccagtgcatcgtgcggacgaggatgctgggcatagagtagaatggcgggaccgcacgccttgtcgcggtcgcgtctcgctgtccatggagcgactctctacgccctgcctgcttcgctcgctggctcaccgcagctggaacggcgccacattcctttgttagagccgccgttttgcatacgccgagggagagaaccgaggggagagagagtttggtcgtcgagtcacatggagggttcgctggtggcctaggatctccgtgtgtcgcatcgcctaggcggtggattccccgtgcgtggagccaccagcagctgcggagtccgcgccgccgccatgggtccaaatctctgttgctgttcggagcacgagctcgacccggtgagcttcaccacgacaccaagtttcttctccggttctccgcggacaaaacggtgcaggggcgcgcgacgaactgctcgtcggatcttcaaggccgcgtctcaccatgggcagggaatcccactgctccgatctcggtgagaattacttctttagattcgctaagtcccccgattcgatttgcgctagtcggtcggcaagtggggatctcgggtcgcgggaacgctatggccggtaatggcctccgccgtggggtctggcagtgaggccgtcgggttggctagagaatgggggcaaggtcgttcggccgtctgatcttagcggacggatgcgattggaggggaggatatccattcgcggcattgaatcctgaccgcagatcttcgatcagatggacggctgggattgaagaccgtgtgacccgttcgcggtgacgttcgggcccgttagatctatggcgtgtgggtgagattcgatccattcgcgggtgatctgggcccttgatctagaattgtgtggctctggtctcacatattaggttgtcgtgacaagttcaaaatagaccccgtgttttctagggatttaacccatagtccatatcagttatgaaatcaaagcaaatgggtcctga

SEQ ID NO: 14437 - DNA, 2195 bp, Zea Mays
cgcgtgctcgcacgcgtgtcgttcctgtgctcgtggacatgctatacgtgccccatcgcacgcctcgccgttgttccacgtgtaaaaagcacacaccacggctacaccttcggtagcttctacaactatcggcggccgcgaatttaagctgcttgccacggcggagcaagctacagcgaagagagtgctcgcaattcgcaaccgcaagatagctcacttcttgttacagctgatgcctgctcaccaaatgcgacaccgacacgccgccgccatgatgaacgtcgtggccatcgggctcatcctctccacgctggcagccgcgggggtctggtccccagcgccgcagccgaccgcggccccacatcatggcgaccgcatcgtccgggagggccgacgcgtggtaatcgtggagtacgagcgcgagctcccgctgtcgaccgatggcggcggcagcgtcaaggtcaaggagacgcgcgtcctgcccccggacgcactggacggcgtcgagggcgacggcggaacctttgatgaggccaggggcgtggtctcagacgcggccggcaaggtggccggtgcggcagaggaaggcaaggagagattgtccgacgccaaggagagcgccaagggcggtgtcctcggtaccgtcaagcggtgcaaggatagactctgcggcgccggcaggaaagtggaagagggagccaaggacgcggtgtcccgcgtcgaacacggcgcggaggacgcggcgaggggcgccatggaggcggtctcggatgccaaggacagcgccgagaacacggcgttcgacgccgtgcagaagggtaaggagacgatgaaaagcgccaaggacaaggcgtcggacgccgagcagcgagggaaggatgccgtaaggagcgcgaaggacaaggcgtccgacgctgcgcatcaggggaaggagacagtgaagagcgccaaggacaaggtctgcgaaactgccagcaaagcgaaggagagggcgtcaggcatccagcacggagcagccgaagcggcgaaggctgcaaaggagagggtgtctgcggcagccaagagcgccaaggacaccgtccagagcgccagggacagcgtctccgacatcgcccagagagccgaggagtgcgcggaggacaccgccgagcgcgcggcggacagggccgcggaggccgaggaggaagcgaaggcgagagcggccgaggtgggcaagaacctgaccgacatcgcgcggcgggcgcgcggcgtggcgtccgacgcggccgcgtacctcctgggcgcgccccgggaggccgcgcgcaccgcgacggccgtgatgcacctcctcggcttcgccaccgcctacggcgcctgcgtgtgggtgacgttcgtgtccagccacgtcctggccgcggcgctgccgcggcagcagctcggcgtggtgcagagcaagctgttcccggtgtacttccgcgccctggcgtacggcgtcgggctggcgctcgccgcgcacctgctggggcgcgagcgcgggtccctggcgtcgcgcgcgcagagcctcaacctgctcgccgcgctcggcctggtcctcgccaacatgctgctgctcgagccgaaagccaccagagtgatgtttgagaggatgaaagtggagaaggaagaaggccggggacgtgacatggcggacatcgtcgacccgcccgtggtcaccgtggccacgccgaccgctggcaccaccaccgtcccgacggcggcggccgcagcacgcacagctcccggggacggcgcggggacggggattggcaagcaatcgaagccggcgacggcaacagccgacgcggagatgtcgaagagccgggcggtgaggctgagcaggcggctgaagcagctcaacggctactcgtccctgtgcaacgtgctctgtctcatgtccctcacctggcacctcgtgcacctcgcgcgccgcctgcacgcgggcaccgcctgctaggttgatgatatgggtggcttcgtggtctcttgtaggagtttactagtttctgatgtagatgtgtcacgactcacgttggcgacttccccgtagtttaggctagtcttatctgataatgtgaggtcagcagggcgtgcttgtctcgtggtggactggttgtggtgatggtatggctgctgacccggcacggctggtcctcataaaatgccaatagaatttgact

SEQ ID NO: 14438 - DNA, 1847 bp, Zea Mays
agcttctacaactatcggcggccgcgaatttaagctgcttgccacggcggagcaagctacagcgaagagagtgctcgcaattcgcaaccgcaagatagctcacttcttgttacagctgatgcctgctcaccaaatgcgacaccgacacgccgccgccatgatgaacgtcgtggccatcgggctcatcctctccacgctggcagccgcgggggtctggtccccagcgccgcagccgaccgcggccccacatcatggcgaccgcatcgtccgggagggccgacgcgtggtaatcgtggagtacgagcgcgagctcccgctgtcgaccgatggcggcggcagcgtcaaggtcaaggagacgcgcgtcctgcccccggacgcactggacggcgtcgagggcgacggcggaacctttgatgaggccaggggcgtggtctcagacgcggccggcaaggtggccggtgcggcagaggaaggcaaggagagagtgaagagcgccaaggacaaggtctgcgaaactgccagcaaagcgaaggagagggcgtcaggcatccagcacggagcagccgaagcggcgaaggctgcaaaggagagggtgtctgcggcagccaagagcgccaaggacaccgtccagagcgccagggacagcgtctccgacatcgcccagagagccgaggagtgcgcggaggacaccgccgagcgcgcggcggacagggccgcggaggccgaggaggaagcgaaggcgagagcggccgaggtgggcaagaacctgaccgacatcgcgcggcgggcgcgcggcgtggcgtccgacgcggccgcgtacctcctgggcgcgccccgggaggccgcgcgcaccgcgacggccgtgatgcacctcctcggcttcgccaccgcctacggcgcctgcgtgtgggtgacgttcgtgtccagccacgtcctggccgcggcgctgccgcggcagcagctcggcgtggtgcagagcaagctgttcccggtgtacttccgcgccctggcgtacggcgtcgggctggcgctcgccgcgcacctgctggggcgcgagcgcgggtccctggcgtcgcgcgcgcagagcctcaacctgctcgccgcgctcggcctggtcctcgccaacatgctgctgctcgagccgaaagccaccagagtgatgtttgagaggatgaaagtggagaaggaagaaggccggggacgtgacatggcggacatcgtcgacccgcccgtggtcaccgtggccacgccgaccgctggcaccaccaccgtcccgacggcggcggccgcagcacgcacagctcccggggacggcgcggggacggggattggcaagcaatcgaagccggcgacggcaacagccgacgcggagatgtcgaagagccgggcggtgaggctgagcaggcggctgaagcagctcaacggctactcgtccctgtgcaacgtgctctgtctcatgtccctcacctggcacctcgtgcacctcgcgcgccgcctgcacgcgggcaccgcctgctaggttgatgatatgggtggcttcgtggtctcttgtaggagtttactagtttctgatgtagatgtgtcacgactcacgttggcgacttccccgtagtttaggcttcagtttgtgttcggctggtttctgtttcacttgtgttgggtagtagtagggttagtgtgtactttggatgtaccaagtaatactcatatgtgtaagtttaggctagtcttatctgataatgtgaggtcagcagggcgtgcttgtctcgtggtggactggttgtggtgatggtatggctgctgacccggcacggctggtcctcataaaatgccaatagaatttgact

SEQ ID NO: 14439 - DNA, 880 bp, Zea Mays
gcgataacgagcggcgccgcggcgggtcaggcagacgccacagcgctagcggcatagccggcgacagaaacaaccgatgccactcctcgccgtctgtccccgccgcgttccgccgctttcgctcgcgcgccgccaccgccgcagcttgtatcgggcccggtccctcgcgctcaaatgcgaggtctcctctcctccgctacttctgacccggaggatgtccgccgctggctcgctgcttgtcgctgtcgtccccgtccccgcgccgtcgccgcaactccccgtcgcctccgcgtcggagttggagacggagacggcggaaggagagagcggagcttctgaggggttagcattggagcgttacaccgaccaggagcagggcttcaccctcctcaagccggcctcctggcccaaggtggagaaggcgggcgcgacggcgctgtttcagcaggagggaaaagggagcaacaatattggggttgtcgtgaaccctgtccggctcaattcgctggcggagttcgggacgccgcagttcgttgcggacaggcttctgcaagcagagaagaaaaaggaaagtaccaagtctgccgaggtgatttcagtgggagagaggtcaggtcatggtggcttgacagtgtatgagatcgagtacacgctggacagcacaaggggagggatgaagcggatcttctcgggtgcgtttgtcgcttcaaggaagctctatctgctcaacatagcctattcagacacccaggagaagcccttggacagggagacaagaaccgttctggaaaaagttctccattcttttgattctgtataggtgatatttttttatagccgaggatcacttcatttaaatgctggtctgtgctgactgctg

SEQ ID NO: 14440 - DNA, 1931 bp, Zea Mays
gcgataacgagcggcgccgcggcgggtcaggcagacgccacagcgctagcggcatagccggcgacagaaacaaccgatgccactcctcgccgtctgtccccgccgcgttccgccgctttcgctcgcgcgccgccaccgccgcagcttgtatcgggcccggtccctcgcgctcaaatgcgaggtctcctctcctccgctacttctgacccggaggatgtccgccgctggctcgctgcttgtcgctgtcgtccccgtccccgcgccgtcgccgcaactccccgtcgcctccgcgtcggagttggagacggagacggcggaaggagagagcggagcttctgaggggttagcattggagcgttacaccgaccaggagcagggcttcaccctcctcaagccggcctcctggcccaaggtggagaaggcgggcgcgacggcgctgtttcagcaggagggaaaagggagcaacaatattggggttgtcgtgaaccctgtccggctcaattcgctggcggagttcgggacgccgcagttcgttgcggacaggcttctgcaagcagagaagaaaaaggaaagtaccaagtctgccgaggtgatttcagtgggagagaggtcaggtcatggtggcttgacagtgtatgagatcgagtacacgctggacagcacaaggggagggatgaagcggatcttctcgggtgcgtttgtcgcttcaaggaagctctatctgctcaacatagcctattcagacacccaggagaagcccttggacagggagacaagaaccgttctggaaaaagttctccattcttttgattctgtataggtgatatttttttatagccgagattggtagtatttgtgtcaccaggcagtaaaatgttgtgacctttgattcctagcctggcattactgcatctgtaatatcctggacaaagcgtggggtggtggcagtgttattccttgaaaaatctgtaacgcctattgaactccctaaagtttatctgaattccaggatcacttcatttaaatgctggtctgtgctgactgctgacttgggcacaatttttgaagcagctgtgatatacggttagatgaaaataaggagcaagcgataattttcctaatcatagaaactgcaggatccgttcctgttttcatggaattaggagtatcatcacggcatatttagaagccaaaatccttggttctcacgatatcggctgcaaaatgtatgtatattaacacttgaattcttgtgattatcattaaaatgtaagaaagagattattacacgatcatgtcatatgttgcaatcttgtcatctaaatctaatggtattgctgtataggaattatcacatttgccatcctcaaacagtcaaactctgctgataaaatcaaagaacaatgcgcacttgcaggacacagattgctttctcatatggataaagcatattctcagccttgaatgtttaagcacctcattattctccaaaaaggacacgtgagatttctctactggaagaaacattttatatctttcaaagggctcttttggacattctgaaatagggttcttttggaccgtttccttggctttatccttcagatgacatatgagggagaatatttgctaaagtagacacttttgactcaggcaaccaagactctatagcgccttgttgggatgtggatagcatatgaatatatgatggtagcacaggtgcagttgtcagcggtttgagctattttagtatcctatattctttattcgagtgttagaaaaaggtatagatagtcctacgtagatagatgttgatactctgtatctgtagagaggtgcacaagattattgtggttgtgcgagatgagctgtggtggtgtttttaagacagagaaacggtactccttaagggctaatttggcaattccatt

SEQ ID NO: 14441 - DNA, 1428 bp, Zea Mays
gcgataacgagcggcgccgcggcgggtcaggcagacgccacagcgctagcggcatagccggcgacagaaacaaccgatgccactcctcgccgtctgtccccgccgcgttccgccgctttcgctcgcgcgccgccaccgccgcagcttgtatcgggcccggtccctcgcgctcaaatgcgaggtctcctctcctccgctacttctgacccggaggatgtccgccgctggctcgctgcttgtcgctgtcgtccccgtccccgcgccgtcgccgcaactccccgtcgcctccgcgtcggagttggagacggagacggcggaaggagagagcggagcttctgaggggttagcattggagcgttacaccgaccaggagcagggcttcaccctcctcaagccggcctcctggcccaaggtggagaaggcgggcgcgacggcgctgtttcagcaggagggaaaagggagcaacaatattggggttgtcgtgaaccctgtccggctcaattcgctggcggagttcgggacgccgcagttcgttgcggacaggcttctgcaagcagagaagaaaaaggaaagtaccaagtctgccgaggtgatttcagtgggagagaggtcaggtcatggtggcttgacagtgtatgagatcgagtacacgctggacagcacaaggggagggatgaagcggatcttctcgggtgcgtttgtcgcttcaaggaagctctatctgctcaacatagcctattcagacacccaggagaagcccttggacagggagacaagaaccgttctggaaaaagttctccattcttttgattctgtataggtgatatttttttatagccgaggaattatcacatttgccatcctcaaacagtcaaactctgctgataaaatcaaagaacaatgcgcacttgcaggacacagattgctttctcatatggataaagcatattctcagccttgaatgtttaagcacctcattattctccaaaaaggacacgtgagatttctctactggaagaaacattttatatctttcaaagggctcttttggacattctgaaatagggttcttttggaccgtttccttggctttatccttcagatgacatatgagggagaatatttgctaaagtagacacttttgactcaggcaaccaagactctatagcgccttgttgggatgtggatagcatatgaatatatgatggtagcacaggtgcagttgtcagcggtttgagctattttagtatcctatattctttattcgagtgttagaaaaaggtatagatagtcctacgtagatagatgttgatactctgtatctgtagagaggtgcacaagattattgtggttgtgcgagatgagctgtggtggtgtttttaagacagagaaacggtactccttaagggctaatttggcaattccatt

SEQ ID NO: 14442 - DNA, 1356 bp, Zea Mays
gcgataacgagcggcgccgcggcgggtcaggcagacgccacagcgctagcggcatagccggcgacagaaacaaccgatgccactcctcgccgtctgtccccgccgcgttccgccgctttcgctcgcgcgccgccaccgccgcagcttgtatcgggcccggtccctcgcgctcaaatgcgaggtctcctctcctccgctacttctgacccggaggatgtccgccgctggctcgctgcttgtcgctgtcgtccccgtccccgcgccgtcgccgcaactccccgtcgcctccgcgtcggagttggagacggagacggcggaaggagagagcggagcttctgaggggttagcattggagcgttacaccgaccaggagcagggcttcaccctcctcaagccggcctcctggcccaaggtggagaaggcgggcgcgacggcgctgtttcagcaggagggaaaagggagcaacaatattggggttgtcgtgaaccctgtccggctcaattcgctggcggagttcgggacgccgcagttcgttgcggacaggcttctgcaagcagagaagaaaaaggaaagtaccaagtctgccgaggtgatttcagtgggagagaggtcaggtcatggtggcttgacagtgtatgagatcgagtacacgctggacagcacaaggggagggatgaagcggatcttctcgggtgcgtttgtcgcttcaaggaagctctatctgctcaacatagcctattcagacacccaggagaagcccttggacagggagacaagaaccgttctggaaaaagttctccattcttttgattctgtataggtgatatttttttatagccgaggacacagattgctttctcatatggataaagcatattctcagccttgaatgtttaagcacctcattattctccaaaaaggacacgtgagatttctctactggaagaaacattttatatctttcaaagggctcttttggacattctgaaatagggttcttttggaccgtttccttggctttatccttcagatgacatatgagggagaatatttgctaaagtagacacttttgactcaggcaaccaagactctatagcgccttgttgggatgtggatagcatatgaatatatgatggtagcacaggtgcagttgtcagcggtttgagctattttagtatcctatattctttattcgagtgttagaaaaaggtatagatagtcctacgtagatagatgttgatactctgtatctgtagagaggtgcacaagattattgtggttgtgcgagatgagctgtggtggtgtttttaagacagagaaacggtactccttaagggctaatttggcaattccatt

SEQ ID NO: 14443 - DNA, 2116 bp, Zea Mays
  misc_feature (1)..(2): n is a, c, g, or t
nngttgtatcgttgctgcctattaataatggcatcagtaatggacagttcgggcgcaattatgttgacatcttgttaacagaagggggcagcctcacaatctgcttgatgccacaagatacttggtgtgacgggcctgcgccatcagttttcctgtctttttcttcctgaaatcgacagagacgacaccgactgacttgccggcacgcaacagctttccctcgacctctatttcctcctggacaatcaaccaaaaaagctaacagtgatgtccaaaaactttgtaaggaaccgtagcattgtgtaacaaagaaaaaagttgaaaaaaaatagaactaatttgacagtttgtcgccgccaagggcagtgcagagagaggactaacaaagtaaaaaggaggggctatgtgggcaaaagtgtaaataaagtagcaaatatttgaagcctatgcatagaaagtggcgttttaatgtgttgcacgtctaaagtggcgtttttttaagcctgcacttggcggtgtcaaattgccgattttcactaaccggagctggcttagtttttgtaacttccagtagaacaaccaaagaaccaacagcctatatacaatgtgacatctgacagtattatctaccgagatggttactgttatacctaccagaaaattttcgagatataaagtgatacaattctacactgttcaataatgttatccaacaggctccaattgcaacgaagacgagcagcagtgcaaaacgaataaagagcaaacatgactcatttatgtaaccaacttttctgcttgcacacgcaacacatctgtacttgccaaaaggtaagaagcagaggagtaataaccattccatcttgccacttgagctgtagtcatacagtgtttactgatgttaagtcataaaaatgtaagcactgtacctttctagaccacaaagcaacactaaagcttctagtagaatctgaaaaaatggatattcatctattctaaataaacaatgttaatgatactggcctggcaacaagcacatctgctatgcatgtcgcatgagcaagaaaacaaataaaaagtatgaaactaccaacattgggttatttatttggcagagattaggaatatatcttaatcacgttaaatccgtatatctagtataataaagatggataactgaattaggatttaaataacatgttggaaaattagacaaaagatagtttcataggttctgaaattttgttatcatgaacacatcaagttctttagaacaggatgaaccctttgccacatcctaataaaatcaaagaacttggactatttaagttgtaccatcattaactacgacaaactgcaacctcttgtctctattaaagacagatatactaataatttatttcagaatgccagaaaacaacaaaaacaaaattctaacaacttccatcaagttggaagcaatttcagcatccaatctcatctcattcctacacagtcctactccttatatgccaacttcacaatacagtacattgactaacatccagtctagtaaatatatagcagagaagatccctgatgtattatagccttaagaactacgagtgtgccattgagaattgagacccaagcgcacagcttagaagagacggtttctgacagccagaattccatgcacaacagcaagcagtagaattataggagtaccaatcatggacaattgcattttttaggagacaaatcacaatatgatactctgacatttgcctaaaacatgctagaaccgtgacatagcctaatcgttaatagcaagcacaaactttcaaattatcagagagcgaatactggaagtgaatgtcatttcttcagcaaaaagggatttccccagtgacctagctctagcactagcagcataagtgcaaaatcgttccatcataaattccgatccccatgaactatttgtttaaataacataatcgaacagaacatgaaatgtgaaccgagagggagtgggtctcaccccgacggcagccgcgtcaacaaaggagacgctgatttcgagggataccccgctgctggggagcccgctgcagaaaaacacggccgatcccagctg

SEQ ID NO: 14444 - DNA, 1754 bp, Zea Mays
gaaccgattctcgcttaaacggacctcccaaactaccattcccagttcccacggcacgatggcctccgccgaaatccccaactccagccccgacgccaccaaccccgcccccgccgccgccgccgccaccggccccgacctctcctcttcgccgccgccgctcccgccgcgcaagcgccgcctttcgccttccccaccaccaacgcggtccgcgtcacgctctcggtccccccgctcccgctccccgcacggccgacgctcgcgcagccggagccgcagcccgcagcagtacccgaccgatggcaagcggcaacggcacaatggccttaccgtggatgcgtgccgcgatttcctgcgcgacaggtgcacccgctccgacctcgagtgcagatacgcgcaccctcacaactccgtttccatcgacctggacaataaggtgactgcgtgtgcggattctctgaggaacaattgcttccgggggatgacatgccgttactaccatccgcctccacatatccaggagcaattactgagatcagttggcgtggaagacccaaaggtgaagacgcagatctgcagagattttacacgtgggaagtgttcaagatcagcaaatgagtgccgattcttgcaccattcatctgttgaagatgttgcaattgtttgccaagacttcttgcgtggacagtgcaatcgcatagcatgtaggtactctcatgtagtagcacatccgatgccaccaatgaaccatgttcccatgccataccctgagatgctttacatgccaccaccaccaccaccaccccttggagtaccaatgatggggcctctgccttcacctcctataccatttgctgataatacgaacagagttgaagtttgtagggacttcttgaagaacatgtgcaatagagaatcctgccggtttgtgcaccctgagacacatacaacggcggtgaacgccaatgttgaagtatgccgtgattttaaacgaggagaatgcaatcgatctgcctgtcgctttttccatccacatacaagctgaagttttctgttgcctaaagtaaacttgagtgccctgcgccgctgctgctgctgctgccgccgccgccgcagccaccaattctgcttctgccaccaaagagctgctgcgctggctgttgtgttgctaaggtgccatagagcatggaagccgtagaaggtgctacgtaggcatggaataaaagatactatcgtcctgttatattcagatggttgcttgaacttgcttgactcaatgcttgagtggtacctcttcactatggggtctctctctccccctgtgtgtggttatgtatttgttgtcataaagatgattttgactccagctaatctggtgtctgcgctattggcttccctttagcgccacacgtttgttgtatggatacttttttttgagccaatgtttcgccacgctttgccgctgtttcaaacaggcaccacctgaagacattctgatgtgcttgtgatgcttaactaggaatacagtgccaggtaccaagctgattgaaacggcaaggtatctgaaaggttgggtgatgatgaggccttatgccaagcgtgccattctgttgctgctcgaatgcgtgcggtctacaggtaagcgattttaagggcatgtacaacggccatgtacaattggttttctatgtacaagagacatttaagaaactgtatcatacagtggagagttcttaaaatcagtcatatcagac

SEQ ID NO: 14445 - DNA, 1749 bp, Zea Mays
gaaccgattctcgcttaaacggacctcccaaactaccattcccagttcccacggcacgatggcctccgccgaaatccccaactccagccccgacgccaccaaccccgcccccgccgccgccgccgccaccggccccgacctctcctcttcgccgccgccgctcccgccgcgcaagcgccgcctttcgccttccccaccaccaacgcggtccgcgtcacgctctcggtccccccgctcccgctccccgcacggccgacgctcgcgcagccggagccgcagcccgcagcagtacccgaccgatggcaagcggcaacggcacaatggccttaccgtggatgcgtgccgcgatttcctgcgcgacaggtgcacccgctccgacctcgagtgcagatacgcgcaccctcacaactccgtttccatcgacctggacaataaggtgactgcgtgtgcggattctctgaggaacaattgcttccgggggatgacatgccgttactaccatccgcctccacatatccaggagcaattactgagatcagttggcgtggaagacccaaaggtgaagacgcagatctgcagagattttacacgtgggaagtgttcaagatcagcaaatgagtgccgattcttgcaccattcatctgttgaagatgttgcaattgtttgccaagacttcttgcgtggacagtgcaatcgcatagcatgtaggtactctcatgtagtagcacatccgatgccaccaatgaaccatgttcccatgccataccctgagatgctttacatgccaccaccaccaccaccaccccttggagtaccaatgatggggcctctgccttcacctcctataccatttgctgataatacgaacagagttgaagtttgtagggacttcttgaagaacatgtgcaatagagaatcctgccggtttgtgcaccctgagacacatacaacggcggtgaacgccaatgttgaagtatgccgtgattttaaacgaggagaatgcaatcgatctgcctgtcgctttttccatccacatacaagctgaagttttctgttgcctaaacttgagtgccctgcgccgctgctgctgctgctgccgccgccgccgcagccaccaattctgcttctgccaccaaagagctgctgcgctggctgttgtgttgctaaggtgccatagagcatggaagccgtagaaggtgctacgtaggcatggaataaaagatactatcgtcctgttatattcagatggttgcttgaacttgcttgactcaatgcttgagtggtacctcttcactatggggtctctctctccccctgtgtgtggttatgtatttgttgtcataaagatgattttgactccagctaatctggtgtctgcgctattggcttccctttagcgccacacgtttgttgtatggatacttttttttgagccaatgtttcgccacgctttgccgctgtttcaaacaggcaccacctgaagacattctgatgtgcttgtgatgcttaactaggaatacagtgccaggtaccaagctgattgaaacggcaaggtatctgaaaggttgggtgatgatgaggccttatgccaagcgtgccattctgttgctgctcgaatgcgtgcggtctacaggtaagcgattttaagggcatgtacaacggccatgtacaattggttttctatgtacaagagacatttaagaaactgtatcatacagtggagagttcttaaaatcagtcatatcagac

SEQ ID NO: 14446 - DNA, 798 bp, Zea Mays
gtgacatgcaaactgcaattatcctgcaattactgagatcagttggcgtggaagacccaaaggtgaagacgatctgcagagattttacacgtgggaagtgttcaagatcagcaaatgagtgccgattcttgcaccattcatctgttgaagatgttgcaattgtttgccaagacttcttgcgtggacagtgcaatcgcatagcatgtaggtactctcatgtagtagcacatccgatgccaccaatgaaccatgttcccatgccataccctgagatgctttacatgccaccaccaccaccaccaccccttggagtaccaatgatggggcctctgccttcacctcctataccatttgctgataatacgaacagagttgaagtttgtagggacttcttgaagaacatgtgcaatagagaatcctgccggtttgtgcaccctgagacacatacaacggcggtgaacgccaatgttgaagtatgccgtgattttaaacgaggagaatgcaatcgatctgcctgtcgctttttccatccacatacaagctgaagttttctgttgcctaaagaatacagtgccaggtaccaagctgattgaaacggcaaggtatctgaaaggttgggtgatgatgaggccttatgccaagcgtgccattctgttgctgctcgaatgcgtgcggtctacaggtaagcgattttaagggcatgtacaacggccatgtacaattggttttctatgtacaagagacatttaagaaactgtatcatacagtggagagttcttaaaatcagtcatatcagac

SEQ ID NO: 14447 - DNA, 1005 bp, Zea Mays
ggaaggtgaagcagcgtctcccctcccggtcgccagtcgcgtcgaccccgagtcccgaccggtgcgcgcgcaggcgcacagccaggacacgaccgagcacggagcaacgtcgccctcccccagtagcgcagcccggccacgccctcatcgcccatcctgccgggccgcgtcgccgactcgccgccaattaccattcgcctctgcagacccgacacggcgcgcggctcctcgccgatttgttcccggcggctcatcagaaaggaaatgatgagggtgtaagaagccgagcactcaccgaggagcatgcacgagatagttttgaaaacctcctatttagtgtgtgccgtttcagagagctaactggaagatacccacagaacataactgttgttagctacgatttcaaggaggaacgttttgcacaactgcacagaaccgcactcggattcccggaaggaaggttcttcttctcaggtacaccagctacgccttctgcaagggaggctgctctgaaaggcgaagcagctgtccgagctcagttccttgaagacccgtatggatgtctaggatctcttcatgtaaagaggctgaagcgggacccgttccaccgaaccattccataccctgccggttgcccagagctgaagggtctgttctcctattgtggcccggtgccttactctgggcacctcccttggactgagtagtagtgtaatgtacatcagccttggatggagctccccactgccacttcacgatgtccagcagccttgcactgaccttgttctgaattgagggagagtatatgttacactatcaacatatggatttttaacctttttgtttcttctcgatgacttggctactgtctttactcacaattcaaacttgtgattttatttttacacgtactccgccttattctgtggtgcaatgcaaacagtgaagaacttcccctttgcagccgaagttaatgaaccttccctgtcagcagaacccgaacag

SEQ ID NO: 14448 - DNA, 3113 bp, Zea Mays
ccggacgcgacgcgaccctgaaactcgacgcgttccaactacagcctccctagtccctcccatgggcgcgcgctatcgcagcctcggccgcacgagctactcagcagcatctgcttcttctcgcaaggcgcgccgcgctttccacggtgcggcgcccgctaccggtcacatgcagagtcagtgcggtagcgcgccgctcgggctcgctgcccccgccgcgcagcacattgggtgtatgctcggcgagggccaccggccgggcgcactcgagcttgccgcggcgatcaggtcgtcctcggcgctcccgggcagcggcagcgcgctcgcgaggtgcctccacgggctcgccgtgaaggccgggcgcgtggcgagcagcgcgacggtggcgaaggcggtcatggacgcgtacgggaggttcggatccctcgcggatgctctcctgttgttcgacgaaatggcgcgccccgacgcggtgtgctggaacatcctcatcactgcatgctctcgccgtgggctttttgaggacgcctttattttgttccggtcgatgctctcttgtggcgtgggacagggcatgccgactgcagtgacggtggctgtaattgttccggcatgcgcgaagtggaggcatttgcagaccggcagaagcgtccattgctacgtggtgaaaactggtttggaatcagatactctgtgtggaaatgcattggtgtcaatgtacgcaaaatgtggtggaagtagggtaatggttgatgcacatagagcattttcttctattcgctgtaaagacgttgtttcatggaattcagtcattgctggatatatagagaatcagttatttggagaggcgcttgcgctgttcagtcagatgatctcacagggatatcttccaaattattcaacagtggctagtattcttcctgtgtgctcattcacagagtttgggaggcatcatgggaaagaagtgcacagtttcgtggtcaggcatggtatggaaatcgatgtatctgtttctaatgcactgatgacacattattccaaagtgcttgaaatgaaggatgtagaatcaatatttactagtatggatgtgagggatatcgtatcatggaacaccattattgcaggatatgtgatgaacgggtatcaccatagagcattgggcctgtttcaggggcttctgtctacaggaattgctcctgattctgtttcttttatcagtctgctcactgcctgtgctcaagtaggtgatgtcaagacagggatggaggttcatggttatatttttcaaaggccagtacttcaagaaacatccttaatgaatgctcttgtcactttttatagccactgtgataggtttgatgatgcttttcgtgctttcaccgatattctgaacaaagactcaatttcatggaatgcaattctctctgcttgtgccaccagtgaacaacatatcgagaagttttttgtactgatgagtgaaatgtgccgtggggtaaatcagtgccagtgggattcagtcacagtcttgaatgttatacacatgagtaccttctgtggtattaagatggtccgcgaagctcatgggtggtctctaagagttggttatacaggtgaaacttcagtagcaaatgctattctggatgcttatgtgaagtgtggctactcacacgatgcaagcatacttttcagaaaccacgctgggcggaacattgttactgacaatataatgatttcttgctacttgaaaagtaactgtatagaggatgctgaagtgatcttcaaccatatggctgagaaagacctgacttcatggaatttgatgatccagttgtatgcacagaatgacatggatggtcaagctttcagtctgtttaatcacttgcaatctgaaggcttgaagcctgatattgttagcattgcaaacattcttgaggcttgcattcatttgtgttctgtacagcttgtgagacaatgtcatgcctacatgctcagagcatccctagaagacatccatcttgaaggagctcttgttgatgcgtactcaaaatgcggcaacataaccaatgcatataacatctttcagatcagcccaaagaaggaccttgtcacattcactgccatgattggatgttacgcgatgcatggaatggcagaagaggcagtagagctgttctctaaaatgcttaaacttgacattaggccagaccatgtagttctgaccacacttctgtcagcatgcagtcacgcaggcttggttgatgctggaatcaaaattttcaagtccatcagagagattcacagagttgtaccaacagcagaacactatgcgtgtatggttgatcttcttgcccgcagtggacatatccaagatgcatatatgtttgccttggatatgccccctcatgcagtcaatgcaaatgcatggagctccctgctaggagcatgcaaagtccatggaaaggttgaaattggtcaactcgctgctggtcggttgttctcaatggaagggggggatattgggaactatgtcattatgtcaaacatctatgcagctgatgagaaatgggatggtgttgagaatgtccgaaaactgatgaagtccatcgatatgaagaaacctgcagggtgcagctggatagaggtcgagaagaccagacacttgttcatagcgagcgatattaatcatcaagataggtcttgtatctacgatatgttaggaagtctgtatcagcaaatcaaagatacacacacacagaacatgacaatggtgaaatctatgtgaccacaagttgcaaaaaagaagaagtgaagcgctcttcatctgatatgtgcccagtggcttgtctgactccagttgcagggcttccacttcctggctgcaaatagtaacgaatttgcctttgtctcactgagaggctggagattaactccattatgtaaatatgtgagcactgacaaggatcttgaagccaagaaagagaccatggaatttcaagttaaccaatgtccttagagagtatatgctcgtggtttgctgttaaaaagaaggagatctgcgcttcattatattgagaagaatctataactcctaaagaaacatgacccacaaagac

SEQ ID NO: 14449 - DNA, 2682 bp, Zea Mays
cctcctcgctggacgccggccacgcaacgcaactatccccacttcaccgcgcggaaaaaacaaagagattcccctttgctctacaggaagcgccgacgccgttgatggaattcggaaggaccaaagctgctgccgtagccctgatccccgaagcgaccttccgccggtccagtctgtccttctcggcctccgcgacgccgtggtcccgggaggtgtgggtcaacgcatccaaataacggctcttccagaggaaaacactgctgaatttctcagctggtgcctagtggtgggaaataaagctagggacccagcatccttgtgatagcaatcacatcattggtgttgttttttcagcttacgctgaaactagactgatcaagaaggcgaccagctgtcaaaatgcatagacagaagaacccaaactctgggtgggctgcgtttgatcgcaagcagcgcagtgcagatggcagtgggtatgaaggtgatgctgatccatttccgtctctctcaaattctggagcctctaatattgctagtagctccattacagaaaagaatgggctaaaacgaaagccctttgcttcagtggttcgcccttctgttgattctggagctgttagtactggatgcggaaataagaattctgctaatcacgtggacagcgggaatcacggtgcaatctctgcacctcttaataaagttaagatcttgaaagatgcacacagttgggccgacattcacttaattgaggatgtactagctgctgtgaataatgatgtcggacaagcatctgatttgttgaaagttatggactctcctgccttgcagactggagagggcagaacatctggccaactggctgatgtgatgaataaaacacacggatcaccatcagaaagtgctgcagcaggcaaagcaaatccagatagctcacagttgttgctgcccctgatgaactttccctctatacccttgcagcctgaattcgaagatattgatgatgaatacttcagctaccggaaagatgcattgaaaatgatgagggctgccacaaagcattcccagtctgccagtaatgcatttttgagagatgaccatgctgctgccaaggaactttctctcagagctcaggaagagcgggcagctgctgaaaagctaaataacaaggcagcggaagaaatttttcgccttaggaatagcaataatgacatctggaagatagacatgcatggtcttcatgcatcagaggctgtggcagtattggagaggcatctccacatgatagagttccagcaacctgggaataagtcagcctcatctgaggacttagctaagttggaatctgcatattctgaatcaaccactggttcaaacattgagcttgctgctgagaaggtggtcttacgccggcctaagcagtctatcttacatgtgatcacaggtaacctattgttcctatatgcatgctttcctatcacacacagttgatggtttcatatcaaaactaaaacagtttatgttcgtcagttttcttgccactatctttgtaaatatgatctgcagacatgcaatttaatggatgagggcatcttatcattttacaaacagataatgcattggtttggttcatctaataacagcatatatagaagaaagaatggtatcatgttcatgatgtaagcaacaccagctttggcagtaactcttttctgtttgtactttacacagggatgggtaaccatagcaaagggcaggcttcactacctgttgccgttaggggtttccttattgagaacgggtatcgatttgatgagctgaggcctggtgtttttgcggttcgtccaaaattccgccgcaggtgaacctgtggaagtttgtacaattgtaacatggtggtggcttggggtgattatgtgctctaaattttacactaaaatttaaggatcaaatcggattaggatcagactctatttttattatgaagtagatccttcggtacctccacggcatcaccgacttcgtccttctccttcatcgatttgcgaccgttgttctcgttttctacaccgataccgattagggtggttatcccgatacctgtcggttcactttcggttttgccgtctttcttagcgacaacctcgtctcttctggtcttcgaagcgacagcctgtcgtctcccgctccagcgccgagtcgacatggcttcgtcagctgctccagaagctacaatgttcgttgactcgaagcacttttgtctactgtgataacatcagcgtcatatacttctcctccaaccttatccagcatcagcgctcgaagcatgtcgatctcgacctacatttccttcgcgagtgggttgccgtcaaagatgtgcgggttctttatgtcccgactacttagtttgtcgacatcttcaccaagggcttccctgcgtcgatgttcgatgactttcagtccagtctcaacatctcccgtagctagagttttgactgtggttaatgtgtattcagtgtaatgggctatgtattcagtgtaatggggctttgtgtaatgggcttaggtccaacatctatattataaatttagcacacgaccttgataagggttagggtttcagtccaataattttcgaactaaaattatttaagtgcccaaacgaattatgaaagaagatttgga

SEQ ID NO: 14450 - DNA, 2647 bp, Zea Mays
aacgcaactatccccacttcaccgcgcggaaaaaacaaagagattcccctttgctctacaggaagcgccgacgccgttgatggaattcggaaggaccaaagctgctgccgtagccctgatccccgaagcgaccttccgccggtccagtctgtccttctcggcctccgcgacgccgtggtcccgggaggtgtgggtcaacgcatccaaataacggctcttccagaggtgcgctcaccaactcgatttggttgtacacgtgcaattggaattctggggtggatgcatgctcttttatgttaactgtaagcccaaccaatagattgttcattcgaactactacttcagtaatcccaacactcagaataatgttggattcagacatatattagatagaagaagtggagcatgcttgtgaaaacaagcagcgccagtaattagtcattttcagcctgtattgggtgaactgatctgagtatctgaccttcttgcccttgtgttataggaaaacactgctgaatttctcagctggtgcctagtggtgggaaataaagctagggacccagcatccttgtgatagcaatcacatcattggtgttgttttttcagcttacgctgaaactagactgatcaagaaggcgaccagctgtcaaaatgcatagacagaagaacccaaactctgggtgggctgcgtttgatcgcaagcagcgcagtgcagatggcagtgggtatgaaggtgatgctgatccatttccgtctctctcaaattctggagcctctaatattgctagtagctccattacagaaaagaatgggctaaaacgaaagccctttgcttcagtggttcgcccttctgttgattctggagctgttagtactggatgcggaaataagaattctgctaatcacgtggacagcgggaatcacggtgcaatctctgcacctcttaataaagttaagatcttgaaagatgcacacagttgggccgacattcacttaattgaggatgtactagctgctgtgaataatgatgtcggacaagcatctgatttgttgaaagttatggactctcctgccttgcagactggagagggcagaacatctggccaactggctgatgtgatgaataaaacacacggatcaccatcagaaagtgctgcagcaggcaaagcaaatccagatagctcacagttgttgctgcccctgatgaactttccctctatacccttgcagcctgaattcgaagatattgatgatgaatacttcagctaccggaaagatgcattgaaaatgatgagggctgccacaaagcattcccagtctgccagtaatgcatttttgagagatgaccatgctgctgccaaggaactttctctcagagctcaggaagagcgggcagctgctgaaaagctaaataacaaggcagcggaagaaatttttcgccttaggaatagcaataatgacatctggaagatagacatgcatggtcttcatgcatcagaggctgtggcagtattggagaggcatctccacatgatagagttccagcaacctgggaataagtcagcctcatctgaggacttagctaagttggaatctgcatattctgaatcaaccactggttcaaacattgagcttgctgctgagaaggtggtcttacgccggcctaagcagtctatcttacatgtgatcacagggatgggtaaccatagcaaagggcaggcttcactacctgttgccgttaggggtttccttattgagaacgggtatcgatttgatgagctgaggcctggtgtttttgcggttcgtccaaaattccgccgcaggtgaacctgtggaagtttgtacaattgtaacatggtggtggcttggggtgattatgtgctctaaattttacactaaaatttaaggatcaaatcggattaggatcagactctatttttattatgaagtagatccttcggtacctccacggcatcaccgacttcgtccttctccttcatcgatttgcgaccgttgttctcgttttctacaccgataccgattagggtggttatcccgatacctgtcggttcactttcggttttgccgtctttcttagcgacaacctcgtctcttctggtcttcgaagcgacagcctgtcgtctcccgctccagcgccgagtcgacatggcttcgtcagctgctccagaagctacaatgttcgttgactcgaagcacttttgtctactgtgataacatcagcgtcatatacttctcctccaaccttatccagcatcagcgctcgaagcatgtcgatctcgacctacatttccttcgcgagtgggttgccgtcaaagatgtgcgggttctttatgtcccgactacttagtttgtcgacatcttcaccaagggcttccctgcgtcgatgttcgatgactttcagtccagtctcaacatctcccgtagctagagttttgactgtggttaatgtgtattcagtgtaatgggctatgtattcagtgtaatggggctttgtgtaatgggcttaggtccaacatctatattataaatttagcacacgaccttgataagggttagggtttcagtccaataattttcgaactaaaattatttaagtgcccaaacgaattatgaaagaagatttgga

SEQ ID NO: 14451 - DNA, 2266 bp, Zea Mays
aacgcaactatccccacttcaccgcgcggaaaaaacaaagagattcccctttgctctacaggaagcgccgacgccgttgatggaattcggaaggaccaaagctgctgccgtagccctgatccccgaagcgaccttccgccggtccagtctgtccttctcggcctccgcgacgccgtggtcccgggaggtgtgggtcaacgcatccaaataacggctcttccagagcttacgctgaaactagactgatcaagaaggcgaccagctgtcaaaatgcatagacagaagaacccaaactctgggtgggctgcgtttgatcgcaagcagcgcagtgcagatggcagtgggtatgaaggtgatgctgatccatttccgtctctctcaaattctggagcctctaatattgctagtagctccattacagaaaagaatgggctaaaacgaaagccctttgcttcagtggttcgcccttctgttgattctggagctgttagtactggatgcggaaataagaattctgctaatcacgtggacagcgggaatcacggtgcaatctctgcacctcttaataaagttaagatcttgaaagatgcacacagttgggccgacattcacttaattgaggatgtactagctgctgtgaataatgatgtcggacaagcatctgatttgttgaaagttatggactctcctgccttgcagactggagagggcagaacatctggccaactggctgatgtgatgaataaaacacacggatcaccatcagaaagtgctgcagcaggcaaagcaaatccagatagctcacagttgttgctgcccctgatgaactttccctctatacccttgcagcctgaattcgaagatattgatgatgaatacttcagctaccggaaagatgcattgaaaatgatgagggctgccacaaagcattcccagtctgccagtaatgcatttttgagagatgaccatgctgctgccaaggaactttctctcagagctcaggaagagcgggcagctgctgaaaagctaaataacaaggcagcggaagaaatttttcgccttaggaatagcaataatgacatctggaagatagacatgcatggtcttcatgcatcagaggctgtggcagtattggagaggcatctccacatgatagagttccagcaacctgggaataagtcagcctcatctgaggacttagctaagttggaatctgcatattctgaatcaaccactggttcaaacattgagcttgctgctgagaaggtggtcttacgccggcctaagcagtctatcttacatgtgatcacagggatgggtaaccatagcaaagggcaggcttcactacctgttgccgttaggggtttccttattgagaacgggtatcgatttgatgagctgaggcctggtgtttttgcggttcgtccaaaattccgccgcaggtgaacctgtggaagtttgtacaattgtaacatggtggtggcttggggtgattatgtgctctaaattttacactaaaatttaaggatcaaatcggattaggatcagactctatttttattatgaagtagatccttcggtacctccacggcatcaccgacttcgtccttctccttcatcgatttgcgaccgttgttctcgttttctacaccgataccgattagggtggttatcccgatacctgtcggttcactttcggttttgccgtctttcttagcgacaacctcgtctcttctggtcttcgaagcgacagcctgtcgtctcccgctccagcgccgagtcgacatggcttcgtcagctgctccagaagctacaatgttcgttgactcgaagcacttttgtctactgtgataacatcagcgtcatatacttctcctccaaccttatccagcatcagcgctcgaagcatgtcgatctcgacctacatttccttcgcgagtgggttgccgtcaaagatgtgcgggttctttatgtcccgactacttagtttgtcgacatcttcaccaagggcttccctgcgtcgatgttcgatgactttcagtccagtctcaacatctcccgtagctagagttttgactgtggttaatgtgtattcagtgtaatgggctatgtattcagtgtaatggggctttgtgtaatgggcttaggtccaacatctatattataaatttagcacacgaccttgataagggttagggtttcagtccaataattttcgaactaaaattatttaagtgcccaaacgaattatgaaagaagatttgga

SEQ ID NO: 14452 - DNA, 3163 bp, Zea Mays
gtttttgtcacctcaggggctcctctccctgcgtgcgggctttcgtttcgtgcagttgtgtggtttgcgagcgcagagcagttcgtggacgtggagccaggtggtctgctgcccgaagaagccacactacgctccacgcatcgcgtagacggcgtagttggctcgcgggaccccggagtcagcatcgcgccgctctctcccgaagctcgcgcgtctcctcggcgcccggagcgagcctgaggcgcgcggacaaacgatgtcctcgccggcggcggcgacgctgcacccttcccccaccttccttgcctccggccctcgctaccgccgccgcggacatccatcttcgaaggtcagcttccgaaggttggcgccacgattaaaggtcaatgcactttttggatggcctaggggggacacgacagcacgtgaactgatccctcctgctgaatcctatacgctctcagggtcagcctcagaggtgtaggtgcaaaaccacgtgaggtgtctatatctgttgcttcttcaatcatggacattcctgctgcggattgggatgcctgtgcgtgtgatttagatgatcctggaaattttaaccctttccttacttatgcattcctctcaagcttagaagaatcaggttctgcggtcaaggaaactggctggttaccttttcatattgttgcacgggatgagaatggacatattataggtgttgttccactttaccttaaaagccattctaggggagagtttgtgtttgatcaatcatgggcagaagcttactacaactatggccttgaatactatccaaagctccagtcttgtgtgccttttactccagtaactggtcaaagaatattacttcgaaatacatcataccgtgatcaagtttttgacgcactagtcaaaggtttgatgagcctcactaccaagatgaatgtgtcatcattacatattacgtttccgtccgaaggtgaattcagtaaactgaaggatagtgggttgttacaaagaatcgggttgcaatatcactggagaaatcggaattacaagagttttgatgagtttctgatggatttgaagcagcctaaacggaagaatatcagacaagaacgtaaaaagattcctgcccaaaatttgcaaatgaagcgacttcgtggagacgaaataaagagcagacactgggacaccttctataaattctaccgtaacacaactgataatcagtttggtttcgcattcttcttaccttgtattttttatttattctacacctaacgttatcccatgttgttcttgaaatggttgttgatctactgtcggcattcatacatatcatgatgcagcaccattcttgttgactaactctcaacatgaattctgttgttcatttcttcttatttaacatagtttccctaggttggtttattttttttaatctgctccctctattaaacatgtatgatttttttaaaggagtaatatttaatgtgatactgtatattaagaactaaatttaatcaaagcaagcaaggaatagaagtttagcaaattattggcaaaatattatttaattgagctaaatggtcacttaaacagatacaattggccattgtgtagttttttaaacggtctaaatgggaaataaggattggagtttgaaatttgaagtaataactgataaatgcatgtgactgctagcacatagccttcttcttgaattggaagatgcaacaaagttttaagaaccatcaccgtgtgagtacgtgaacccctcaccttttggcactttttttgttattacacggcatatctgtaggtatttttcgtgaccgtgcctagacagatttttcattaagaagaggggcatatatgtaggtacaaattaggattggttagacttcgcttgtgcagtaatgtagttttatgtattttcacttgtagctagggaaatagggatgcttccattttaatatgtcttcttttttctttttttcttttctattgcatcccatgtgcgaaagggcctctagctgagttggttaggtggtctgagtagcactcttcaggtcctgagttcgaatctcagtgggatcgaatttaaggttgaggttaaaaaaggtcactcaccctgatcatgtgcacacgaggtgaactgatctatgaggggcggatcctcgtgtagggtctgggaggacttaaagcacgagtaaaagatttggcctatagtggccgagttttttttatctcatcccatgtcctctgtttcgaaatctgaatctgttcaattaaatgagttctgtggcaacacaatgatcgagagaaagcaaaagtcacatcacatcctttctcataggttacttttcgctgcagttggggcagaccatacttgacaagggatttctttcacctcttgggagaaaagatgggggataatgtgatgcttatagttgctgaaaaagatgataaactagttgctggcgctcttaaccttattggaggtgatacactatttggccggttatggggatgcctgccagatgcttactttcccaatttgcattttgaagcttgctattatcaggcaattgaagcagccatagagttaaacctgagtaaggtggaggcaggtgctcagggagagcacaagatccagcgtggttacctcccagtgacaacttacagctgccactacttttcaaatcctggttttgcggcagctattggaaattatcttactcatgagacggctcaggttaagcatgctattaaggtccttcgtgattccggaccatacaaggaagacatactgaaagagttcgctgctcaacaagacgacgacctgtagaatacagaagggacttaaactatttgcatactgttttatagaactaacatcttctatgtagcaacagggatacaggtcgtccaaagtgttaccaaactacgaatcccacatttggacactgctaggactgtaaatatttaacattgtaacatcagtcttacggcgttgagttgggagctatagctatactcagttgtctcgctcttacttttccccaacagaaggacttgatgcttcctgtatattgcgctttgactttgattagatttataggaaaaaaattacataaatatctgcagctgtcattcagtcacg

SEQ ID NO: 14453 - DNA, 1935 bp, Zea Mays
gttgtgtggtttgcgagcgcagagcagttcgtggacgtggagccaggtggtctgctgcccgaagaagccacactacgctccacgcatcgcgtagacggcgtagttggctcgcgggaccccggagtcagcatcgcgccgctctctcccgaagctcgcgcgtctcctcggcgcccggagcgagcctgaggcgcgcggacaaacgatgtcctcgccggcggcggcgacgctgcacccttcccccaccttccttgcctccggccctcgctaccgccgccgcggacatccatcttcgaaggtcagcttccgaaggttggcgccacgattaaaggtcaatgcactttttggatggcctaggggggacacgacagcacgtgaactgatccctcctgctgaatcctatacgctctcagggtcagcctcagaggtaggtgcaaaaccacgtgaggtgtctatatctgttgcttcttcaatcatggacattcctgctgcggattgggatgcctgtgcgtgtgatttagatgatcctggaaattttaaccctttccttacttatgcattcctctcaagcttagaagaatcaggttctgcggtcaaggaaactggctggttaccttttcatattgttgcacgggatgagaatggacatattatagccattctaggggagagtttgtgtttgatcaatcatgggcagaagcttactacaactatggccttgaatactatccaaagctccagtcttgtgtgccttttactccagtaactggtcaaagaatattacttcgaaatacatcataccgtgatcaagtttttgacgcactagtcaaaggtttgatgagcctcactaccaagatgaatgtgtcatcattacatattacgtttccgtccgaaggtgaattcagtaaactgaaggatagtgggttgttacaaagaatcgggttgcaatatcactggagaaatcggaattacaagagttttgatgagtttctgatggatttgaagcagcctaaacggaagaatatcagacaagaacgtaaaaagattcctgcccaaaatttgcaaatgaagcgacttcgtggagacgaaataaagagcagacactgggacaccttctataaattctaccgtaacacaactgataatcattggggcagaccatacttgacaagggatttctttcacctcttgggagaaaagatgggggataatgtgatgcttatagttgctgaaaaagatgataaactagttgctggcgctcttaaccttattggaggtgatacactatttggccggttatggggatgcctgccagatgcttactttcccaatttgcattttgaagcttgctattatcaggcaattgaagcagccatagagttaaacctgagtaaggtggaggcaggtgctcagggagagcacaagatccagcgtggttacctcccagtgacaacttacagctgccactacttttcaaatcctggttttgcggcagctattggaaattatcttactcatgagacggctcaggttaagcatgctattaaggtccttcgtgattccggaccatacaaggaagacatactgaaagagttcgctgctcaacaagacgacgacctgtagaatacagaagggacttaaactatttgcatactgttttatagaactaacatcttctatgtagcaacagggatacaggtcgtccaaagtgttaccaaactacgaatcccacatttggacactgctaggactgtaaatatttaacattgtaacatcagtcttacggcgttgagttgggagctatagctatactcagttgtctcgctcttacttttccccaacagaaggacttgatgcttcctgtatattgcgctttgactttgattagatttataggaaaaaaattacataaatatctgcagctgtcattcagtcacg

SEQ ID NO: 14454 - DNA, 1922 bp, Zea Mays
gttgtgtggtttgcgagcgcagagcagttcgtggacgtggagccaggtggtctgctgcccgaagaagccacactacgctccacgcatcgcgtagacggcgtagttggctcgcgggaccccggagtcagcatcgcgccgctctctcccgaagctcgcgcgtctcctcggcgcccggagcgagcctgaggcgcgcggacaaacgatgtcctcgccggcggcggcgacgctgcacccttcccccaccttccttgcctccggccctcgctaccgccgccgcggacatccatcttcgaaggtcagcttccgaaggttggcgccacgattaaaggtcaatgcactttttggatggcctaggggggacacgacagcacgtgaactgatccctcctgctgaatcctatacgctctcagggtaggtgcaaaaccacgtgaggtgtctatatctgttgcttcttcaatcatggacattcctgctgcggattgggatgcctgtgcgtgtgatttagatgatcctggaaattttaaccctttccttacttatgcattcctctcaagcttagaagaatcaggttctgcggtcaaggaaactggctggttaccttttcatattgttgcacgggatgagaatggacatattatagccattctaggggagagtttgtgtttgatcaatcatgggcagaagcttactacaactatggccttgaatactatccaaagctccagtcttgtgtgccttttactccagtaactggtcaaagaatattacttcgaaatacatcataccgtgatcaagtttttgacgcactagtcaaaggtttgatgagcctcactaccaagatgaatgtgtcatcattacatattacgtttccgtccgaaggtgaattcagtaaactgaaggatagtgggttgttacaaagaatcgggttgcaatatcactggagaaatcggaattacaagagttttgatgagtttctgatggatttgaagcagcctaaacggaagaatatcagacaagaacgtaaaaagattcctgcccaaaatttgcaaatgaagcgacttcgtggagacgaaataaagagcagacactgggacaccttctataaattctaccgtaacacaactgataatcattggggcagaccatacttgacaagggatttctttcacctcttgggagaaaagatgggggataatgtgatgcttatagttgctgaaaaagatgataaactagttgctggcgctcttaaccttattggaggtgatacactatttggccggttatggggatgcctgccagatgcttactttcccaatttgcattttgaagcttgctattatcaggcaattgaagcagccatagagttaaacctgagtaaggtggaggcaggtgctcagggagagcacaagatccagcgtggttacctcccagtgacaacttacagctgccactacttttcaaatcctggttttgcggcagctattggaaattatcttactcatgagacggctcaggttaagcatgctattaaggtccttcgtgattccggaccatacaaggaagacatactgaaagagttcgctgctcaacaagacgacgacctgtagaatacagaagggacttaaactatttgcatactgttttatagaactaacatcttctatgtagcaacagggatacaggtcgtccaaagtgttaccaaactacgaatcccacatttggacactgctaggactgtaaatatttaacattgtaacatcagtcttacggcgttgagttgggagctatagctatactcagttgtctcgctcttacttttccccaacagaaggacttgatgcttcctgtatattgcgctttgactttgattagatttataggaaaaaaattacataaatatctgcagctgtcattcagtcacg

SEQ ID NO: 14455 - DNA, 1694 bp, Zea Mays
gtggaatccacgcgcagcgatacgggacatccatcttcgaaggtcagcttccgaaggttggcgccacgattaaaggtcaatgcactttttggatggcctaggggggacacgacagcacgtgaactgatccctcctgctgaatcctatacgctctcagggtaggtgcaaaaccacgtgaggtgtctatatctgttgcttcttcaatcatggacattcctgctgcggattgggatgcctgtgcgtgtgatttagatgatcctggaaattttaaccctttccttacttatgcattcctctcaagcttagaagaatcaggttctgcggtcaaggaaactggctggttaccttttcatattgttgcacgggatgagaatggacatattataggtgttgttccactttaccttaaaagccattctaggggagagtttgtgtttgatcaatcatgggcagaagcttactacaactatggccttgaatactatccaaagctccagtcttgtgtgccttttactccagtaactggtcaaagaatattacttcgaaatacatcataccgtgatcaagtttttgacgcactagtcaaaggtttgatgagcctcactaccaagatgaatgtgtcatcattacatattacgtttccgtccgaaggtgaattcagtaaactgaaggatagtgggttgttacaaagaatcgggttgcaatatcactggagaaatcggaattacaagagttttgatgagtttctgatggatttgaagcagcctaaacggaagaatatcagacaagaacgtaaaaagattcctgcccaaaatttgcaaatgaagcgacttcgtggagacgaaataaagagcagacactgggacaccttctataaattctaccgtaacacaactgataatcattggggcagaccatacttgacaagggatttctttcacctcttgggagaaaagatgggggataatgtgatgcttatagttgctgaaaaagatgataaactagttgctggcgctcttaaccttattggaggtgatacactatttggccggttatggggatgcctgccagatgcttactttcccaatttgcattttgaagcttgctattatcaggcaattgaagcagccatagagttaaacctgagtaaggtggaggcaggtgctcagggagagcacaagatccagcgtggttacctcccagtgacaacttacagctgccactacttttcaaatcctggttttgcggcagctattggaaattatcttactcatgagacggctcaggttaagcatgctattaaggtccttcgtgattccggaccatacaaggaagacatactgaaagagttcgctgctcaacaagacgacgacctgtagaatacagaagggacttaaactatttgcatactgttttatagaactaacatcttctatgtagcaacagggatacaggtcgtccaaagtgttaccaaactacgaatcccacatttggacactgctaggactgtaaatatttaacattgtaacatcagtcttacggcgttgagttgggagctatagctatactcagttgtctcgctcttacttttccccaacagaaggacttgatgcttcctgtatattgcgctttgactttgattagatttataggaaaaaaattacataaatatctgcagctgtcattcagtcacg

SEQ ID NO: 14456 - DNA, 1854 bp, Zea Mays
ctcgaactcttgcaccatacacaatggtactgtagctcatgtgagaatgtccgcgactgagaccaggccttaaacccgtgctttgatgtcggacagacgagactacaagagtcaaattcagaggagagctactcaaatcacctaaccaactcagctagaagtactcaccacctaaccaactcagggacatccatcttcgaaggtcagcttccgaaggttggcgccacgattaaaggtcaatgcactttttggatggcctaggggggacacgacagcacgtgaactgatccctcctgctgaatcctatacgctctcagggtaggtgcaaaaccacgtgaggtgtctatatctgttgcttcttcaatcatggacattcctgctgcggattgggatgcctgtgcgtgtgatttagatgatcctggaaattttaaccctttccttacttatgcattcctctcaagcttagaagaatcaggttctgcggtcaaggaaactggctggttaccttttcatattgttgcacgggatgagaatggacatattataggtgttgttccactttaccttaaaagccattctaggggagagtttgtgtttgatcaatcatgggcagaagcttactacaactatggccttgaatactatccaaagctccagtcttgtgtgccttttactccagtaactggtcaaagaatattacttcgaaatacatcataccgtgatcaagtttttgacgcactagtcaaaggtttgatgagcctcactaccaagatgaatgtgtcatcattacatattacgtttccgtccgaaggtgaattcagtaaactgaaggatagtgggttgttacaaagaatcgggttgcaatatcactggagaaatcggaattacaagagttttgatgagtttctgatggatttgaagcagcctaaacggaagaatatcagacaagaacgtaaaaagattcctgcccaaaatttgcaaatgaagcgacttcgtggagacgaaataaagagcagacactgggacaccttctataaattctaccgtaacacaactgataatcattggggcagaccatacttgacaagggatttctttcacctcttgggagaaaagatgggggataatgtgatgcttatagttgctgaaaaagatgataaactagttgctggcgctcttaaccttattggaggtgatacactatttggccggttatggggatgcctgccagatgcttactttcccaatttgcattttgaagcttgctattatcaggcaattgaagcagccatagagttaaacctgagtaaggtggaggcaggtgctcagggagagcacaagatccagcgtggttacctcccagtgacaacttacagctgccactacttttcaaatcctggttttgcggcagctattggaaattatcttactcatgagacggctcaggttaagcatgctattaaggtccttcgtgattccggaccatacaaggaagacatactgaaagagttcgctgctcaacaagacgacgacctgtagaatacagaagggacttaaactatttgcatactgttttatagaactaacatcttctatgtagcaacagggatacaggtcgtccaaagtgttaccaaactacgaatcccacatttggacactgctaggactgtaaatatttaacattgtaacatcagtcttacggcgttgagttgggagctatagctatactcagttgtctcgctcttacttttccccaacagaaggacttgatgcttcctgtatattgcgctttgactttgattagatttataggaaaaaaattacataaatatctgcagctgtcattcagtcacg

SEQ ID NO: 14457 - DNA, 1122 bp, Zea Mays
ctacaaagttgctaaagcaggggttgatcattacttaatttgtgcggatgaatgtgtcatcattacatattacgtttccgtccgaaggtgaattcagtaaactgaaggatagtgggttgttacaaagaatcgggttgcaatatcactggagaaatcggaattacaagagttttgatgagtttctgatggatttgaagcagcctaaacggaagaatatcagacaagaacattcctgcccaaaatttgcaaatgaagcgacttcgtggagacgaaataaagagcagacactgggacaccttctataaattctaccgtaacacaactgataatcattggggcagaccatacttgacaagggatttctttcacctcttgggagaaaagatgggggataatgtgatgcttatagttgctgaaaaagatgataaactagttgctggcgctcttaaccttattggaggtgatacactatttggccggttatggggatgcctgccagatgcttactttcccaatttgcattttgaagcttgctattatcaggcaattgaagcagccatagagttaaacctgagtaaggtggaggcaggtgctcagggagagcacaagatccagcgtggttacctcccagtgacaacttacagctgccactacttttcaaatcctggttttgcggcagctattggaaattatcttactcatgagacggctcaggttaagcatgctattaaggtccttcgtgattccggaccatacaaggaagacatactgaaagagttcgctgctcaacaagacgacgacctgtagaatacagaagggacttaaactatttgcatactgttttatagaactaacatcttctatgtagcaacagggatacaggtcgtccaaagtgttaccaaactacgaatcccacatttggacactgctaggactgtaaatatttaacattgtaacatcagtcttacggcgttgagttgggagctatagctatactcagttgtctcgctcttacttttccccaacagaaggacttgatgcttcctgtatattgcgctttgactttgattagatttataggaaaaaaattacataaatatctgcagctgtcattcagtcacg

SEQ ID NO: 14458 - DNA, 824 bp, Zea Mays
gttcatttcttcttatttaacatagtttccctagttggggcagaccatacttgacaagggatttctttcacctcttgggagaaaagatgggggataatgtgatgcttatagttgctgaaaaagatgataaactagttgctggcgctcttaaccttattggaggtgatacactatttggccggttatggggatgcctgccagatgcttactttcccaatttgcattttgaagcttgctattatcaggcaattgaagcagccatagagttaaacctgagtaaggtggaggcaggtgctcagggagagcacaagatccagcgtggttacctcccagtgacaacttacagctgccactacttttcaaatcctggttttgcggcagctattggaaattatcttactcatgagacggctcaggttaagcatgctattaaggtccttcgtgattccggaccatacaaggaagacatactgaaagagttcgctgctcaacaagacgacgacctgtagaatacagaagggacttaaactatttgcatactgttttatagaactaacatcttctatgtagcaacagggatacaggtcgtccaaagtgttaccaaactacgaatcccacatttggacactgctaggactgtaaatatttaacattgtaacatcagtcttacggcgttgagttgggagctatagctatactcagttgtctcgctcttacttttccccaacagaaggacttgatgcttcctgtatattgcgctttgactttgattagatttataggaaaaaaattacataaatatctgcagctgtcattcagtcacg

SEQ ID NO: 14459 - DNA, 835 bp, Zea Mays
ttcttgaattggaagatgcaacaaagttttaagaaccatcaccgtttggggcagaccatacttgacaagggatttctttcacctcttgggagaaaagatgggggataatgtgatgcttatagttgctgaaaaagatgataaactagttgctggcgctcttaaccttattggaggtgatacactatttggccggttatggggatgcctgccagatgcttactttcccaatttgcattttgaagcttgctattatcaggcaattgaagcagccatagagttaaacctgagtaaggtggaggcaggtgctcagggagagcacaagatccagcgtggttacctcccagtgacaacttacagctgccactacttttcaaatcctggttttgcggcagctattggaaattatcttactcatgagacggctcaggttaagcatgctattaaggtccttcgtgattccggaccatacaaggaagacatactgaaagagttcgctgctcaacaagacgacgacctgtagaatacagaagggacttaaactatttgcatactgttttatagaactaacatcttctatgtagcaacagggatacaggtcgtccaaagtgttaccaaactacgaatcccacatttggacactgctaggactgtaaatatttaacattgtaacatcagtcttacggcgttgagttgggagctatagctatactcagttgtctcgctcttacttttccccaacagaaggacttgatgcttcctgtatattgcgctttgactttgattagatttataggaaaaaaattacataaatatctgcagctgtcattcagtcacg

SEQ ID NO: 14460 - DNA, 247 bp, Zea Mays
ttcagatcgcaccacgcacacgaccaccaaatacgcaaaccagccgccgccgagtaaatctcgcctgtgtccaccactttgagcgttgtggcttcaggccatcggcggtcctccatggggatgcccgtggctgcgggtggcgcgtgggagctgcatggtggcgggaactcctcgccagcgtcgtggttctacgcatcatcgtgaataggagcccctgtgctgcgcaatcgaagcagtgagaacacgt

SEQ ID NO: 14461 - DNA, 521 bp, Zea Mays
aaatattataaaagaaaagctacgcagattttgcaataccctttcctgaagcacgccattgacagcctgcagaacagagcgacaaatactgaacctgaccttgttcctgagcatgtcaatctccctggagatgatctgcatctgttcaacatatgagggtctggagctcgacaagattcatgtggtttatatcattctctccatgcatgtacctgcatggatgtgctgagatctgtcatgagccctgcaatcgattctataatttgtgatttgtggattcttggtagttcaacatgaccatcagctgtactgctctcctggctacatctgtgaagagatgtcatgcaacttgtgttactcttatccaacctagctttgtgctatcattaacactttcagttctttttctgatgctgcatgccgtacacactattgtttgcaaaaagcatgtagcgcgcaagacaataaattttactctagtctatgcagagttcattatgtttttttacagtatacatggg

SEQ ID NO: 14462 - DNA, 633 bp, Zea Mays
caaatactgaacctgaccttgttcctgagcatgtcaatctccctggagatgatctgcatctgttcaacatatgagattattttccagggtctggagctcgacaagattcatgtggtttatatcattctctccatgcatgtacctgcatggatgtgctgagatctgtcatgagccctgcaatcgattctataatttgtgatttgtggattcttggtagttcaacatgaccatcagctgtactggtaagttgttgaacataaatatagctacgaagctgcatcctctccaaagtttatgaagctggatggcggttttgtacacgttttagaaaataaaagaaataggaaagtaatggaaggaacatctttatttcaaaaaaaggaccatctttagctactcacaaattcttctgaattcacaacagctctcctggctacatctgtgaagagatgtcatgcaacttgtgttactcttatccaacctagctttgtgctatcattaacactttcagttctttttctgatgctgcatgccgtacacactattgtttgcaaaaagcatgtagcgcgcaagacaataaattttactctagtctatgcagagttcattatgtttttttacagtatacatggg

SEQ ID NO: 14463 - DNA, 1580 bp, Zea Mays
gggggggaggacagtagtagtggcccatcttcgtcgcagcgccggcgctccatctttcgctccatcccttactcgcgctcggcacaccggctctcagggcggcggcgctcaggctcgggctctcaagcgacggcgtcaacggcttcccctcccgcctccggtcctccgcacaccggccggtgaccctgctcaactacagtgtcagctacacatcaggtcactccatcaaatcgatgtacacctgcttattgagggcatcgatcaacggctatgtggatggaaaagaaaatggcttgcttaacagaacgggccgccttacgcttgtctctttggttctctctgccatgccaacctatcatcttaccatattccccttggcggcatgggcaaataagaaaattgacaaaattaggaggcctttcctacagaaaggggaggaaaatgcgaatggaggatattgtctgtttaattggcgaacggtcacccgcccgaaggatcttggagcattaggcgtacccgacctagagaggttcggccgtgcaactcttacttgatggttgtggcaggattgggcggaagactccaaacctttgatcgggatgggccttccttttaatgatgttgatcgcctacaattcaatttctcgaccacaatcacttgctcgcttctggcacaccaattggcttgaaggagaaacaacataaatacctggccccaaatctctccaagttagccattagtaagaataaaacattgcaacacgaactccgaaacaacagttggatacacagcgacgccatttcaccacctttaccaacattgaggagttagtctccctctagatcaagatccatgatgtgcatctcacacaaggtgtcaaagactccacctagaaatggacaccagatggcaagtactctactcactcagcagtcagcataccatgttcaattcagtgtttttttcacaaaattccgaagggacctcatttggagagcacttgtagaaaataagtgcaaggtcttctcctggatcccaattaagggaaaactactaatggaagataacatggaaaaaagggttggctgcacgaggaacactatgttctctgcaacgggcctttggagacccggctgcacccatgcttttgctacccatttgataaggcagcttggaatcaaatccttgcttgagagcactttgacagagtgacagaccattgggacagcaacaggctgacccctcaaagatcatatagtggtgggaaattgcctcaagtaaggtgtattgtagtgaatgaagatggttgagtggcatggtgatttatatattctggaacctctagaaagagaaacagaagaatcttcaataacgcctatgaaacagtgatgcaggtggccgcaagaattaatagagcagagaagaagagtgatagcggactatttatcttttgtgtgatctttcttgctcctgccccagaggggtgtggtatttttgcttgtacataaacattccttttttcctatcttaattgaagggcagagatcctgccaaactttcaaaataatgtgaactatag

SEQ ID NO: 14464 - DNA, 1208 bp, Zea Mays
gggggggaggacagtagtagtggcccatcttcgtcgcagcgccggcgctccatctttcgctccatcccttactcgcgctcggcacaccggctctcagggcggcggcgctcaggctcgggctctcaagcgacggcgtcaacggcttcccctcccgcctccggtcctccgcacaccggccggtgaccctgctgaacagtcttatggcggcgagcgcgggtgagagccagggggtggaaagactcctctcctatgctgaagatctcgtggctgtcctttgcgtcagcaccgactgcgacgacaatgcacaggtcggtgccggagtgcagaggctgctgtctgcctgtcgatccgagtctgacgatctcgagatgcagctcaaaggtggttttcatgagtaaacaagttagaagctagaccctcaaccctgtccaaacctgcaaatagtatcaggaaaaaatacactcctgcaaagaaaagattgacaaagcaaaggctgaaaccattactgacgatgaactcaatgcactacaaagcaagatggaagaaaaactgcaggaagagaagcagcttcgccaagagttaagagtgttacatgatgagcttgatgacctagaaagccaaagactttctataaaagaaagaaaggacgctgtcaagaagaaaaagaaagacacacagaaagcagaacgtacgctttccatgtgtctgtcggttacaaatatcatcccaaatttggaagaccaggataaggtttcaggatatattgtcgaccagaacaggaagaagatagagaagtttgaattcgagaacaccacgccaccagttgagatatgcgacgagctctggaagaagatttagcgtgtttcagatcattcttgttgtaaggcggcggaaacctgtgcctgtagattgccgcggtgtggttgtcctcccaggatgcagtttgccatgttgtttgtatcgttagttcatgacgctgtactgttttgtaaggcggcggaaacctgtgtttgtatcgttagtttgccatgtcagattagctactacttcttgtgttttaaattattccaaattataagttattctaattttcctgagagtcaaaccatcttaggtttaaagcatctcaagtttaaccaaatttatatagaaaattgccaaaaaagcatgacatcaaattggtatattacaaaaatataattaataaa

SEQ ID NO: 14465 - DNA, 1193 bp, Zea Mays
gggggggaggacagtagtagtggcccatcttcgtcgcagcgccggcgctccatctttcgctccatcccttactcgcgctcggcacaccggctctcagggcggcggcgctcaggctcgggctctcaagcgacggcgtcaacggcttcccctcccgcctccggtcctccgcacaccggccggtgaccctgctcttatggcggcgagcgcgggtgagagccagggggtggaaagactcctctcctatgctgaagatctcgtggctgtcctttgcgtcagcaccgactgcgacgacaatgcacaggtcggtgccggagtgcagaggctgctgtctgcctgtcgatccgagtctgacgatctcgagatgcagctcaaaggtggttttcatgagtaaacaagttagaagctagaccctcaaccctgtccaaacctgcaaatagtatcaggaaaaaatacactcctgcaaagaaaagattgacaaagcaaaggctgaaaccattactgacgatgaactcaatgcactacaaagcaagatggaagaaaaactgcaggaagagaagcagcttcgccaagatgttacatgatgagcttgatgacctagaaagccaaagactttctataaaagaaagaaaggacgctgtcaagaagaaaaagaaagacacacagaaagcagaacgtacgctttccatgtgtctgtcggttacaaatatcatcccaaatttggaagaccaggataaggtttcaggatatattgtcgaccagaacaggaagaagatagagaagtttgaattcgagaacaccacgccaccagttgagatatgcgacgagctctggaagaagatttagcgtgtttcagatcattcttgttgtaaggcggcggaaacctgtgcctgtagattgccgcggtgtggttgtcctcccaggatgcagtttgccatgttgtttgtatcgttagttcatgacgctgtactgttttgtaaggcggcggaaacctgtgtttgtatcgttagtttgccatgtcagattagctactacttcttgtgttttaaattattccaaattataagttattctaattttcctgagagtcaaaccatcttaggtttaaagcatctcaagtttaaccaaatttatatagaaaattgccaaaaaagcatgacatcaaattggtatattacaaaaatataattaataaa

SEQ ID NO: 14466 - DNA, 1201 bp, Zea Mays
gggggggaggacagtagtagtggcccatcttcgtcgcagcgccggcgctccatctttcgctccatcccttactcgcgctcggcacaccggctctcagggcggcggcgctcaggctcgggctctcaagcgacggcgtcaacggcttcccctcccgcctccggtcctccgcacaccggccggtgaccctgctcttatggcggcgagcgcgggtgagagccagggggtggaaagactcctctcctatgctgaagatctcgtggctgtcctttgcgtcagcaccgactgcgacgacaatgcacaggtcggtgccggagtgcagaggctgctgtctgcctgtcgatccgagtctgacgatctcgagatgcagctcaaaggtggttttcatgagtaaacaagttagaagctagaccctcaaccctgtccaaacctgcaaatagtatcaggaaaaaatacactcctgcaaagaaaagattgacaaagcaaaggctgaaaccattactgacgatgaactcaatgcactacaaagcaagatggaagaaaaactgcaggaagagaagcagcttcgccaagagttaagagtgttacatgatgagcttgatgacctagaaagccaaagactttctataaaagaaagaaaggacgctgtcaagaagaaaaagaaagacacacagaaagcagaacgtacgctttccatgtgtctgtcggttacaaatatcatcccaaatttggaagaccaggataaggtttcaggatatattgtcgaccagaacaggaagaagatagagaagtttgaattcgagaacaccacgccaccagttgagatatgcgacgagctctggaagaagatttagcgtgtttcagatcattcttgttgtaaggcggcggaaacctgtgcctgtagattgccgcggtgtggttgtcctcccaggatgcagtttgccatgttgtttgtatcgttagttcatgacgctgtactgttttgtaaggcggcggaaacctgtgtttgtatcgttagtttgccatgtcagattagctactacttcttgtgttttaaattattccaaattataagttattctaattttcctgagagtcaaaccatcttaggtttaaagcatctcaagtttaaccaaatttatatagaaaattgccaaaaaagcatgacatcaaattggtatattacaaaaatataattaataaa

SEQ ID NO: 14467 - DNA, 703 bp, Zea Mays
gggggggaggacagtagtagtggcccatcttcgtcgcagcgccggcgctccatctttcgctccatcccttactcgcgctcggcacaccggctctcagggcggcggcgctcaggctcgggctctcaagcgacggcgtcaacggcttcccctcccgcctccggtcctccgcacaccggccggtgaccctgcagtatcaggaaaaaatacactcctgcaaagaaaagattgacaaagcaaaggctgaaaccattactgacgatgaactcaatgcactacaaagcaagatggaagaaaaactgcaggaagagaagcagcttcgccaagagttaagagtgttacatgatgagcttgatgacctagaaagccaaagactttctataaaagaaagaaaggacgctgtcaagaagaaaaagaaagacacacagaaagcagaacgtacgctttccatgtgtctgtcggttacaaatatcatcccaaatttggaagaccaggataaggtttcaggatatattgtcgaccagaacaggaagaagatagagaagtttgaattcgagaacaccacgccaccagttgagatatgcgacgagctctggaagaagatttagcgtgtttcagatcattcttgttgtcatgttacatgctacataggatgaggagctaaagtatctctgaattgctacggatgtcctgaacatgtgcgctg

SEQ ID NO: 14468 - DNA, 822 bp, Zea Mays
gttcatactaagcgttgttaaagagaaacttattgtcctgctaagagatggacggaaactgcttggcaccctctgctcatttgatcagtttgcaaatgttgttcttcagggtgcttgtgaacgagtgattgtgggggaacaatattgtgatgttcctcttgggctgtacgtaatccggggagagaacgttgttttaatcggagaattggatcgcgaaaaggatgaactccctgctcacatgacctgtgtttcagaagcagaaataagaaaggctgaaaaggcagaacgggaagccagagatctgaaagggacgatgaggaaacggatggagttcctggacttcgattaacaccgtcaccgcggccgttgccgctccccattgtggcggaatctttagtggcggcctgtgtgccatacatgcctggtgaccgcgccggcgcaccttggattgctggagggtttagcgaacagtttctttttaactagcagtgctgttttatactctcgtggccacagaccctttgagcgcctcctgatacagctttgtcaccactctgatcattgcctcgatgaatttatatacctgacgttttggattggatctgcgccaaaacgccatttctatgcagagagtctgtactcttatagctgagacagatttttttcctttaaacgatttgggattggatctgggccaacgccatgcctttgcaggatcctggatgccggagcaaggctgtctcagctcctctgaacagtacattgctctatatttagaggacaacgactaatatataagcaaatatataagcaggtgcaagt

SEQ ID NO: 14469 - DNA, 939 bp, Zea Mays
cggcatcaagcaaaatggacaagagcgttcctgtagttagcaagatcttttgctcaggagctccaacaatgctgatgataaggaggagacctgctgtggtgaacggtggcggttttgttgttactgacctcagccatagcattgtgttcatcgtagatggttgtggaacacttggatccaagggagagcttatggtcaaagatggtgaaggagaaccaatactatccatctctaaaaaggcgctaagcacaaggaacagatggaatgggtactccatggattaccaaggaaaaaacaagctggtttttagcctaactgatccgaaatcatgcacagcacaaggtgcgccggttagagttcatgttgaacccaagaggcaatgtaaaaagtgggatttcgaaattggtggatcttttgcagatagagactgtacgatagttgattgcaccagaaaaatagtagcccagatgggtaagaaagggctgatgggaggcaaggacttctaccatgtggaagtacagtcaggatatgaccaagctttcatcattggggtgatggcaattcttgacagcatacatggagaatccactagatgctgacagcatgaattaaagaatttgctcttgtttataagagtacattaatgtccgatagcattgatcttgcaacctactttcatcttcaagtaagaaacagacgcatgctggcggcatcataatgattgtatgacccacgttgaataacatagaccagctgatgatatgagcctgactttcggtgccacttaattatctctcttcaataaactaaccgactaagggtgcgtttgattcagttatgagttgtctgctatagaaaagattgaaagttattttattcaaactactgagttatctaccgtgaacaaacagtatattgtttatatacactttatttaac

SEQ ID NO: 14470 - DNA, 2171 bp, Zea Mays
ataaaacatgtaaaacaacaacaaaatgtggtccaagctgctttttaaaagtagtgacagaaaagttgaacctcttttgttcagtttctacctttttaaagcagaagcttattcaaaaagttgaccaaacacaccatacatgtacaacaacgtagagcatacatgttccaatgttacataccggaacttaatactaattcaatatacaaggattgcaattttcatggattatgaacaaagtaactaaatgtgtacattgtactacagtcaccagaaatctggatcgactgggacatggatcgttggtgtctaaaaagtccaatgaagtcatatctcttaagcagcaaaaacagagaaaggatgggaagtgtcttgacatagtaattgaaattatgaagaatgttgctgccttaaattggacatcatttgaacaaacttaaaattaattctagttctgagaccaacttaaatcctcccaaaaagacgaaaattgtgatattggaggcccagtaaacaagcaaatgtgcaactttcatgaagaaatagaagtgcttcattgacttaataattccagttccaaagacagtttgtaagctcctcaacagattgtagattatgcttagaaaactagacagtattcagtgaatgctcagcacctggtttaaaattgcaatggcacaactgtacagtcaagcttgtgtagacataagctagcaaaaactgtatagtcaggcttgtgtagacatgaagaatgcacgccaatgtgcatactgcgtactcttttcctacaaaaaaaacctatgtgggtatgaacaatgcacagagaagaatgcaaatgaagtacctctgctagagagtaaattacttccatccaattcttcaagcattgaggcaggctgctaaagaaagaatacaactgaagtaccactgctagggtgtaaatttacttccatccaattcttcaagcaatgaatcttcatctgctaattcaatcttatccattaacaatctcccaactgtacctgcttttcaatctttggcaaaagtacaaagaggggctgaaaaaaaaacttgaggctcgcgagttggctcgagctcaggtggctcggagcagctcgcgagcctcaagcgagccgagctaggttttcgagctcgttggtccaacgacccgagccgactcacgagttgtgccaaattaatcaacctataaaataatgatgaatattggataattttatagatatctgactcgttccttagcctttaatgatgaatatatgacaatttataatttagattacatataatgttaaagatgattatatttttcatattcatataatattaaatcactatataatgtagtattatttatcaaggtatagctcgcgagccgactttgagccgagtcgagcctcctccttcagctcgttgagtggatgagtcgagccgagctgagctcggtcagccaacgagacgcaccgagccgagttcggctcggctcgtttccagccctaactaacagaacatgcttggatataatgtttacatgagtgtgtccagcatacatgtgtgcatgttttgcagcaccactgcagtagagcagaactatggacacctgtttgactcttcttcatgagactcagcaaatcactgaatgcacaatgcaccaaatagcttacctttgtattgttacacgacatcaacttggtttgactaattttttattgttatgtagccttgtgcaaccaacatttcaatattcacatctgagtttctttggatgaatgtcctacaaaaagcaaaaaaaatgttaagatatgcacaatgccttccaatcttcagtagtgtttcattaaataaaactgaagtggcaattagggatttacatgacaagatatgttaacaaactaaggaattatgccggttagatctttaatttagcaatgattacattttttctcgaacgcacaggagagttgcgcatcattatattaagaagaagatgggtccaaaatagaccaacaattactgacacaatacaagtgttatggtttatagtaggcggcctaaacagccctctagtcggcccattatagagggacatatagataaggattaggagaatctgtttagagatcctaatattaaggagtctgttttttaaggag

SEQ ID NO: 14471 - DNA, 740 bp, Zea Mays
ggcagatatgtttgcggaatcggtgcggatgggatcggcacggacacgttggagtccggcggcgacgtggttgcagcgggcagcggcagcgacatcggatcgaagggctctgataccaggttagtatgctgctgttctctgcctcgcaccgaccggaggttgtatgtgtggaggatcggtgggcgcggtttgaaggctgaacggcggtgagtagccagcgatcgtgagaggaggaaaacgaggtggcggctagggttggactcccggctccctacaggaagccggaaaacaatgtgtttctgcttgatctatagagtggtgcttacaattatttatactcctctctagtccttatctaatgagatagatctcctcttttctctctaacaaatcttatcttctaatccctatcttctctctaacaaatcttatcttctaatccttatctgtatgcttatcttctaatccttatttgcatgcttatgctgttgcccggcgcctatagtggctgccggtcatagcaaggcaactgataaaagaagaaaactcaccatgcctcattgttctcatctagagaagtcccagtcccagttctatgctgcaataagcatctgagacagctcaggtgttcttccctacattctttatgttagcagaattcaactatacagcaactgacatatctagtctttggcactggtgagaatgaactttctgactagctgaagcatgacctgaag

SEQ ID NO: 14472 - DNA, 2153 bp, Zea Mays
aaaaggtatagtagacgttacaagagcctcacacttcacacccccccattccccacttgcctccgccggcgcatccctaaaccccagtttagggtttctcgcgcggcgctacgctccgctccctcctccgctccccgcccgatcgcctcttcctctacctcctcgaagcttcgactgttccacacccccacccatatcaacccctttcccctttagctccttcccactgatacgctcgccgcgtgaagcattcgttagccgagccgccgcaaccatgtcgtcgttctggggtgtggaagtgaagcccgggaagccctacactctcacccatggcgacttcgccggccgcctgcgcctcacccaggcgacgctaggggttgaggtcggcaagggggagaaggctaccggcgtgaagaggtgtgtgctacagtgcagtgccgagaacagagatcccgtttttctttgcgtcctcatgccggagcagtcggagacatgccacctggagctagaatttgaggaggaagtcaccttctcagtgattgggccaaggagcatccacctcgctggatactacatgactgatgtgtgtggggaagataggggtgacagtgattctgggagcgattcacttcaaagttcagatgaggatggtttcttggaggaggacgatgatggtaacatggttatgggatattcagacagtgaagatgatgattcagagtctgatgatgaagagatggcatacaatcagggtaggggcaaaagttcagaagggattgaagaagcaaagccgtgaaaatggtgatgagtctcaactccagcttgctgcaagaaatccacctactgaatccttggaaagtgaagatgaagatggttttcctgtatcattttctgaatcaaagaagagttctgagattgtttcaaacaagaatgggggaaaagacaaggagactagcaacaaagacctgaaaagaaaaagtggagccattagcgaccgtggtgattcttcagggggggtaaaagctgagattgatggggcatcaaagaaaaagaaaaagggcaaggacaaaagcactgttatggacacaggaaaagtaaacaacgaagaaaaggaggttaagctacacgattctccagctgatcctgtcagtacaaaacagaagaaaaagaaaaacaagaacaaaagtgcttctgagggtgataccagtgagcaatctgctaagaacaacaatattgataaagacaatgaggaggcaagtgcgcaggaggccaataaaaagatcaagaaaaagaaggcacatgatataagcagaagtgaaagtcaggcaggaactggacttggtgagtcagatagcaaggaaccactccaaacacgaacgtttgccaatggtatgatgattcaggaggtagagatgggcaaacctgatggtaaaaaggccagccgtgggaagaaggtttctgttagatatattggcaagctaaagaatggcactattttcgactccaacgtcagtggaagaccttttgagtttagactaggtgttgggcaggttatcagtggctgggacgttggcgtcaatggtatgcgggttggggacaaaaggagactcaccattccaccttccatggggtatgggagcaaaagagtggggcagataccacagaactcaactctcatcttcgatgtggagctggtgaacgtaaaatgaagtgagaagatccacgagaaactgcggcagtttcacaaattttgctacgcatcattttccttgggcaatgctgtttcgtaggcataggggcatgttaagtggattcatctctgtcgctatcatactttcgaactgagtttcagaaggaaaaaaactgtggactgttgccatctgggataattcctgggctgcagcattcgccatccttctcccggttccttcagggtcattttgacgttcttgtgataccctcagaaccttttgaactgatgaaatggttaaggtggagtacgtgtacgacttcacgccgattggttttttttgtatcgtttgtgatcaagccaatcaaaactgagatcttgtctaatcgatctgtcagtgagacaaccaaaactgggtactgccgcgacgtaatagcttaacgtagagccccgcaacgtcaat

SEQ ID NO: 14473 - DNA, 2109 bp, Zea Mays
tcacacttcacacccccccattccccacttgcctccgccggcgcatccctaaaccccagtttagggtttctcgcgcggcgctacgctccgctccctcctccgctccccgcccgatcgcctcttcctctacctcctcgaagcttcgactgttccacacccccacccatatcaacccctttcccctttagctccttcccactgatacgctcgccgcgtgaagcattcgttagccgagccgccgcaaccatgtcgtcgttctggggtgtggaagtgaagcccgggaagccctacactctcacccatggcgacttcgccggccgcctgcgcctcacccaggcgacgctaggggttgaggtcggcaagggggagaaggctaccggcgtgaagaggtgtgtgctacagtgcagtgccgagaacagagatcccgtttttctttgcgtcctcatgccggagcagtcggagacatgccacctggagctagaatttgaggaggaagtcaccttctcagtgattgggccaaggagcatccacctcgctggatactacatgactgatgtgtgtggggaagataggggtgacagtgattctgggagcgattcacttcaaagttcagatgaggatggtttcttggaggaggacgatgatggtaacatgacagtgaagatgatgattcagagtctgatgatgaagagatggcatacaatcagggtaggggcaaaagttcagaagggattgaagaagcaaagccgtgaaaatggtgatgagtctcaactccagcttgctgcaagaaatccacctactgaatccttggaaagtgaagatgaagatggttttcctgtatcattttctgaatcaaagaagagttctgagattgtttcaaacaagaatgggggaaaagacaaggagactagcaacaaagacctgaaaagaaaaagtggagccattagcgaccgtggtgattcttcagggggggtaaaagctgagattgatggggcatcaaagaaaaagaaaaagggcaaggacaaaagcactgttatggacacaggaaaagtaaacaacgaagaaaaggaggttaagctacacgattctccagctgatcctgtcagtacaaaacagaagaaaaagaaaaacaagaacaaaagtgcttctgagggtgataccagtgagcaatctgctaagaacaacaatattgataaagacaatgaggaggcaagtgcgcaggaggccaataaaaagatcaagaaaaagaaggcacatgatataagcagaagtgaaagtcaggcaggaactggacttggtgagtcagatagcaaggaaccactccaaacacgaacgtttgccaatggtatgatgattcaggaggtagagatgggcaaacctgatggtaaaaaggccagccgtgggaagaaggtttctgttagatatattggcaagctaaagaatggcactattttcgactccaacgtcagtggaagaccttttgagtttagactaggtgttgggcaggttatcagtggctgggacgttggcgtcaatggtatgcgggttggggacaaaaggagactcaccattccaccttccatggggtatgggagcaaaagagtggggcagataccacagaactcaactctcatcttcgatgtggagctggtgaacgtaaaatgaagtgagaagatccacgagaaactgcggcagtttcacaaattttgctacgcatcattttccttgggcaatgctgtttcgtaggcataggggcatgttaagtggattcatctctgtcgctatcatactttcgaactgagtttcagaaggaaaaaaactgtggactgttgccatctgggataattcctgggctgcagcattcgccatccttctcccggttccttcagggtcattttgacgttcttgtgataccctcagaaccttttgaactgatgaaatggttaaggtggagtacgtgtacgacttcacgccgattggttttttttgtatcgtttgtgatcaagccaatcaaaactgagatcttgtctaatcgatctgtcagtgagacaaccaaaactgggtactgccgcgacgtaatagcttaacgtagagccccgcaacgtcaat

SEQ ID NO: 14474 - DNA, 2160 bp, Zea Mays
acacttcacacccccccattccccacttgcctccgccggcgcatccctaaaccccagtttagggtttctcgcgcggcgctacgctccgctccctcctccgctccccgcccgatcgcctcttcctctacctcctcgaagcttcgactgttccacacccccacccatatcaacccctttcccctttagctccttcccactgatacgctcgccgcgtgaagcattcgttagccgagccgccgcaaccatgtcgtcgttctggggtgtggaagtgaagcccgggaagccctacactctcacccatggcgacttcgccggccgcctgcgcctcacccaggcgacgctaggggttgaggtcggcaagggggagaaggctaccggcgtgaagaggtgtgtgctacagtgcagtgccgagaacagagatcccgtttttctttgcgtcctcatgccggagcagtcggagacatgccacctggagctagaatttgaggaggaagtcaccttctcagtgattgggccaaggagcatccacctcgctggatactacatgactgatgtgtgtggggaagataggggtgacagtgattctgggagcgattcacttcaaagttcagatgaggatggtttcttggaggaggacgatgatggtaacatgacagtgaagatgatgattcagagtctgatgatgaagagatggcatacaatcagggtaggggcaaaagttcagttgttattgaggaaattgaagaggatgacaaggctgctgttgctgaagtgcagaagggattgaagaagcaaagccgtgaaaatggtgatgagtctcaactccagcttgctgcaagaaatccacctactgaatccttggaaagtgaagatgaagatggttttcctgtatcattttctgaatcaaagaagagttctgagattgtttcaaacaagaatgggggaaaagacaaggagactagcaacaaagacctgaaaagaaaaagtggagccattagcgaccgtggtgattcttcagggggggtaaaagctgagattgatggggcatcaaagaaaaagaaaaagggcaaggacaaaagcactgttatggacacaggaaaagtaaacaacgaagaaaaggaggttaagctacacgattctccagctgatcctgtcagtacaaaacagaagaaaaagaaaaacaagaacaaaagtgcttctgagggtgataccagtgagcaatctgctaagaacaacaatattgataaagacaatgaggaggcaagtgcgcaggaggccaataaaaagatcaagaaaaagaaggcacatgatataagcagaagtgaaagtcaggcaggaactggacttggtgagtcagatagcaaggaaccactccaaacacgaacgtttgccaatggtatgatgattcaggaggtagagatgggcaaacctgatggtaaaaaggccagccgtgggaagaaggtttctgttagatatattggcaagctaaagaatggcactattttcgactccaacgtcagtggaagaccttttgagtttagactaggtgttgggcaggttatcagtggctgggacgttggcgtcaatggtatgcgggttggggacaaaaggagactcaccattccaccttccatggggtatgggagcaaaagagtggggcagataccacagaactcaactctcatcttcgatgtggagctggtgaacgtaaaatgaagtgagaagatccacgagaaactgcggcagtttcacaaattttgctacgcatcattttccttgggcaatgctgtttcgtaggcataggggcatgttaagtggattcatctctgtcgctatcatactttcgaactgagtttcagaaggaaaaaaactgtggactgttgccatctgggataattcctgggctgcagcattcgccatccttctcccggttccttcagggtcattttgacgttcttgtgataccctcagaaccttttgaactgatgaaatggttaaggtggagtacgtgtacgacttcacgccgattggttttttttgtatcgtttgtgatcaagccaatcaaaactgagatcttgtctaatcgatctgtcagtgagacaaccaaaactgggtactgccgcgacgtaatagcttaacgtagagccccgcaacgtcaat

SEQ ID NO: 14475 - DNA, 3281 bp, Zea Mays
tccctgagcggcgtccgagccgggcggcgcgtctatatattctgctgctcccactagctcggagctcgcggccactgcccaccttaaaaaaaacagtcggatacgatccgcgaatgcgagctgttttgaacggcgatttgtctttttgttctccagcgcgccagccaaccttaactgctacgatcgatcgaggggaggaagtttctggagctctagttctgcccatggcgtcggcgatggagctactggggagatcgttcgcgccgggccatgccgccgcggcgccgaggcggggaggcgggccctgcttcgcggcggtcggaagggaggggagtggtgcgcacaggaggagatcgtcgtcgtcgtcgtcgctgaggtcgactgcgccggtggacgcgctggccgagcgagtcgtggcgccgccggagagggccgaggcggtcccgccggagccgagcgtggccgcgcgggccgtggtcaccgtgcggcggagtcggaaaagggacgccaagtgccgggtcgccgagcggctggacgcgtgcgccgactgggtcggccgcagcgtcctcctcgagctcatcagcaccgagaccgacccaacggcgctggtgggctggtttggggagaaggacgtgaaggcggagcgggtggtgtacaccgccgacttcaacgtcgacgggtccttcggcgagccgggcgcggtcgccgtgctcaaccggcaccagcgcgagttcttcgtcgagagcatcgtggtggagggctttccctccggccccgcgcacttcacctgctactcgtgggtgcagcccacgcgcgtgcaccgcgacccgcgcgtgttcttcaccaacaagccgtacctgccggcgcagacgccgccggggctgcgggagctccgccgcctggagctcagcgacctgaggggcgagggcgctggcaccggcggcgagcgcaggaccaccgatcgggtgtgggagtacgacgtgtacaacgacctcggcaacccggacatgggcgccgagttcgcgcgcccgatcctcggcgggcgaccagcagctgccgtacccgcgccggatgcggacgggccggcctaagaccttcacagacgaccgcgcggagagcagggtggagtacccggagcccatctacgtgtcccgggacgaggagttcgaggagggcaagaacgagatgctgtcggaaggcgcgctcaaggcgctgctccacaacttcatgccgctgctggtgagctccgtgtcgccggacttccgcgacttcgccggcttccacgacgtggacaacctcttcaaggagggcctcaggctaaagcaggccctgcaggaccagctgttccagaagatccccttcgtgcgcaaggtccaggagaacagcgagggcctcctccgctacgacacgcccgacatcatcaagagagacaagtttgcttggctgcgggacgacgagttcgcgaggcaggcgctggctggcattaaccccgtcaacatcgagcgccttcaggcgttcccgccgatgagcaagctggacccggccgtgtacggcccgccggagtcggccatcacggaggagcacatcatcgggaggctcgacggaatgtcggtgcagcaggcgctggaggacaaccggctgtacatgctggactaccacgacatcttcctgccgttcctggaccggatcaacgcgcaggacgggcggaaggcctacggcacgcgcacgctcttcttcctgacgggcgcgggcacgctgaagcccatcgcgatcgagctgcgcctcccgccgatgaccgacgggtgcgcgcgcgccaagcgggtgctcacgccgcccgccgacgccaccagcaactggctgtggcagctcgccaaggcgcacgtctgctccaacgacgcgggcgtccaccagctcatcaaccactggctgaggacgcacgcgtgcatggagccgttcatcatcgctgcgcaccggcagatgagcgcgatgcaccccatcttcaagctgctgaagccgcacatgcgctacacgctcaagatcaacgcgctggcgcggcagatcctcatcaacggcgacggcgtcatcgagtccgggttcacccctggccgctactgcatggagatgagctcgttcgcgtaccgggagctctggcggctcgaccaggagggcctccccgccgatctcatcagaagaggaatggccgtggaggacccgacgaagccgcacggtctgcggctgctcatcgaggactacccgtacgccaccgacgggctgctcctctggtcggccatcacgcggtggtgcggcgcctacgtggccacgtactacccgtcggacgagtcggtgcaggccgacaccgagctgcagtcgtggtacacggaggccgtgcagacggggcacgcggacaagcgcggcgcgccgtggtggccgcgcctgacgacgcccggggacctggcgtcgctgctcacgacgctgctgtggctgacctcggcgcagcacgcggcgctcaacttcgggcagtacccgctgggcggctacatcccgaaccggccgccgctgatgcggcggctggtgcccgccgagggggacccggagcacgcgcacctggtggccgacccgcaccgcttcttcctgtcggcgctgcccggcctgacgcaggccaccacgttcatgaccgtcatcgacacgctgtccacgcactccgccgacgagcagtacctcggggagcgccccgacgaggcgtggacggccgacccggccgcgctggcggccgagcgcgagttcgcggacgaggtgcgccgcgccgaggaggagatcggccggcgcaacaccgacgcgggccgccgcaaccgctgcggcgccggcgtgctgccctatgagctcatggcacccacgtccggcccgggcatcacctgccgcggcgtccccaacagtgtcaccatttagtcttctcgcttgggcggacagcggagatgatctcgaagcgaattttttccattcattgtaatcgggcggggagaaatctaaaagcagaagcaaatggttttgggaacgtatcctgtgagcacaggtcttccgtgcgcacgtgagcattttaattgggaacaattggatctataccattaaaagatccaaactttagatatataccatggaccccacatgtcattgactcatgtggacccatatgtaagtgagatagtaatagtatggatctaaagtggtgatcttttaatggtatggatccaaatttccctaattgggaagccttcatctctaat

SEQ ID NO: 14476 - DNA, 3282 bp, Zea Mays
cccaccttaaaaaaaacagtcggatacgatccgcgaatgcgagctgttttgaacggcgatttgtctttttgttctccagcgcgccagccaaccttaactgctacgatcgatcgaggggaggaagtttctggagctctagttctgcccatggcgtcggcgatggagctactggggagatcgttcgcgccgggccatgccgccgcggcgccgaggcggggaggcgggccctgcttcgcggcggtcggaagggaggggagtggtgcgcacaggaggagatcgtcgtcgtcgtcgtcgctgaggtcgactgcgccggtggacgcgctggccgagcgagtcgtggcgccgccggagagggccgaggcggtcccgccggagccgagcgtggccgcgcgggccgtggtcaccgtgcggcggagtcggaaaagggacgccaagtgccgggtcgccgagcggctggacgcgtgcgccgactgggtcggccgcagcgtcctcctcgagctcatcagcaccgagaccgacccaagaaaaggggggccaaagaagagcaggcggtcggcgctggtgggctggtttggggagaaggacgtgaaggcggagcgggtggtgtacaccgccgacttcaacgtcgacgggtccttcggcgagccgggcgcggtcgccgtgctcaaccggcaccagcgcgagttcttcgtcgagagcatcgtggtggagggctttccctccggccccgcgcacttcacctgctactcgtgggtgcagcccacgcgcgtgcaccgcgacccgcgcgtgttcttcaccaacaagccgtacctgccggcgcagacgccgccggggctgcgggagctccgccgcctggagctcagcgacctgaggggcgagggcgctggcaccggcggcgagcgcaggaccaccgatcgggtgtgggagtacgacgtgtacaacgacctcggcaacccggacatgggcgccgagttcgcgcgcccgatcctcggcgggcgaccagcagctgccgtacccgcgccggatgcggacgggccggcctaagaccttcacaggcaagcctccgctttttcccccccccccccccccccccccagctcactacgaccgcgcggagagcagggtggagtacccggagcccatctacgtgtcccgggacgaggagttcgaggagggcaagaacgagatgctgtcggaaggcgcgctcaaggcgctgctccacaacttcatgccgctgctggtgagctccgtgtcgccggacttccgcgacttcgccggcttccacgacgtggacaacctcttcaaggagggcctcaggctaaagcaggccctgcaggaccagctgttccagaagatccccttcgtgcgcaaggtccaggagaacagcgagggcctcctccgctacgacacgcccgacatcatcaagagagacaagtttgcttggctgcgggacgacgagttcgcgaggcaggcgctggctggcattaaccccgtcaacatcgagcgccttcaggcgttcccgccgatgagcaagctggacccggccgtgtacggcccgccggagtcggccatcacggaggagcacatcatcgggaggctcgacggaatgtcggtgcagcaggcgctggaggacaaccggctgtacatgctggactaccacgacatcttcctgccgttcctggaccggatcaacgcgcaggacgggcggaaggcctacggcacgcgcacgctcttcttcctgacgggcgcgggcacgctgaagcccatcgcgatcgagctgcgcctcccgccgatgaccgacgggtgcgcgcgcgccaagcgggtgctcacgccgcccgccgacgccaccagcaactggctgtggcagctcgccaaggcgcacgtctgctccaacgacgcgggcgtccaccagctcatcaaccactggctgaggacgcacgcgtgcatggagccgttcatcatcgctgcgcaccggcagatgagcgcgatgcaccccatcttcaagctgctgaagccgcacatgcgctacacgctcaagatcaacgcgctggcgcggcagatcctcatcaacggcgacggcgtcatcgagtccgggttcacccctggccgctactgcatggagatgagctcgttcgcgtaccgggagctctggcggctcgaccaggagggcctccccgccgatctcatcagaagaggaatggccgtggaggacccgacgaagccgcacggtctgcggctgctcatcgaggactacccgtacgccaccgacgggctgctcctctggtcggccatcacgcggtggtgcggcgcctacgtggccacgtactacccgtcggacgagtcggtgcaggccgacaccgagctgcagtcgtggtacacggaggccgtgcagacggggcacgcggacaagcgcggcgcgccgtggtggccgcgcctgacgacgcccggggacctggcgtcgctgctcacgacgctgctgtggctgacctcggcgcagcacgcggcgctcaacttcgggcagtacccgctgggcggctacatcccgaaccggccgccgctgatgcggcggctggtgcccgccgagggggacccggagcacgcgcacctggtggccgacccgcaccgcttcttcctgtcggcgctgcccggcctgacgcaggccaccacgttcatgaccgtcatcgacacgctgtccacgcactccgccgacgagcagtacctcggggagcgccccgacgaggcgtggacggccgacccggccgcgctggcggccgagcgcgagttcgcggacgaggtgcgccgcgccgaggaggagatcggccggcgcaacaccgacgcgggccgccgcaaccgctgcggcgccggcgtgctgccctatgagctcatggcacccacgtccggcccgggcatcacctgccgcggcgtccccaacagtgtcaccatttagtcttctcgcttgggcggacagcggagatgatctcgaagcgaattttttccattcattgtaatcgggcggggagaaatctaaaagcagaagcaaatggttttgggaacgtatcctgtgagcacaggtcttccgtgcgcacgtgagcattttaattgggaacaattggatctataccattaaaagatccaaactttagatatataccatggaccccacatgtcattgactcatgtggacccatatgtaagtgagatagtaatagtatggatctaaagtggtgatcttttaatggtatggatccaaatttccctaattgggaagccttcatctctaat

SEQ ID NO: 14477 - DNA, 3676 bp, Zea Mays
aaaaacagtcggatacgatccgcgaatgcgagctgttttgaacggcgatttgtctttttgttctccagcgcgccagccaaccttaactgctacgatcgatcgaggggaggaagtttctggagctctagttctgcccatggcgtcggcgatggagctactggggagatcgttcgcgccgggccatgccgccgcggcgccgaggcggggaggcgggccctgcttcgcggcggtcggaagggaggggagtggtgcgcacaggaggagatcgtcgtcgtcgtcgtcgctgaggtcgactgcgccggtggacgcgctggccgagcgagtcgtggcgccgccggagagggccgaggcggtcccgccggagccgagcgtggccgcgcgggccgtggtcaccgtgcggcggagtcggaaaagggacgccaagtgccgggtcgccgagcggctggacgcgtgcgccgactgggtcggccgcagcgtcctcctcgagctcatcagcaccgagaccgacccaagtaagaagaaagacttgcgtggttccgtctccaccgtccccgccgccgccgtgccgcaccgcgcgcgcgcggtggcatggaattccaatgcgcatccagcgttgcgttgcatcttcgaattgtattgagctagcacaaatcggttccttccttcgttctctctttcccttttcttgtctcgtcgtcgtttcccattcactccttcaccttcatggaacccgcggcgagaatattccagctggtgcgccttgacgtctgggtcctttgtctccgagtcgccattaatttccaaatagaccatcacgtggagctgtctgtctctctttttgtgatttgtgccaaaagctgccgccttctccgtctcggctgcatcgaaacgaaaatggagttacgcaatcatgccaggcgaggcgaggcattaatctgaccggaccatctctgaaacggtggcaggaaaaggggggccaaagaagagcaggcggtcggcgctggtgggctggtttggggagaaggacgtgaaggcggagcgggtggtgtacaccgccgacttcaacgtcgacgggtccttcggcgagccgggcgcggtcgccgtgctcaaccggcaccagcgcgagttcttcgtcgagagcatcgtggtggagggctttccctccggccccgcgcacttcacctgctactcgtgggtgcagcccacgcgcgtgcaccgcgacccgcgcgtgttcttcaccaacaagccgtacctgccggcgcagacgccgccggggctgcgggagctccgccgcctggagctcagcgacctgaggggcgagggcgctggcaccggcggcgagcgcaggaccaccgatcgggtgtgggagtacgacgtgtacaacgacctcggcaacccggacatgggcgccgagttcgcgcgcccgatcctcggcgggcgaccagcagctgccgtacccgcgccggatgcggacgggccggcctaagaccttcacagacgaccgcgcggagagcagggtggagtacccggagcccatctacgtgtcccgggacgaggagttcgaggagggcaagaacgagatgctgtcggaaggcgcgctcaaggcgctgctccacaacttcatgccgctgctggtgagctccgtgtcgccggacttccgcgacttcgccggcttccacgacgtggacaacctcttcaaggagggcctcaggctaaagcaggccctgcaggaccagctgttccagaagatccccttcgtgcgcaaggtccaggagaacagcgagggcctcctccgctacgacacgcccgacatcatcaagagagacaagtttgcttggctgcgggacgacgagttcgcgaggcaggcgctggctggcattaaccccgtcaacatcgagcgccttcaggcgttcccgccgatgagcaagctggacccggccgtgtacggcccgccggagtcggccatcacggaggagcacatcatcgggaggctcgacggaatgtcggtgcagcaggcgctggaggacaaccggctgtacatgctggactaccacgacatcttcctgccgttcctggaccggatcaacgcgcaggacgggcggaaggcctacggcacgcgcacgctcttcttcctgacgggcgcgggcacgctgaagcccatcgcgatcgagctgcgcctcccgccgatgaccgacgggtgcgcgcgcgccaagcgggtgctcacgccgcccgccgacgccaccagcaactggctgtggcagctcgccaaggcgcacgtctgctccaacgacgcgggcgtccaccagctcatcaaccactggctgaggacgcacgcgtgcatggagccgttcatcatcgctgcgcaccggcagatgagcgcgatgcaccccatcttcaagctgctgaagccgcacatgcgctacacgctcaagatcaacgcgctggcgcggcagatcctcatcaacggcgacggcgtcatcgagtccgggttcacccctggccgctactgcatggagatgagctcgttcgcgtaccgggagctctggcggctcgaccaggagggcctccccgccgatctcatcagaagaggaatggccgtggaggacccgacgaagccgcacggtctgcggctgctcatcgaggactacccgtacgccaccgacgggctgctcctctggtcggccatcacgcggtggtgcggcgcctacgtggccacgtactacccgtcggacgagtcggtgcaggccgacaccgagctgcagtcgtggtacacggaggccgtgcagacggggcacgcggacaagcgcggcgcgccgtggtggccgcgcctgacgacgcccggggacctggcgtcgctgctcacgacgctgctgtggctgacctcggcgcagcacgcggcgctcaacttcgggcagtacccgctgggcggctacatcccgaaccggccgccgctgatgcggcggctggtgcccgccgagggggacccggagcacgcgcacctggtggccgacccgcaccgcttcttcctgtcggcgctgcccggcctgacgcaggccaccacgttcatgaccgtcatcgacacgctgtccacgcactccgccgacgagcagtacctcggggagcgccccgacgaggcgtggacggccgacccggccgcgctggcggccgagcgcgagttcgcggacgaggtgcgccgcgccgaggaggagatcggccggcgcaacaccgacgcgggccgccgcaaccgctgcggcgccggcgtgctgccctatgagctcatggcacccacgtccggcccgggcatcacctgccgcggcgtccccaacagtgtcaccatttagtcttctcgcttgggcggacagcggagatgatctcgaagcgaattttttccattcattgtaatcgggcggggagaaatctaaaagcagaagcaaatggttttgggaacgtatcctgtgagcacaggtcttccgtgcgcacgtgagcattttaattgggaacaattggatctataccattaaaagatccaaactttagatatataccatggaccccacatgtcattgactcatgtggacccatatgtaagtgagatagtaatagtatggatctaaagtggtgatcttttaatggtatggatccaaatttccctaattgggaagccttcatctctaat

SEQ ID NO: 14478 - DNA, 6512 bp, Zea Mays
ttttattccctgttgtttttcaggtcatagttttgtgctgctgatgatggtgttaagtgccggtgggctcggccttcttataagtctaagtaatccttctatacttcttaatgaggatggtcacttgaactagcatatatttcaaaactataaataatttataacctttcaaagtttctttgtttgaatcaatgtagtaatcactctgatcatgtacgaagtaaaatttttgtaacttgtaaaatttggtaataagatttccgctgcaaaatattggtgtgtgtgatttgtattacttaatcccgcggttctggttgtaagtggtttatccggtgtccgtggggcaatcggacggatcctgttaagttatctggtgcacatgcatggccgtctgagttctttgagacaaggacaggtgcatgtgggcccgataccttgggaggttctgccacagttgtagcatatcctcctcttaaacatatgcatcatttgcacaaagacttgtgaggtccggggatgatgttttacatcttgaacacccaaatacatagataatcttaaaataatatgattaaaaacataaaagacatatatgctatagatcaatccaagttccacgaatctaagacatttagctcactacgtagcttacaacaccttttctcatctaaaggcttggtgaaggtattgactagctagtgatcggtgctaatatggcaaacatcgatatctcccctttgctggtgatttctcaaaaagtgatgccggatgtctatgtgcttagtgcggctgtgttcaatgggattatccgccaagcggattgcactctcaatatcacataggagtgggactttgctcaaattgcagccaaagtcccaaagggtttgcctcatccaaagtagttggacacaacattggcctgcaacaacatactcggcctcgatggtggatagggctttgataccattgtttctttgaactccaagacaccaaggaccttcccagaatctgacaagtcctagttgtgctcttcctatcaaccttgcacctggcatagtcagagtctgaatatccaatcaagtcaaaggtagacccttaggataccagagcctgatgcaaggcgtatgaactaaatatcgaagaatacgcttcatagccacaaggtgacattccttgggatcagattgaaatctagcacacatgcaaacagaaagtataatgtctggtctactgtacttgcacaaagataatgaccggtataccttttgatctatatacttacctcctatgttgaggtccaaatgactgtttgttcccattggcgtcttagcaggttttacgtccttcatcccaaacttctttagtatatcttgtgtgtactttgtttgagagaggaatgtctcttccttgagttgctttacttgaaatccaaggaaataagtcaactctcccatcatggacatcttgaatttttatgtcatcaccctactaaacttctcacatgaattttgattagtagaaccaaatattatggcatcgacatatatttggcatataaacaaatcaccaaagcaagtcttagtgaaaagagtaggattcgctttcctggccttgaaagcatgtgaaataaggaaatatataaggcatccataccatgctcttggggcttgcttaggtcgatagagcgccttagagagattatacacatggttggggtacttatcatcctcaaagccagggggttgctccatgtacacctcctccttgattggcctattgagaaaggcgctcttcacatccatttgatagagcttaaaagaatggtgagcagcataggctaatagtattcgaatagactcaagcctagctacaggagcaaaagtctcctcaaaatccaaacctgtaacttgggcataaccttttgccacaagtcttgccttgtttcttgtcaccaccccgtactcgtcttgtttgttgcgaaacacccactttgtgccaacaacattttactttggatgtggcaccaaactccatacttcatttctcttcaagttgtttagctcctcttgcatggccaacatctagtctggatcctgcaaggcttcttctaccctgaaaggctcaatagaagaaacaaaagagtagtgcccacaaaaattagcaatacgtgtgtagtaactcccttgctaatgtcaccaaggatttgatccaccagttgatccctttgaatgttagtgcggacttgggttggaggtgcatgtggtacttcttcctcctccctttcttcttattcttgtgctcccccttgatccatgtcgtcgtcttgtggtacctgttcctcatcttgagtcggaggatgcaccatcgttgaggaagagggatgatcttgcacttgttgttcctgtggtcgcacatcgtctatcgccatagtcctcattgctaccgttggaacctcgttttcatctatgtcatgaagatcaacttgcactcttagagggccattagtctcatcaaataaaatgtcactagtgacttcaactaaacccaaagatttgttgaaggccctatatgcctttgtatttaaatcataaccaagtaaaaacccttcaatggctttgggagcaaactttgaatgtctatctttctttaccaagatgtagcatttgctcccaaatacatagaaataggaaacattccttgttgatcctcctcgcacttcttctttctatagaacttcgtcgtcggagtcggatgaagaggagtccgagtcccattccttgctgatgtgcgcctcacccttctttctatagaacttccttttctcattcttccctttcttgttctgatcctcctagttggtcgttgctttgagtgcaatgggttacgactcgtagtgaggaagaggaccgttggcgatgtcgttgacataccttgcttcttttaccatcatgcgcccacttacaaacttaccaagaatttctttgggcgacattttggtatacctgggatttcatgaataagattaacaagatgaggatcaataacagtaaacaaccttaacatgagacgcacgacgtcgtgatccgtccatcttgtgcttccatagcttcggattttgttcaccagggtcttgagcctgttatacgtttcagttggctcctcaccctcttcatggcgaacctccccaactcgtcttccacgaactccatcttggtgatcattgtggcatcattaccctcatgagtgattttgagggtgtcccatatttccttggtattgtccaagctactaaaaatgttgtattcatccctgcatagagatgctaaaagaaaagtagtagcctggatatttttatgaatttgttcattaataaatatggcattatcattgctatcaaaatgcattccattttctactactttccaaatgctaggatgaagagaaaataaatgactacgcattttatgatttcaaaacgaacaatcttccccatcaaagtgagggggcttgccaaaaggaatagacaataaatgagcattgagttgtacggaatgcgggaataatcaaaagagtaattttcgtgaaccgtctttttctttgaagaagagtcgtcgtccttcggtgaagattgggaggcatcgctgtcgtagactatctttttgaagcgcctcttcttcttcccgtccttgttcttgttgtttgagcgtgagtcgatggacttatctccctttggctcattgttgttgacaatctccttctccttgtcgtctatcactatccccttgcggctttgtcggcgcgtggggggttgcagatttcacaggggggagacgggggcgttcatgcggagggagaggcgggggcacggggatggtctacactattgacttaatatgtagtaaatattatatttgaataaatatctcaatacgtatttatatagcatataaaaatcgtagcaaaacacgagcaactggctagtagtttatataagcacatattcacctgcttatagattattataatctaggtatctagattatataattcatctaataatttatgttgtttgtttaccccttaatttatttgagttggattatataatctataggctaaacaaataggcttttagtttccatctattctgattatgttgggcgggagcaaactgacctcgcagtcagactgactgcaacacttatctctaaatttttccttttatatcatactatgcagctatgtcatctagattctatctcctacttctcttcttctcacatcagtttcctctaagttttccctctatatctcactccaaccataaaatattattttataaacccattcatcatttaatatcattttttttcttctaacaactactgcagagcatgggtgagcagtgagctgctgccgtaactccaaagctgacaagttttctgtgctgtccaccaagattgtagcatgtagatgagatgtagaggagctagtagcggctaccattacggcaataaagagcccgtaggaaaagcggagggggcagcgagcgggtgctgcataacctgcattcagtctcagggtaccattgcatcccactcggctccacctcgcggcccatatttgatatttcggctatggcaggtcattgcgccgtcgtcgtcgtcgttcgcaagcagcaaccaggcagctccgggctccggccatggcatcaccaccaaggaatgtcggtaccaggactaccagcaacccggagatcccagagttcctggtgggcccggctggccggccggtgccggccgtggggctcggcacggcatcgttcccgttcgtggaggaaaacgtcaggaccgccgtcctcgcggcactggagctcggataccgccacctcgataccgcttcgctctaccgctccgaacgtgccgtcggcgacgccgtggccgaggcagcgcggcgcgggatcgtggcgtccagggaggaggtgttcgtgacgaccaagatgtggtgctcgcagtgccacccggatctcgtgctaccttccctcaaggagagcttgcagaaccttcaaatggattatgttgatttgtacctggttcattggccgatagctgcaaagcccggcaagccacagttcccgtttaaaagggaggacatcatgcccatggacctaataggtgtatggcgggcaatggaggaatgccaccggcttggccttgctaggatgattggtgtcagcaatttcacaacaaagaagctccaagagctactggccattgctaaaatccccccgtcagtaaatcaggtctgtgcagatcatatgagttaggtggtggcaatggcagtaagccagtaacctcagttagttgtgggtctttcaggttcttgtagtccttttcttaatgattgataagcatgatatactctatataaggccccctttggacattttcacgtttcatgcgtttttgttgtaaaaaacaaactgattcgtataaaatttctatacaaattaccgtgaaatttctactgcgcaaaagaccacaaaaggaagaacaggatgttttactgtatttatttttatcgaacatgcagaatagctgtgtgcctttcttttcatcaaagaagaaagagtgtcacatggatattaatattccatatgaatatagaacattagaacttgaaggttttttaatatgtaaatagtcatcattgaacgaaaagtgggtgttttaggggataattgtttcaaattaaaaataactttgtatattgtatatcctcaagtatacctacaccatacactgacatgtgagataaccttggcttgagcaggttgaaatgaatccaatttggcagcagaaaaggttagctgagttctgcaaagacaaaggtattcatttgactgcctattctccgctagcaggccaaagcacgtctaaggtcaatccagtaatgcagtctgaggttctgcaagaggttgcaaaggctagaggaaagtcagtggctcagatttcgctgaggtggatctacgagcaaggcgctagcgtggttgtcaagagtttcggaagggataggctcaaggagaacgtggaaatcttcgattgggaactgaccaatgaagacaggcgtaagattagtcagatacctcagcacaagagggtcacagtgttggggatcctcagcccagacggcgtctccagcgtggatcttgctgagcttgatattgttgaaatgtagcagaaatctccatctatcaggttgcaaggacaaaaaatggtgattggagtagctttcatacggctacgttgaatcagttgcttagatacggccatattgaatcaagaattagaagtagaggacgatctctctacttgtcgtccggacctcattttcttaaaatgtattttcaggtgtctgaccttgtcctgaaatgccatccaggccattactttttagaatgccatttttagatctgtttgatctagcttaaataagttactaggcaaacaaac

SEQ ID NO: 14479 - DNA, 5982 bp, Zea Mays
ttttattccctgttgtttttcaggtcatagttttgtgctgctgatgatggtgttaagtgccggtgggctcggccttcttataagtctaagtaatccttctatacttcttaatgaggatggtcacttgaactagcatatatttcaaaactataaataatttataacctttcaaagtttctttgtttgaatcaatgtagtaatcactctgatcatgtacgaagtaaaatttttgtaacttgtaaaatttggtaataagatttccgctgcaaaatattggtgtgtgtgatttgtattacttaatcccgcggttctggttgtaagtggtttatccggtgtccgtggggcaatcggacggatcctgttaagttatctggtgcacatgcatggccgtctgagttctttgagacaaggacaggtgcatgtgggcccgataccttgggaggttctgccacagttgtagcatatcctcctcttaaacatatgcatcatttgcacaaagacttgtgaggtccggggatgatgttttacatcttgaacacccaaatacatagataatcttaaaataatatgattaaaaacataaaagacatatatgctatagatcaatccaagttccacgaatctaagacatttagctcactacgtagcttacaacaccttttctcatctaaaggcttggtgaaggtattgactagctagtgatcggtgctaatatggcaaacatcgatatctcccctttgctggtgatttctcaaaaagtgatgccggatgtctatgtgcttagtgcggctgtgttcaatgggattatccgccaagcggattgcactctcaatatcacataggagtgggactttgctcaaattgcagccaaagtcccaaagggtttgcctcatccaaagtagttggacacaacattggcctgcaacaacatactcggcctcgatggtggatagggctttgataccattgtttctttgaactccaagacaccaaggaccttcccagaatctgacaagtcctagttgtgctcttcctatcaaccttgcacctggcatagtcagagtctgaatatccaatcaagtcaaaggtagacccttaggataccagagcctgatgcaaggcgtatgaactaaatatcgaagaatacgcttcatagccacaaggtgacattccttgggatcagattgaaatctagcacacatgcaaacagaaagtataatgtctggtctactgtacttgcacaaagataatgaccggtataccttttgatctatatacttacctcctatgttgaggtccaaatgactgtttgttcccattggcgtcttagcaggttttacgtccttcatcccaaacttctttagtatatcttgtgtgtactttgtttgagagaggaatgtctcttccttgagttgctttacttgaaatccaaggaaataagtcaactctcccatcatggacatcttgaatttttatgtcatcaccctactaaacttctcacatgaattttgattagtagaaccaaatattatggcatcgacatatatttggcatataaacaaatcaccaaagcaagtcttagtgaaaagagtaggattcgctttcctggccttgaaagcatgtgaaataaggaaatatataaggcatccataccatgctcttggggcttgcttaggtcgatagagcgccttagagagattatacacatggttggggtacttatcatcctcaaagccagggggttgctccatgtacacctcctccttgattggcctattgagaaaggcgctcttcacatccatttgatagagcttaaaagaatggtgagcagcataggctaatagtattcgaatagactcaagcctagctacaggagcaaaagtctcctcaaaatccaaacctgtaacttgggcataaccttttgccacaagtcttgccttgtttcttgtcaccaccccgtactcgtcttgtttgttgcgaaacacccactttgtgccaacaacattttactttggatgtggcaccaaactccatacttcatttctcttcaagttgtttagctcctcttgcatggccaacatctagtctggatcctgcaaggcttcttctaccctgaaaggctcaatagaagaaacaaaagagtagtgcccacaaaaattagcaatacgtgtgtagtaactcccttgctaatgtcaccaaggatttgatccaccagttgatccctttgaatgttagtgcggacttgggttggaggtgcatgtggtacttcttcctcctccctttcttcttattcttgtgctcccccttgatccatgtcgtcgtcttgtggtacctgttcctcatcttgagtcggaggatgcaccatcgttgaggaagagggatgatcttgcacttgttgttcctgtggtcgcacatcgtctatcgccatagtcctcattgctaccgttggaacctcgttttcatctatgtcatgaagatcaacttgcactcttagagggccattagtctcatcaaataaaatgtcactagtgacttcaactaaacccaaagatttgttgaaggccctatatgcctttgtatttaaatcataaccaagtaaaaacccttcaatggctttgggagcaaactttgaatgtctatctttctttaccaagatgtagcatttgctcccaaatacatagaaataggaaacattccttgttgatcctcctcgcacttcttctttctatagaacttcgtcgtcggagtcggatgaagaggagtccgagtcccattccttgctgatgtgcgcctcacccttctttctatagaacttccttttctcattcttccctttcttgttctgatcctcctagttggtcgttgctttgagtgcaatgggttacgactcgtagtgaggaagaggaccgttggcgatgtcgttgacataccttgcttcttttaccatcatgcgcccacttacaaacttaccaagaatttctttgggcgacattttggtatacctgggatttcatgaataagattaacaagatgaggatcaataacagtaaacaaccttaacatgagacgcacgacgtcgtgatccgtccatcttgtgcttccatagcttcggattttgttcaccagggtcttgagcctgttatacgtttcagttggctcctcaccctcttcatggcgaacctccccaactcgtcttccacgaactccatcttggtgatcattgtggcatcattaccctcatgagtgattttgagggtgtcccatatttccttggtattgtccaagctactaaaaatgttgtattcatccctgcatagagatgctaaaagaaaagtagtagcctggatatttttatgaatttgttcattaataaatatggcattatcattgctatcaaaatgcattccattttctactactttccaaatgctaggatgaagagaaaataaatgactacgcattttatgatttcaaaacgaacaatcttccccatcaaagtgagggggcttgccaaaaggaatagacaataaatgagcattgagttgtacggaatgcgggaataatcaaaagagtaattttcgtgaaccgtctttttctttgaagaagagtcgtcgtccttcggtgaagattgggaggcatcgctgtcgtagactatctttttgaagcgcctcttcttcttcccgtccttgttcttgttgtttgagcgtgagtcgatggacttatctccctttggctcattgttgttgacaatctccttctccttgtcgtctatcactatccccttgcggctttgtcggcgcgtggggggttgcagatttcacaggggggagacgggggcgttcatgcggagggagaggcgggggcacggggatggtctacactattgacttaatatgtagtaaatattatatttgaataaatatctcaatacgtatttatatagcatataaaaatcgtagcaaaacacgagcaactggctagtagtttatataagcacatattcacctgcttatagattattataatctaggtatctagattatataattcatctaataatttatgttgtttgtttaccccttaatttatttgagttggattatataatctataggctaaacaaataggcttttagtttccatctattctgattatgttgggcgggagcaaactgacctcgcagtcagactgactgcaacacttatctctaaatttttccttttatatcatactatgcagctatgtcatctagattctatctcctacttctcttcttctcacatcagtttcctctaagttttccctctatatctcactccaaccataaaatattattttataaacccattcatcatttaatatcattttttttcttctaacaactactgcagagcatgggtgagcagtgagctgctgccgtaactccaaagctgacaagttttctgtgctgtccaccaagattgtagcatgtagatgagatgtagaggagctagtagcggctaccattacggcaataaagagcccgtaggaaaagcggagggggcagcgagcgggtgctgcataacctgcattcagtctcagggtaccattgcatcccactcggctccacctcgcggcccatatttgatatttcggctatggcaggtcattgcgccgtcgtcgtcgtcgttcgcaagcagcaaccaggcagctccgggctccggccatggcatcaccaccaaggaatgtcggtaccaggactaccagcaacccggagatcccagagttcctggtgggcccggctggccggccggtgccggccgtggggctcggcacggcatcgttcccgttcgtggaggaaaacgtcaggaccgccgtcctcgcggcactggagctcggataccgccacctcgataccgcttcgctctaccgctccgaacgtgccgtcggcgacgccgtggccgaggcagcgcggcgcgggatcgtggcgtccagggaggaggtgttcgtgacgaccaagatgtggtgctcgcagtgccacccggatctcgtgctaccttccctcaaggagagcttgcagaaccttcaaatggattatgttgatttgtacctggttcattggccgatagctgcaaagcccggcaagccacagttcccgtttaaaagggaggacatcatgcccatggacctaataggtgtatggcgggcaatggaggaatgccaccggcttggccttgctaggatgattggtgtcagcaatttcacaacaaagaagctccaagagctactggccattgctaaaatccccccgtcagtaaatcaggttgaaatgaatccaatttggcagcagaaaaggttagctgagttctgcaaagacaaaggtattcatttgactgcctattctccgctagcaggccaaagcacgtctaaggtcaatccagtaatgcagtctgaggttctgcaagaggttgcaaaggctagaggaaagtcagtggctcagatttcgctgaggtggatctacgagcaaggcgctagcgtggttgtcaagagtttcggaagggataggctcaaggagaacgtggaaatcttcgattgggaactgaccaatgaagacaggcgtaagattagtcagatacctcagcacaagagggtcacagtgttggggatcctcagcccagacggcgtctccagcgtggatcttgctgagcttgatattgttgaaatgtagcagaaatctccatctatcaggttgcaaggacaaaaaatggtgattggagtagctttcatacggctacgttgaatcagttgcttagatacggccatattgaatcaagaattagaagtagaggacgatctctctacttgtcgtccggacctcattttcttaaaatgtattttcaggtgtctgaccttgtcctgaaatgccatccaggccattactttttagaatgccatttttagatctgtttgatctagcttaaataagttactaggcaaacaaac

SEQ ID NO: 14480 - DNA, 1644 bp, Zea Mays
tttattccctgttgtttttcaggtcatagttttgtgctgctgatgatggtgttaagtgccggtgggctcggccttcttataagtctaaagcatgggtgagcagtgagctgctgccgtaactccaaagctgacaagttttctgtgctgtccaccaagattgtagcatgtagatgagatgtagaggagctagtagcggctaccattacggcaataaagagcccgtaggaaaagcggagggggcagcgagcgggtgctgcataacctgcattcagtctcagggtaccattgcatcccactcggctccacctcgcggcccatatttgatatttcggctatggcagcaaccaggcagctccgggctccggccatggcatcaccaccaaggaatgtcggtaccaggactaccagcaacccggagatcccagagttcctggtgggcccggctggccggccggtgccggccgtggggctcggcacggcatcgttcccgttcgtggaggaaaacgtcaggaccgccgtcctcgcggcactggagctcggataccgccacctcgataccgcttcgctctaccgctccgaacgtgccgtcggcgacgccgtggccgaggcagcgcggcgcgggatcgtggcgtccagggaggaggtgttcgtgacgaccaagatgtggtgctcgcagtgccacccggatctcgtgctaccttccctcaaggagagcttgcagaaccttcaaatggattatgttgatttgtacctggttcattggccgatagctgcaaagcccggcaagccacagttcccgtttaaaagggaggacatcatgcccatggacctaataggtgtatggcgggcaatggaggaatgccaccggcttggccttgctaggatgattggtgtcagcaatttcacaacaaagaagctccaagagctactggccattgctaaaatccccccgtcagtaaatcaggttgaaatgaatccaatttggcagcagaaaaggttagctgagttctgcaaagacaaaggtattcatttgactgcctattctccgctagcaggccaaagcacgtctaaggtcaatccagtaatgcagtctgaggttctgcaagaggttgcaaaggctagaggaaagtcagtggctcagatttcgctgaggtggatctacgagcaaggcgctagcgtggttgtcaagagtttcggaagggataggctcaaggagaacgtggaaatcttcgattgggaactgaccaatgaagacaggcgtaagattagtcagatacctcagcacaagagggtcacagtgttggggatcctcagcccagacggcgtctccagcgtggatcttgctgagcttgatattgttgaaatgtagcagaaatctccatctatcaggttgcaaggacaaaaaatggtgattggagtagctttcatacggctacgttgaatcagttgcttagatacggccatattgaatcaagaattagaagtagaggacgatctctctacttgtcgtccggacctcattttcttaaaatgtattttcaggtgtctgaccttgtcctgaaatgccatccaggccattactttttagaatgccatttttagatctgtttgatctagcttaaataagttactaggcaaacaaac

SEQ ID NO: 14481 - DNA, 1909 bp, Zea Mays
ttcaggtcatagttttgtgctgctgatgatggtgttaagtgccggtgggctcggccttcttataagtctaaagcatgggtgagcagtgagctgctgccgtaactccaaagctgacaagttttctgtgctgtccaccaagattgtagcatgtagatgagatgtagaggagctagtagcggctaccattacggcaataaagagcccgtaggaaaagcggagggggcagcgagcgggtgctgcataacctgcattcagtctcagggtaccattgcatcccactcggctccacctcgcggcccatatttgatatttcggctatggcaggtcattgcgccgtcgtcgtcgtcgttcgcaagcagcaaccaggcagctccgggctccggccatggcatcaccaccaaggaatgtcggtaccaggactaccagcaacccggagatcccagagttcctggtgggcccggctggccggccggtgccggccgtggggctcggcacggcatcgttcccgttcgtggaggaaaacgtcaggaccgccgtcctcgcggcactggagctcggataccgccacctcgataccgcttcgctctaccgctccgaacgtgccgtcggcgacgccgtggccgaggcagcgcggcgcgggatcgtggcgtccagggaggaggtgttcgtgacgaccaagatgtggtgctcgcagtgccacccggatctcgtgctaccttccctcaaggagagcttgcagtaagcgcttgttgagcttaacttttttgctgcttctttttatttgctttcaaataggatggtaacgctctgcggttcaaatttcggttcttgaaaggactagcaacaacaattagatctgaatcttagaaactaaatgcttcgatttcagtctgccagttttgcatttgcagtagctccaagtaccaaatacactaaaatcagtgtttttttgtggcaatcaaggttcttatctcttcatctgtaggaaccttcaaatggattatgttgatttgtacctggttcattggccgatagctgcaaagcccggcaagccacagttcccgtttaaaagggaggacatcatgcccatggacctaataggtgtatggcgggcaatggaggaatgccaccggcttggccttgctaggatgattggtgtcagcaatttcacaacaaagaagctccaagagctactggccattgctaaaatccccccgtcagtaaatcaggttgaaatgaatccaatttggcagcagaaaaggttagctgagttctgcaaagacaaaggtattcatttgactgcctattctccgctagcaggccaaagcacgtctaaggtcaatccagtaatgcagtctgaggttctgcaagaggttgcaaaggctagaggaaagtcagtggctcagatttcgctgaggtggatctacgagcaaggcgctagcgtggttgtcaagagtttcggaagggataggctcaaggagaacgtggaaatcttcgattgggaactgaccaatgaagacaggcgtaagattagtcagatacctcagcacaagagggtcacagtgttggggatcctcagcccagacggcgtctccagcgtggatcttgctgagcttgatattgttgaaatgtagcagaaatctccatctatcaggttgcaaggacaaaaaatggtgattggagtagctttcatacggctacgttgaatcagttgcttagatacggccatattgaatcaagaattagaagtagaggacgatctctctacttgtcgtccggacctcattttcttaaaatgtattttcaggtgtctgaccttgtcctgaaatgccatccaggccattactttttagaatgccatttttagatctgtttgatctagcttaaataagttactaggcaaacaaac

SEQ ID NO: 14482 - DNA, 564 bp, Zea Mays
ttaaagtgtagcagttgttcaaaattctggccacagttcaatttttttaaggctttcaaagatttcgctgaggtggatctacgagcaaggcgctagcgtggttgtcaagagtttcggaagggataggctcaaggagaacgtggaaatcttcgattgggaactgaccaatgaagacaggcgtaagattagtcagatacctcagcacaagagggtcacagtgttggggatcctcagcccagacggcgtctccagcgtggatcttgctgagcttgatattgttgaaatgtagcagaaatctccatctatcaggttgcaaggacaaaaaatggtgattggagtagctttcatacggctacgttgaatcagttgcttagatacggccatattgaatcaagaattagaagtagaggacgatctctctacttgtcgtccggacctcattttcttaaaatgtattttcaggtgtctgaccttgtcctgaaatgccatccaggccattactttttagaatgccatttttagatctgtttgatctagcttaaataagttactaggcaaacaaac

SEQ ID NO: 14483 - DNA, 1531 bp, Zea Mays
ctttaaactatcaaaacagactccctatctcactcaattattttgtttcctattttaaacttctttttgaagacagtacatctacgttacaaaacggtgttatacatgtctttatgcacggcgttgctgtagttggcattatgatctacgagcatcgttacttgaagaagaagaagaaaaaaaagggcatacgaagccgtctaggcccaagctttgtcttgcggtcgtccggcaattgtgtggccgatttcatcctcgtggaggggttgtcaagccctggaaacctcgggaagatccaaaatgttctccctttcaccaaacgctggttttcttttgcgcagacaaagcaagccacggcaagagctccaaattaaacgcacactgttatcacctgtggaagcgtaactggtgacgtcaaaacactactccgatggtaaaagtccccgtcgggtcccatctgctgaatgccaacgcgatgaagtaccgagagctcacacgtcgcctgtccacataccagcacgggctcaaggctctggctcgcgcacccctgtccctccctgttccgcaccgcacacctagactagacgcacctccaactgcagcgcgccatacttgaccgcatcagcatggcatccacggggacgacggcggcggcggtgccggaggtgaccctgcggtcgggcaacggaaagccgatgccgatggtgggcatgggcacggcgtcgttccccgtggtgcacgaggccgtcagggacgccgtgctggcggccatcgaggtggggttccgccacttcgacacggccttcctgtacggcaccgagaagccgctcggcgacgccgtggccgaggcgctgcggcgcggcctcctgaggtcccgggaggagctcttcgtcacgtccaagctgtggtgttcgcagacccacgcggacctcgtgctgccgtccctgcgggaaactctcgagaacctgcagatggagtacgtggacctgtacctgatccactggccggtgtgcctcaggccggccggcgggccgcccaagttcccgaacaggaaggaggacgcggtgccgctggacgtggcgggcgtgtggcgcgccatggaggagtgccagcggcttgttctcgcaggagggtgagttcacgtccgttgatccagcggaactgaatattgtggaggaataggaactggactggaaaatggcccccgcctgtcggtgttgctccgtataggaacatacgaataataaggcaacgttcgccctcggtgtttcgggggtgtattccacgatgttttccatccccgttcagttcagtaaagattgtgatcgtataatattgaggacttctttggaacggtcgagctatagtacatggttccgtaaactttgtatgaattttctgatctaaataaagtggggttttacgaacaactacgtttccgtgtatatttgagtatagagtataaaacataaatatatgtgtgttttgttggttagttaggtgtgaatataagtttagagccaataactat

SEQ ID NO: 14484 - DNA, 1803 bp, Zea Mays
atggcgccatgtctcccagccggcctcctctacccaacgccaccccttcctttccccaggcgcagaaagctctcccccacgcagtccagctccaggccagacccaattcgcccaacccctgctcgcccagagctttttcgccccaaatccggccatccctgccttgccgtggagttcctcgagcagccccacctggccaccatcctccccagccgaaccctttctccatggccgccaatcgtcctactcctttcccctggtgtgctcgacgcctggtgcttcgatctcgacggcttcccctgcgagcgacacctctgctcggctccctctccctgcagcgagctcctctgtcggcgccggcccacagcagcagggagcctcccatggtgtttgtttccccaacgctcgccccatcaatagccgtcgacctcgcgcagcagcagcgacgccctccgttgcgtcgcgctcgccaagtcgggcctcacgccgtcgctctgcgcagcgtttctgcgtgtcgtcaaaacccatggtgagaccttgctgtcccgcgtttctcatgttcaataaaatgaccgcactaataaaatgtgtaataattgtgtatgtcgtttaatcgcagcatgtgtcgtcgtcgcgcttcgcgcgtcgtttctctacaggaagccaaatcaacatgcatgcatgcacaactccacttgggtttcagccaggttgttcgctttagaaaaattgtggtttttgttttatttacgatttagtcgatgacgtaaatatgtgtatgaaaatataattgtatgaataaacgcgtgtagagaagaaactgaagtagaaaagaactcggacatttttatatttgataggaaaaatatgcgatgcgttgtttaaatgcgaaaactaagttacaaaatgcggattttgttttgggaaatgcatcgatatgtgtttatgtgaaaagtgtatttgttttatgcaacgtgatgagattcgtaattatatcggggatatatttattgatgtgacgagtagtttagaaaatgctagttgcgtggacgatgtattgttaagacatgagtatcggagttcatatagtagtgattgcgttaatttaatcgaagtgtctcgagtgcacgccacaatatggttgtatgcgagacatggtaaaataagtgtgctcgacatgaatgattggtcgttgtagatagaagctgtcttggcttaaatagagaagtggtgacatgccaaagtagtcatcgctttctctataattataagtcgagtcgtgacgatgtgtttatacgttcgttaaattatgcttcaaatataatgtacgattgtgctcacgatttcgagtagacgcttcaagtaagtcaagtagatacaacggtgtaatggagttagttgtcttaggataaatattgaaatactcggttcgtatgataaatatgtatgcgttcgtaattcgggaagtaaatgcatggtgtttgcaaattgtagattagtggtttacggttcgtataaattggtcgatgtgcgaaaatacttgtgaatctgtgtgtttataaaaatattgtagtatatgttgtgtctcggattgcgacgataataggtaagccgacgtgtatgttatttaacgactatgtcgttgctctagttagccaaactgttagatggctttggttaagctcgtaatcacgataatttgcttgttttggtctagacgcgcatggttatggtcgcgggtaaaattagtggtgttcatgtgatgtctaaataaaaaaaatgcaaattaatgtgtgaagggcg

SEQ ID NO: 14485 - DNA, 4143 bp, Zea Mays
caaccgtcatcgaactcgtagggagagccagagggacacgatcacacgagactccgagaggaccggagagccggaccggagggtttctcttcccccgccgagacagacaagtactccaccacacacacacacgcgcctcccctcacgaaattcacaaacccaccggaggcacagaaatttcccagcgaaggaaaaatccagtccgaaatccagcgctccaaatccgttcgtccccaaggcgctcccccgaacccgtcccgaatcccgcaaatccccgctgaaattccccaatcctccgtgctcgccgccgccctgcgaccggtcccgcccgcctcgtgtcggagccgctgccgcggatttccgcccgagggtttcgtctcgctctcgctctctccgccctactgccgccacagattggcgcgaccgacccttcatcgagggccttcttccgcccgcgaggccggggctcctcccgcggaaattcactctcgtccagaagcggcggcgctctcctcttcatcgccgcccccgcgctcttctggtactcgagtggcgtggggtggagatccaccagggcgtggatccattcctcttcgttcggtggtttttatccttcaggcgcggaatatcaatctatagaggtgcacgaggactttatatatccccatattttcgggggttcaactgaacccccatgccccacgctaagtccgcccctggtggtggtggactggattggtggacagtgctgattttgtcgcgggcatggagcgaagtgagccctcgctgaagccagaatggctgctgcggcccacagtacctgccacaacctataagccggcgactttgccccacacagatgatcacggcagaggtgcttcgtcaagaaaccgttcatcaggacgagatcgtgatcggagctcccaacattcctcatctcggagaggttcaagctctagtggtccaaggcggaatgatcgagatggtatagggaaatcaagaggctatggtaattttggaaagcacaacaaggaaaggatacaagagaaggacctggatttccgtgaccgggagagtaggttggttcagtcagacgatcctttacgtgatggctttgagtcatttagctcatgcagatccgaaaaggacaggcttaaccgtactcgttcaaaggtggccatatcaaatcgggcagtaggagtaagtttagacaatggtaatgtatctaaaaaagataatggtgtcatctcttttgagcgggaattcccacaccttgattctgaggacaaaaatggaaagcaagacataggtcgagttccatctcctggaattagcaccccaattcagaacataccactggtagtatctgatggctggaattcagtgcttgcgatgttaggggatccaaacattaactctgtttcctcttcctcaacacatgctggttctagtaaacagactgaagtttccaactctgggagtgcgttaagcatggctgaaacagtgatgcagtcgccattaaagatttctaccacacctcagttatcgattgatgcccagaagattgaagaaagaactatgaggcagtgcattctaagacctcttacaccatcatcaaacaaaatacctgcctggcacagtggtgagaagccttcccactgagccgaaggtcctggggtcgacgcagcctctctgcaaaatgcaggggcatctagttctttggataagttattaaaatccaaaggtgcaagagctggagagtctaatggtcctatcaaggttgctccacaactgtcaacacagccatctagcaactctgttcgcactccagtcaaaactgagctcgtaaagcaatctcaatcaggcagccttcaagtccttagtcgcgagcagaatggtgctgtaaatactgctgccaaagacagcaccagcaatcctgtgagccctgttctgggtcgatcttcttcaatggaaccgatgagaaagtctattgtcagcccaaagcttaaggttggcactaatggtcgttctttgcatccgctgcaaggttcatttgctgacagaaaagcaagtgcaaaagacaagtacaagttttttgagatgttgcggagtaagtctgtaaatggttcgagcgctgctattgagtctccatcaagcctgactgatgatcagcagaactctaatcttgatttgcctttcaagtttattgaaaatgggagcagttcctgtgaagaagcaaattcttgtgagggatcacagcgacacttgtcggacaatgagaccattccaccttcagaatctcatgatgttttagatgaaggatctctgggtattcaagttgaggacaaggatgtcagctcttcacaagtacttggtggcacacaagatttatcttctaagaagccccaggaagacaatgttaatattgtgcccatcgtacctgtctatgtaaatgatggtttaatgatgcccaattctgttgatgatgaagcaagtttgccgttagaggaaaccaatcctgccgaagtgttacagcacattggagcaggggaggagaatccctgtcctgctcaagagttcgagtccattggagcaggtggggaggaagagttgaacctcctaagatctatgggctgggatgagaacgaagatgttcagcctcttcagcaggaggagattgctgattgtctaaagcagaacgtcaggctgcagcagaagcttcaagaatgcaagggctgatcgcagaatcaatggagcaacgtcactgtgcctcaccacactgagggggtgtttgatacctgggctaaagtttagtccaggttttggatgccaaatgggaggactaaacatgagctgattataaaactaattacataaacagtggctaattcgcgaaacaaatctatttggcctaattagtctactattagcacttgtttactgtagcaaaacatgagctaattatagattaattatgcttgataaattgtctcgtgaattagcaaaaacctgtacaattagctctataattagatcatgttcagttctcctaattggcatccaaaacccagaccaaaccttagtcccggggatgatccaaacacatgtggagctgggttttgggaccttccggtcaaccgatcagagaatgattgtctagcttagcaaatggagagttttgtttttgttaatgcttgttcagcattgtggggggaggttccatggtagagctgataattttcccccattgataagaggttttagggtttttcttcctcattttcccagaaggaatacaccaaatagaagccttgtctggtgtcggaggcacgtagtgtgtgttgctctgaaagaagaataggttgcctttcttttggtcgccatctttttttcttttgaaaaggaagggaaaaataacgatcgagcttaacatggaaaaggtgcacaggaaataccttggtcttcaatcttttgcttgcctcgcgattttcaaacgttaccttttgctgtcttgtatccatttcttcgatttaggccctgttcaccttttttttaagcttatggccaccagaagctggtgtagacagctaaagtccagtttttcagtccgcagtccgcttctatgtaaatcattttagtcgtcagaaccgtctaaaattaacttgaacatcaaatcgatcgactcgtccgtgtgatagtagaaaaaccgtaactttctatattttaaactctgtaattttctatattctaaactctatgaactcttttatcttcttgtgcatgtaatctagacattctgaactctttcatcttcttccgtgtgtactctagacattcagcatcctcccatttgactactactatacgatctacggtatctggaggcctgatgccaaatttcaaattggaacaaattttgttaggctaaagctctaatctgatattctgatgtgataccgaatttcaacgtgaatacattttgttatggctatagctctgatcctattgaatgacattgaggtctgttctgctcctagggcgacctagacggttgaagtcttttgggggtgctcgtacacattgctccggagaaccagaagccatcacgcagtggagtaaccacatgatatacgataaaaaata

SEQ ID NO: 14486 - DNA, 4060 bp, Zea Mays
gtcatcgaactcgtagggagagccagagggacacgatcacacgagactccgagaggaccggagagccggaccggagggtttctcttcccccgccgagacagacaagtactccaccacacacacacacgcgcctcccctcacgaaattcacaaacccaccggaggcacagaaatttcccagcgaaggaaaaatccagtccgaaatccagcgctccaaatccgttcgtccccaaggcgctcccccgaacccgtcccgaatcccgcaaatccccgctgaaattccccaatcctccgtgctcgccgccgccctgcgaccggtcccgcccgcctcgtgtcggagccgctgccgcggatttccgcccgagggtttcgtctcgctctcgctctctccgccctactgccgccacagattggcgcgaccgacccttcatcgagggccttcttccgcccgcgaggccggggctcctcccgcggaaattcactctcgtccagaagcggcggcgctctcctcttcatcgccgcccccgcgctcttctggtactcgagtggcgtggggtggagatccaccagggcgtggatccattcctcttcgttcggtggtttttatccttcaggcgcggaatatcaatctatagaggtgcacgaggactttatatatccccatattttcgggggttcaactgaacccccatgccccacgctaagtccgcccctggtggtggtggactggattggtggacagtgctgattttgtcgcgggcatggagcgaagtgagccctcgctgaagccagaatggctgctgcggcccacagtacctgccacaacctataagccggcgactttgccccacacagatgatcacggcagaggtgcttcgtcaagaaaccgttcatcaggacgagatcgtgatcggagctcccaacattcctcatctcggagaggttcaagctctagtggtccaaggcggaatgatcgagatggtatagggaaatcaagaggctatggtaattttggaaagcacaacaaggaaaggatacaagagaaggacctggatttccgtgaccgggagagtaggttggttcagtcagacgatcctttacgtgatggctttgagtcatttagctcatgcagatccgaaaaggacaggcttaaccgtactcgttcaaaggtggccatatcaaatcgggcagtaggagtaagtttagacaatggtaatgtatctaaaaaagataatggtgtcatctcttttgagcgggaattcccacaccttgattctgaggacaaaaatggaaagcaagacataggtcgagttccatctcctggaattagcaccccaattcagaacataccactggtagtatctgatggctggaattcagtgcttgcgatgttaggggatccaaacattaactctgtttcctcttcctcaacacatgctggttctagtaaacagactgaagtttccaactctgggagtgcgttaagcatggctgaaacagtgatgcagtcgccattaaagatttctaccacacctcagttatcgattgatgcccagaagattgaagaaagaactatgaggcagtgcattctaagacctcttacaccatcatcaaacaaaatacctgcatctagttctttggataagttattaaaatccaaaggtgcaagagctggagagtctaatggtcctatcaaggttgctccacaactgtcaacacagccatctagcaactctgttcgcactccagtcaaaactgagctcgtaaagcaatctcaatcaggcagccttcaagtccttagtcgcgagcagaatggtgctgtaaatactgctgccaaagacagcaccagcaatcctgtgagccctgttctgggtcgatcttcttcaatggaaccgatgagaaagtctattgtcagcccaaagcttaaggttggcactaatggtcgttctttgcatccgctgcaaggttcatttgctgacagaaaagcaagtgcaaaagacaagtacaagttttttgagatgttgcggagtaagtctgtaaatggttcgagcgctgctattgagtctccatcaagcctgactgatgatcagcagaactctaatcttgatttgcctttcaagtttattgaaaatgggagcagttcctgtgaagaagcaaattcttgtgagggatcacagcgacacttgtcggacaatgagaccattccaccttcagaatctcatgatgttttagatgaaggatctctgggtattcaagttgaggacaaggatgtcagctcttcacaagtacttggtggcacacaagatttatcttctaagaagccccaggaagacaatgttaatattgtgcccatcgtacctgtctatgtaaatgatggtttaatgatgcccaattctgttgatgatgaagcaagtttgccgttagaggaaaccaatcctgccgaagtgttacagcacattggagcaggggaggagaatccctgtcctgctcaagagttcgagtccattggagcaggtggggaggaagagttgaacctcctaagatctatgggctgggatgagaacgaagatgttcagcctcttcagcaggaggagattgctgattgtctaaagcagaacgtcaggctgcagcagaagcttcaagaatgcaagggctgatcgcagaatcaatggagcaacgtcactgtgcctcaccacactgagggggtgtttgatacctgggctaaagtttagtccaggttttggatgccaaatgggaggactaaacatgagctgattataaaactaattacataaacagtggctaattcgcgaaacaaatctatttggcctaattagtctactattagcacttgtttactgtagcaaaacatgagctaattatagattaattatgcttgataaattgtctcgtgaattagcaaaaacctgtacaattagctctataattagatcatgttcagttctcctaattggcatccaaaacccagaccaaaccttagtcccggggatgatccaaacacatgtggagctgggttttgggaccttccggtcaaccgatcagagaatgattgtctagcttagcaaatggagagttttgtttttgttaatgcttgttcagcattgtggggggaggttccatggtagagctgataattttcccccattgataagaggttttagggtttttcttcctcattttcccagaaggaatacaccaaatagaagccttgtctggtgtcggaggcacgtagtgtgtgttgctctgaaagaagaataggttgcctttcttttggtcgccatctttttttcttttgaaaaggaagggaaaaataacgatcgagcttaacatggaaaaggtgcacaggaaataccttggtcttcaatcttttgcttgcctcgcgattttcaaacgttaccttttgctgtcttgtatccatttcttcgatttaggccctgttcaccttttttttaagcttatggccaccagaagctggtgtagacagctaaagtccagtttttcagtccgcagtccgcttctatgtaaatcattttagtcgtcagaaccgtctaaaattaacttgaacatcaaatcgatcgactcgtccgtgtgatagtagaaaaaccgtaactttctatattttaaactctgtaattttctatattctaaactctatgaactcttttatcttcttgtgcatgtaatctagacattctgaactctttcatcttcttccgtgtgtactctagacattcagcatcctcccatttgactactactatacgatctacggtatctggaggcctgatgccaaatttcaaattggaacaaattttgttaggctaaagctctaatctgatattctgatgtgataccgaatttcaacgtgaatacattttgttatggctatagctctgatcctattgaatgacattgaggtctgttctgctcctagggcgacctagacggttgaagtcttttgggggtgctcgtacacattgctccggagaaccagaagccatcacgcagtggagtaaccacatgatatacgataaaaaata

SEQ ID NO: 14487 - DNA, 2553 bp, Zea Mays
cacacacgcgcctcccctcacgaaattcacaaacccaccggaggcacagaaatttcccagcgaaggaaaaatccagtccgaaatccagcgctccaaatccgttcgtccccaaggcgctcccccgaacccgtcccgaatcccgcaaatccccgctgaaattccccaatcctccgtgctcgccgccgccctgcgaccggtcccgcccgcctcgtgtcggagccgctgccgcggatttccgcccgagggtttcgtctcgctctcgctctctccgccctactgccgccacagattggcgcgaccgacccttcatcgagggccttcttccgcccgcgaggccggggctcctcccgcggaaattcactctcgtccagaagcggcggcgctctcctcttcatcgccgcccccgcgctcttctggtactcgagtggcgtggggtggagatccaccagggcgtggatccattcctcttcgttcggtggtttttatccttcaggcgcggaatatcaatctatagaggtgcacgaggactttatatatccccatattttcgggggttcaactgaacccccatgccccacgctaagtccgcccctggtggtggtggactggattggtggacagtgctgattttgtcgcgggcatggagcgaagtgagccctcgctgaagccagaatggctgctgcggcccacagtacctgccacaacctataagccggcgactttgccccacacagatgatcacggcagaggtgcttcgtcaagaaaccgttcatcaggacgagatcgtgatcggagctcccaacattcctcatctcggagaggttcaagctctagtggtccaaggcggaatgatcgagatggtatagggaaatcaagaggctatggtaattttggaaagcacaacaaggaaaggatacaagagaaggacctggatttccgtgaccgggagagtaggttggttcagtcagacgatcctttacgtgatggctttgagtcatttagctcatgcagatccgaaaaggacaggcttaaccgtactcgttcaaaggtggccatatcaaatcgggcagtaggagtaagtttagacaatggtaatgtatctaaaaaagataatggtgtcatctcttttgagcgggaattcccacaccttgattctgaggacaaaaatggaaagcaagacataggtcgagttccatctcctggaattagcaccccaattcagaacataccactggtagtatctgatggctggaattcagtgcttgcgatgttaggggatccaaacattaactctgtttcctcttcctcaacacatgctggttctagtaaacagactgaagtttccaactctgggagtgcgttaagcatggctgaaacagtgatgcagtcgccattaaagatttctaccacacctcagttatcgattgatgcccagaagattgaagaaagaactatgaggcagtgcattctaagacctcttacaccatcatcaaacaaaatacctgcatctagttctttggataagttattaaaatccaaaggtgcaagagctggagagtctaatggtcctatcaaggttgctccacaactgtcaacacagccatctagcaactctgttcgcactccagtcaaaactgagctcgtaaagcaatctcaatcaggcagccttcaagtccttagtcgcgagcagaatggtgctgtaaatactgctgccaaagacagcaccagcaatcctgtgagccctgttctgggtcgatcttcttcaatggaaccgatgagaaagtctattgtcagcccaaagcttaaggttggcactaatggtcgttctttgcatccgctgcaaggttcatttgctgacagaaaagcaagtgcaaaagacaagtacaagttttttgagatgttgcggagtaagtctgtaaatggttcgagcgctgctattgagtctccatcaagcctgactgatgatcagcagaactctaatcttgatttgcctttcaagtttattgaaaatgggagcagttcctgtgaagaagcaaattcttgtgagggatcacagcgacacttgtcggacaatgagaccattccaccttcagaatctcatgatgttttagatgaaggatctctgggtattcaagttgaggacaaggatgtcagctcttcacaagtacttggtggcacacaagatttatcttctaagaagccccaggaagacaatgttaatattgtgcccatcgtacctgtctatgtaaatgatggtttaatgatgcccaattctgttgatgatgaagcaagtttgccgttagaggaaaccaatcctgccgaagtgttacagcacattggagcaggggaggagaatccctgtcctgctcaagagttcgagtccattggagcaggtggggaggaagagttgaacctcctaagatctatgggctgggatgagaacgaagatgttcagcctcttcagcaggaggagattgctgattgttgcatattactgaagcgatgattactggagttgtaaatcttaccatttccaccaccttttccttttat

SEQ ID NO: 14488 - DNA, 3808 bp, Zea Mays
ttcacaaacccaccggaggcacagaaatttcccagcgaaggaaaaatccagtccgaaatccagcgctccaaatccgttcgtccccaaggcgctcccccgaacccgtcccgaatcccgcaaatccccgctgaaattccccaatcctccgtgctcgccgccgccctgcgaccggtcccgcccgcctcgtgtcggagccgctgccgcggatttccgcccgagggtttcgtctcgctctcgctctctccgccctactgccgccacagattggcgcgaccgacccttcatcgagggccttcttccgcccgcgaggccggggctcctcccgcggaaattcactctcgtccagaagcggcggcgctctcctcttcatcgccgcccccgcgctcttctggtactcgagtggcgtggggtggagatccaccagggcgtggatccattcctcttcgttcggtggcgcggaatatcaatctatagaggtgcacgaggactttatatatccccatattttcgggggttcaactgaacccccatgccccacgctaagtccgcccctggtggtggtggactggattggtggacagtgctgattttgtcgcgggcatggagcgaagtgagccctcgctgaagccagaatggctgctgcggcccacagtacctgccacaacctataagccggcgactttgccccacacagatgatcacggcagaggtgcttcgtcaagaaaccgttcatcaggacgagatcgtgatcggagctcccaacattcctcatctcggagaggttcaagctctagtggtccaaggcggaatgatcgagatggtatagggaaatcaagaggctatggtaattttggaaagcacaacaaggaaaggatacaagagaaggacctggatttccgtgaccgggagagtaggttggttcagtcagacgatcctttacgtgatggctttgagtcatttagctcatgcagatccgaaaaggacaggcttaaccgtactcgttcaaaggtggccatatcaaatcgggcagtaggagtaagtttagacaatggtaatgtatctaaaaaagataatggtgtcatctcttttgagcgggaattcccacaccttgattctgaggacaaaaatggaaagcaagacataggtcgagttccatctcctggaattagcaccccaattcagaacataccactgtaaacagactgaagtttccaactctgggagtgcgttaagcatggctgaaacagtgatgcagtcgccattaaagatttctaccacacctcagttatcgattgatgcccagaagattgaagaaagaactatgaggcagtgcattctaagacctcttacaccatcatcaaacaaaatacctgcatctagttctttggataagttattaaaatccaaaggtgcaagagctggagagtctaatggtcctatcaaggttgctccacaactgtcaacacagccatctagcaactctgttcgcactccagtcaaaactgagctcgtaaagcaatctcaatcaggcagccttcaagtccttagtcgcgagcagaatggtgctgtaaatactgctgccaaagacagcaccagcaatcctgtgagccctgttctgggtcgatcttcttcaatggaaccgatgagaaagtctattgtcagcccaaagcttaaggttggcactaatggtcgttctttgcatccgctgcaaggttcatttgctgacagaaaagcaagtgcaaaagacaagtacaagttttttgagatgttgcggagtaagtctgtaaatggttcgagcgctgctattgagtctccatcaagcctgactgatgatcagcagaactctaatcttgatttgcctttcaagtttattgaaaatgggagcagttcctgtgaagaagcaaattcttgtgagggatcacagcgacacttgtcggacaatgagaccattccaccttcagaatctcatgatgttttagatgaaggatctctgggtattcaagttgaggacaaggatgtcagctcttcacaagtacttggtggcacacaagatttatcttctaagaagccccaggaagacaatgttaatattgtgcccatcgtacctgtctatgtaaatgatggtttaatgatgcccaattctgttgatgatgaagcaagtttgccgttagaggaaaccaatcctgccgaagtgttacagcacattggagcaggggaggagaatccctgtcctgctcaagagttcgagtccattggagcaggtggggaggaagagttgaacctcctaagatctatgggctgggatgagaacgaagatgttcagcctcttcagcaggaggagattgctgattgtctaaagcagaacgtcaggctgcagcagaagcttcaagaatgcaagggctgatcgcagaatcaatggagcaacgtcactgtgcctcaccacactgagggggtgtttgatacctgggctaaagtttagtccaggttttggatgccaaatgggaggactaaacatgagctgattataaaactaattacataaacagtggctaattcgcgaaacaaatctatttggcctaattagtctactattagcacttgtttactgtagcaaaacatgagctaattatagattaattatgcttgataaattgtctcgtgaattagcaaaaacctgtacaattagctctataattagatcatgttcagttctcctaattggcatccaaaacccagaccaaaccttagtcccggggatgatccaaacacatgtggagctgggttttgggaccttccggtcaaccgatcagagaatgattgtctagcttagcaaatggagagttttgtttttgttaatgcttgttcagcattgtggggggaggttccatggtagagctgataattttcccccattgataagaggttttagggtttttcttcctcattttcccagaaggaatacaccaaatagaagccttgtctggtgtcggaggcacgtagtgtgtgttgctctgaaagaagaataggttgcctttcttttggtcgccatctttttttcttttgaaaaggaagggaaaaataacgatcgagcttaacatggaaaaggtgcacaggaaataccttggtcttcaatcttttgcttgcctcgcgattttcaaacgttaccttttgctgtcttgtatccatttcttcgatttaggccctgttcaccttttttttaagcttatggccaccagaagctggtgtagacagctaaagtccagtttttcagtccgcagtccgcttctatgtaaatcattttagtcgtcagaaccgtctaaaattaacttgaacatcaaatcgatcgactcgtccgtgtgatagtagaaaaaccgtaactttctatattttaaactctgtaattttctatattctaaactctatgaactcttttatcttcttgtgcatgtaatctagacattctgaactctttcatcttcttccgtgtgtactctagacattcagcatcctcccatttgactactactatacgatctacggtatctggaggcctgatgccaaatttcaaattggaacaaattttgttaggctaaagctctaatctgatattctgatgtgataccgaatttcaacgtgaatacattttgttatggctatagctctgatcctattgaatgacattgaggtctgttctgctcctagggcgacctagacggttgaagtcttttgggggtgctcgtacacattgctccggagaaccagaagccatcacgcagtggagtaaccacatgatatacgataaaaaata

SEQ ID NO: 14489 - DNA, 1426 bp, Zea Mays
cttaacccctgcaggcatgtggcctgtgctatctaccgttacacggcgagctacagagttgtcgccacaacattgtagtgtccgcagaggatggtgccgacatggcaagataaaatcctggtccagcaagatccgttcttccaaatgggatcaggtgattggctccagctcctcctcccctcagcaccaccagtccccctctgctcctcctttcagtctcagcccaatgacaaagttctaagcagagtagtgcacgggcagcacggcaacggcatagcacctccctccaccgatcatccagttccgcttgcgtaacgacttcccttcgcaagcaagcttcccgttcagcccacccgcaggccgccgtgctcgcgcgaccatggcgttgctctccgccacttcgcccgccaaggcgcacctctcggcgctcctctcctgccacgacgagccgcagcagcaccaacacgcgctcccggtcccgcacccgcgctgcttcggcggcggcaaggccaggcggcgcgcgcggggcaggtgcgcggcgtcaatgcggccgcccgacgcgtccgtcgctcccgcgtccgcgcccgcgggcgaggcgcggcggaagaagaagccccgggtgctggtggccggcggcggcatcggcgggctggtgttcgcgctggcggcgcggcgcaaggggtacgacgtgacggtgttcgagcgcgacatgagcgcggtgcgcggggagggccagtaccgcgggcccatccagatccagagcaacgcgctggccgcgctggaggccatcgacatgtccgtcgccgaggaggtcatgcgcgtcgggtgcgtcaccggcgaccgcatcaacggcctcgtcgacggcatgtccggctcctggtacatcaagtttgatacgtttactcctgcagctgagcgggggctcccggtcacaagggtcattagccgcatgacgctgcaacagatccttgctcgagcagttggcgatgacgctatattgaatggaagccatgtagtcgattttacagatgatggcagtaaggttactgccatattggaggacggtaggatatttgaaggtgaccttttggttggtgccgatggaatatggtcaaaggtgaggaagacactattcgggcactcagatgccacctattcaggttacacctgctacactggaattgcagattttgtgccgcctgatatcgatacggttgggtaccgggtatttctgggccacaaacagtacttcgtctcttcggatgtcggtgccggtaaaatgcaatggtatgcttttcacaaggaagaggctggtggcactgaccctgagaacggtgagtgcttagagaagttttcaagcttaactagtgaaataggcactgcctcattgtaagttgtgatgaaaaatgagaacaaaacttctcac

SEQ ID NO: 14490 - DNA, 1323 bp, Zea Mays
attgtagtgtccgcagaggatggtgccgacatggcaagataaaatcctggtccagcaagatccgttcttccaaatgggatcaggtgattggctccagctcctcctcccctcagcaccaccagtccccctctgctcctcctttcagtctcagcccaatgacaaagttctaagcagagtagtgcacgggcagcacggcaacggcatagcacctccctccaccgatcatccagttccgcttgcgtaacgacttcccttcgcaagcaagcttcccgttcagcccacccgcaggccgccgtgctcgcgcgaccatggcgttgctctccgccacttcgcccgccaaggcgcacctctcggcgctcctctcctgccacgacgagccgcagcagcaccaacacgcgctcccggtcccgcacccgcgctgcttcggcggcggcaaggccaggcggcgcgcgcggggcaggtgcgcggcgtcaatgcggccgcccgacgcgtccgtcgctcccgcgtccgcgcccgcgggcgaggcgcggcggaagaagaagccccgggtgctggtggccggcggcggcatcggcgggctggtgttcgcgctggcggcgcggcgcaaggggtacgacgtgacggtgttcgagcgcgacatgagcgcggtgcgcggggagggccagtaccgcgggcccatccagatccagagcaacgcgctggccgcgctggaggccatcgacatgtccgtcgccgaggaggtcatgcgcgtcgggtgcgtcaccggcgaccgcatcaacggcctcgtcgacggcatgtccggctcctgctgagcgggggctcccggtcacaagggtcattagccgcatgacgctgcaacagatccttgctcgagcagttggcgatgacgctatattgaatggaagccatgtagtcgattttacagatgatggcagtaaggttactgccatattggaggacggtaggatatttgaaggtgaccttttggttggtgccgatggaatatggtcaaaggtgaggaagacactattcgggcactcagatgccacctattcaggttacacctgctacactggaattgcagattttgtgccgcctgatatcgatacggttgggtaccgggtatttctgggccacaaacagtacttcgtctcttcggatgtcggtgccggtaaaatgcaatggtatgcttttcacaaggaagaggctggtggcactgaccctgagaacggtgagtgcttagagaagttttcaagcttaactagtgaaataggcactgcctcattgtaagttgtgatgaaaaatgagaacaaaacttctcac

SEQ ID NO: 14491 - DNA, 1016 bp, Zea Mays
attgtagtgtccgcagaggatggtgccgacatggcaagataaaatcctggtccagcaagatccgttcttccaaatgggatcaggtgattggctccagctcctcctcccctcagcaccaccagtccccctctgctcctcctttcagtctcagcccaatgacaaagttctaagcagagtagtgcacgggcagcacggcaacggcatagcacctccctccaccgatcatccagttccgcttgcgtaacgacttcccttcgcaagcaagcttcccgttcagcccacccgcaggccgccgtgctcgcgcgaccatggcgttgctctccgccacttcgcccgccaaggcgcacctctcggcgctcctctcctgccacgacgagccgcagcagcaccaacacgcgctcccggtcccgcacccgcgctgcttcggcggcggcaaggccaggcggcgcgcgcggggcaggtgcgcggcgtcaatgcggccgcccgacgcgtccgtcgctcccgcgtccgcgcccgcgggcgaggcgcggcggaagaagaagccccgggtgctggtggccggcggcggcatcggcgggctggtgttcgcgctggcggcgcggcgcaaggggtacgacgtgacggtgttcgagcgcgacatgagcgcggtgcgcggggagggccagtaccgcgggcccatccagatccagagcaacgcgctggccgcgctggaggccatcgacatgtccgtcgccgaggaggtcatgcgcgtcgggtgcgtcaccggcgaccgcatcaacggcctcgtcgacggcatgtccggctcctggtaccgggtatttctgggccacaaacagtacttcgtctcttcggatgtcggtgccggtaaaatgcaatggtatgcttttcacaaggaagaggctggtggcactgaccctgagaacggtgagtgcttagagaagttttcaagcttaactagtgaaataggcactgcctcattgtaagttgtgatgaaaaatgagaacaaaacttctcac

SEQ ID NO: 14492 - DNA, 2151 bp, Zea Mays
attgtagtgtccgcagaggatggtgccgacatggcaagataaaatcctggtccagcaagatccgttcttccaaatgggatcaggtgattggctccagctcctcctcccctcagcaccaccagtccccctctgctcctcctttcagtctcagcccaatgacaaagttctaagcagagtagtgcacgggcagcacggcaacggcatagcacctccctccaccgatcatccagttccgcttgcgtaacgacttcccttcgcaagcaagcttcccgttcagcccacccgcaggccgccgtgctcgcgcgaccatggcgttgctctccgccacttcgcccgccaaggcgcacctctcggcgctcctctcctgccacgacgagccgcagcagcaccaacacgcgctcccggtcccgcacccgcgctgcttcggcggcggcaaggccaggcggcgcgcgcggggcaggtgcgcggcgtcaatgcggccgcccgacgcgtccgtcgctcccgcgtccgcgcccgcgggcgaggcgcggcggaagaagaagccccgggtgctggtggccggcggcggcatcggcgggctggtgttcgcgctggcggcgcggcgcaaggggtacgacgtgacggtgttcgagcgcgacatgagcgcggtgcgcggggagggccagtaccgcgggcccatccagatccagagcaacgcgctggccgcgctggaggccatcgacatgtccgtcgccgaggaggtcatgcgcgtcgggtgcgtcaccggcgaccgcatcaacggcctcgtcgacggcatgtccggctcctggatggttaccagctggccgtagaactagagaatgcctggcaagagagtgtcaagactggaactcctatggacatagtttcctccttgagacgttatgagaaagagagaagggtgcgtgttgctgttatacatggactggcaagaatggcagcaatcatggctaccacctatagaccgtatttgggtgttggtctaggacctttatcgtttttgaccaagttgcggataccacaccctggaagggttggtggcagattcttcatcaagtatggaatgcctgctatgctgagctgggtgcttggtggcaatagctcaaagctagaaggaagacctttaagctgccgactttctgacaaggcacatgacgagctttatcggtggtttgacgatgacgatgcgctggaacaagctatgggtggagaatggtacctcttcgcaacaagtgaagcaaacaacaatagcttgcagcagcccattcgtttaattagggatgagcagaggtcactctctgttggcagccggtcagatgctaatgactcagcttcttccctatcattgccctttccacagatatcagaaaggcatgctactatcacgtgcaagaataaggctttctatctgactgatctcgggagtgaacatggtacctggattaccgacaatgaaggtagacgttaccgcgtgccaccaaacttcccggttcgtttccatccttccgatgtcattgagtttggttccgataagaaggctatgttccgggtgaaggtgctgaacacgctcccatacgaatcagcaagaagtgggaagcagcaggggctgcagcaagagcaagtcctccaggcagcatgaatggagacaccagtcaccatcccatcatcagcgacactgtactgtatagcaatcgggagatacacgatactccaacgcgtaaaaaagcgtaaaagatacgtcaaaacagatgtgatttttgcatccatgcagatgcgaaacaggattttgaatcctagcacctaacggatttaaatgatgaagtttcagttctacgagaggaactgagttgtacgatagggataacttagctgttgtcggactgtgtacattgttggtatcatcacccaaaatattgtacatctagaagccatattgtaattacggcacgtatacagtaacactttgatcatgtaatacagtatatagttgtttacggcacgtatactttgatcatgtaatacagtatatctggcgctgagtcagatagggtatgatttgttcttccaccagcgccagtttcttgaactgctggattttctttgaaattcatgcagaataaaaaaactataaaa

SEQ ID NO: 14493 - DNA, 642 bp, Zea Mays
agctgcagagcaacgcgctcgccgcgctcgaggccgtcgacgccgccgcggccgacgaggtcatggacgccggctgcgtcacgggggaccgcgtcaacggcatcgttgacggcgtttctggctcctgctgagcgggggctcccggtcacaagggtcattagccgcatgacgctgcaacagatccttgctcgagcagttggcgatgacgctatattgaatggaagccatgtagtcgattttacagatgatggcagtaaggttactgccatattggaggacggtaggatatttgaaggtgaccttttggttggtgccgatggaatatggtcaaaggtgaggaagacactattcgggcactcagatgccacctattcaggttacacctgctacactggaattgcagattttgtgccgcctgatatcgatacggttgggtaccgggtatttctgggccacaaacagtacttcgtctcttcggatgtcggtgccggtaaaatgcaatggtatgcttttcacaaggaagaggctggtggcactgaccctgagaacggtgagtgcttagagaagttttcaagcttaactagtgaaataggcactgcctcattgtaagttgtgatgaaaaatgagaacaaaacttctcac

SEQ ID NO: 14494 - DNA, 563 bp, Zea Mays
ctcgaggccgtcgacgccgccgcggccgacgaggtcatggacgccggctgcgtcacgggggaccgcgtcaacggcatcgttgacggcgtttctggctcctgatccttgctcgagcagttggcgatgacgctatattgaatggaagccatgtagtcgattttacagatgatggcagtaaggttactgccatattggaggacggtaggatatttgaaggtgaccttttggttggtgccgatggaatatggtcaaaggtgaggaagacactattcgggcactcagatgccacctattcaggttacacctgctacactggaattgcagattttgtgccgcctgatatcgatacggttgggtaccgggtatttctgggccacaaacagtacttcgtctcttcggatgtcggtgccggtaaaatgcaatggtatgcttttcacaaggaagaggctggtggcactgaccctgagaacggtgagtgcttagagaagttttcaagcttaactagtgaaataggcactgcctcattgtaagttgtgatgaaaaatgagaacaaaacttctcac

SEQ ID NO: 14495 - DNA, 221 bp, Zea Mays
tttctggctcctggtaccgggtatttctgggccacaaacagtacttcgtctcttcggatgtcggtgccggtaaaatgcaatggtatgcttttcacaaggaagaggctggtggcactgaccctgagaacggtgagtgcttagagaagttttcaagcttaactagtgaaataggcactgcctcattgtaagttgtgatgaaaaatgagaacaaaacttctcac

SEQ ID NO: 14496 - DNA, 1318 bp, Zea Mays
caaccttgtacttgtttctgtaggatggttaccagctggccgtagaactagagaatgcctggcaagagagtgtcaagactggaactcctatggacatagtttcctccttgagacgttatgagaaagagagaagggtgcgtgttgctgttatacatggactggcaagaatggcagcaatcatggctaccacctatagaccgtatttgggtgttggtctaggacctttatcgtttttgaccaagttgcggataccacaccctggaagggttggtggcagattcttcatcaagtatggaatgcctgctatgctgagctgggtgcttggtggcaatagctcaaagctagaaggaagacctttaagctgccgactttctgacaaggcacatgacgagctttatcggtggtttgacgatgacgatgcgctggaacaagctatgggtggagaatggtacctcttcgcaacaagtgaagcaaacaacaatagcttgcagcagcccattcgtttaattagggatgagcagaggtcactctctgttggcagccggtcagatgctaatgactcagcttcttccctatcattgccctttccacagatatcagaaaggcatgctactatcacgtgcaagaataaggctttctatctgactgatctcgggagtgaacatggtacctggattaccgacaatgaaggtagacgttaccgcgtgccaccaaacttcccggctatgttccgggtgaaggtgctgaacacgctcccatacgaatcagcaagaagtgggaagcagcaggggctgcagcaagagcaagtcctccaggcagcatgaatggagacaccagtcaccatcccatcatcagcgacactgtactgtatagcaatcgggagatacacgatactccaacgcgtaaaaaagcgtaaaagatacgtcaaaacagatgtgatttttgcatccatgcagatgcgaaacaggattttgaatcctagcacctaacggatttaaatgatgaagtttcagttctacgagaggaactgagttgtacgatagggataacttagctgttgtcggactgtgtacattgttggtatcatcacccaaaatattgtacatctagaagccatattgtaattacggcacgtatacagtaacactttgatcatgtaatacagtatatagttgtttacggcacgtatactttgatcatgtaatacagtatatctggcgctgagtcagatagggtatgatttgttcttccaccagcgccagtttcttgaactgctggattttctttgaaattcatgcagaataaaaaaactataaaa

SEQ ID NO: 14497 - DNA, 423 bp, Zea Mays
  misc_feature (422)..(423): n is a, c, g, or t
ctcatgaatacagctagatttgtatcgtttccgcgcgttgaactgcgtgttttctccgcaagttgatatgtggttacaataaaagttatccgcaataggcaaacaggacagtcagaggggtatggatttgttgagttcttttctcatgcatcagcagagaaagctcttcagaattttactggtcatgtgatgccaaacactgaccggccatttaaattgaactgggcatcgtatagcatgggtgaaaagcgatctgaagtggcttctgatcactcgatatttgttggcgatctagctgctgatgtcactgatgaaatgctgctggagcttttctccagcaagtaccgctcggtgaaaggagctaaagttattattgatgcaaacacaggccgttccaggggctatggatttgtcaggtttgnn

SEQ ID NO: 14498 - DNA, 1694 bp, Zea Mays
cctaggggactaagttgccaaatcatctgtttcatcctcctgggtcctaactagtttttttagtacttctcaagttctgatgatatttaaaactgaattactgaaacacatgttttatggttgtaactataaaacacttcttgtaattgactagtggaatgtaagcctgatttatatggctacagtgttctggaaaaaaaaatctgattctcaactctagcaccagtctactaaggactcattcccttgacctgctgatacggttgctacttgtctgatgctctttttagctcagggatttcatgtagttgatgcatctagatacatttggaccatgaatcctgtggttgtcacaagcccgcaaggctagatatcctggattctgttcacctctgaccacagagccatgttttctccgatttaccgctctgcgatctatctatgtgtactctgtttttcaggaccaaatatgtgtagcctgttgaaattcctgaatagtgattctggctcctcgactcctggtcattcagatggtatatgttggtgggcttgaccccaatgtcagtgaagatgaactgagaaaagcctttgccaaatatgatcttgcctctgtgaaaattcctctaggaaagcaatgtggctttgttcaatttgttagcagaactgatgctgaagaagcactacaaggattaaatggatcactcattggaaagcaggcagttcgcctttcatgggtccgcagcccatcgcataagcagtctaggggtgactccgtcaacaggaggaacaacatgtactatggcacaccattctacggcggatatggctatgcctccccggtgccacacccaaacatgtacgctgcagcgtatggcacgtacccgctatatggcaaccagcagctagtgagctagagagctcccctccgacgtgtcccctctgacgggaaacaaaggttttggtccggtgagcatagtagcgtcaggtgagaaggtgcctttataaggctgtcctaagaagtgggcgagatatgttgttgcatcgttatcgttatggtgcctgtaactgttgtgtgtgccgtgtgcgtccggaagaattggatggaatggaactcgtggcttgttgtagtacatcagagagtcatgttattctttcaagaaattttgacttggtaataaattaaactattgtttgtgcgtccattttccccttttgattgtggttgccaatcattttcatgctattggttacatgtaatttgtatttttgtaatacatatatcttaatgcatgatagaagaccttgggtacaaattatattaccatataaactaaactatcggtaacgatgtagaatgaaggcagtatatttttcaaggctcgagggaccgtgacgtctataggtgtgaattaggtaactgtaaaaaatgctttcctctaatttttgtctagtcaaaatctatacaataaataatcaatttagagggtgtttgaatacaatagagataatagttagctgctaaaattagctgatgacatccaaaaagtctagctaatagctaaactattaaatattttttagcaaattagctaatagtagctagctaatttcactagcaatttttagccaactaactataactaactatcatatctagtgcattcaaatatcccttagatgccaactaagatttt

SEQ ID NO: 14499 - DNA, 1164 bp, Zea Mays
gatccataggggaggaatccccaaaccgagtttgttggttgttgttcaactctccacttattatcttcccgaatacactaacttgatcaatctgctgcataattctctttttacctttagactaaaaaccagttacctgaaaattgtaaccttgattgcaactagcttaccgcagttgtaaggaactaccgagtactgacaatttgttcctacaatcctaatggaaagaaaaggggtgactccgtcaacaggaggaacaacatgtactatggcacaccattctacggcggatatggctatgcctccccggtgccacacccaaacatgtacgctgcagcgtatggcacgtacccgctatatggcaaccagcagctagtgagctagagagctcccctccgacgtgtcccctctgacgggaaacaaaggttttggtccggtgagcatagtagcgtcaggtgagaaggtgcctttataaggctgtcctaagaagtgggcgagatatgttgttgcatcgttatcgttatggtgcctgtaactgttgtgtgtgccgtgtgcgtccggaagaattggatggaatggaactcgtggcttgttgtagtacatcagagagtcatgttattctttcaagaaattttgacttggtaataaattaaactattgtttgtgcgtccattttccccttttgattgtggttgccaatcattttcatgctattggttacatgtaatttgtatttttgtaatacatatatcttaatgcatgatagaagaccttgggtacaaattatattaccatataaactaaactatcggtaacgatgtagaatgaaggcagtatatttttcaaggctcgagggaccgtgacgtctataggtgtgaattaggtaactgtaaaaaatgctttcctctaatttttgtctagtcaaaatctatacaataaataatcaatttagagggtgtttgaatacaatagagataatagttagctgctaaaattagctgatgacatccaaaaagtctagctaatagctaaactattaaatattttttagcaaattagctaatagtagctagctaatttcactagcaatttttagccaactaactataactaactatcatatctagtgcattcaaatatcccttagatgccaactaagatttt

SEQ ID NO: 14500 - DNA, 1839 bp, Zea Mays
cacatagtgtcctaggtgcacgtgtagacttgtgtgcatttagtgcatgggagccacgtcatatagtatgctgtgttggcatcccttgtattcttgcactgaattgtggatgagctcagtgacccctccccatgcctatttattcagtgtgttccacggctgagttcagaaaagcttttctcccttgttctcgagctctagtcccagtccactacaaaggtgctggagtcctggtattcttgctggtgtgcatcctctctttcagccaccaattttgctttactccagagctgaatgccaacctcttgtttgtggtgaccaaacccaaccgttcttcacctccccgtggacaaggcttcccacaagtattcttgaccgtgtactacttgttccatgctcgacaaagaattcctagaagaagaagatgaaattcaagaagtggtttcggaagaggagtctgcttcagtgcttgctcatcaagtgatgggagccatctaactgggtatttaatagagggatttggaacctcttcattgcaataaggcaagccccggtgcatttaccccttccttgtatttttaaaagatttttatacactttaagtctagtgaaatgtgcattaagtttataggagttgcttggaaactattggatgcattgcctaccttgatatccatacctttatagatacttctgatgaagtatcaaaatacaatttacaaaaatgcttagccctgcttagatcttgtggatagaggttgtcttttgcattaatgcctagctcaggggatatcctgaggaaggatggcttatacctgcaagaatattttcattgggagcatgatgggatcttactgcaaagttccctataatgctcttttcatcctaaggaacacaaacaattctaaggatggaagtacttaaatcgggacttgggctaggaacatgtgatgttctacccaggttaattaaggattggatgcgtatgtaggcctgtatgatcaaggactatcttaactggccacgatatgggacagggtaagcttgaacccgactattccatacatgaaaagacaatcgcgcactgtgagtggagagatggcaagagtggcacgtaccctcctggcaaagtaccgcctaaaagcggtggtgtgctctcgggtggcgcggacctgttcacgttgtggaggatttgtgggaacggctgacatatgcaagggttaagtgctacatatgtcgtgtggttagagatcctcagctgagtaaatcgatttggatcgccgttatatccccggagagtggagacttgatctccgacctgcaacctaagtcaggatgtaaacattatgaataaaaatgatgttgtattgatgagatggtgaaattagactagatgcaaccagagtctattaatatttaatctgacgttaaaatattgaaagtaaggactcactatagtaagttatttctgcaaaagtatctaagttgattcttgctaaagccttttccttgattcctatttaaccagcatatccttgagagtcatttttcttagtcggctaagacttgcgaaagtacacttcgtactcagggttttcgaacccatgttgttgtaggtgatgaggagtactctaggtgttcctaaggctggagggtgtttccagttctggaggaagattagttaggcttatgtttaagctttggagggttcctaccttcctgatattgtaataagttatgcactttgagtatatcaggacttgtaataaatgtaactgttcctatgtaataaccttccgttttagaaataaaaagaatattttgtaaagtcttccgcta

SEQ ID NO: 14501 - DNA, 1713 bp, Zea Mays
aaaagcttttctcccttgttctcgagctctagtcccagtccactacaaaggtgctggagtcctggtattcttgctggtgtgcatcctctctttcagccaccaattttgctttactccagagctgaatgccaacctcttgtttgtggtgaccaaacccaaccgttcttcacctccccgtggacaaggcttcccacaagtattcttgaccgtgtactacttgttccatgctcgacaaaggttgcataagcataagcattcatgttcatatctttacatgtagaattcctagaagaagaagatgaaattcaagaagtggtttcggaagaggagtctgcttcagtgcttgctcatcaagtgatgggagccatctaactgggtatttaatagagggatttggaacctcttcattgcaataaggcaagccccggtgcatttaccccttccttgtatttttaaaagatttttatacactttaagtctagtgaaatgtgcattaagtttataggagttgcttggaaactattggatgcattgcctaccttgatatccatacctttatagatacttctgatgaagtatcaaaatacaatttacaaaaatgcttagccctgcttagatcttgtggatagaggttgtcttttgcattaatgcctagctcaggggatatcctgaggaaggatggcttatacctgcaagaatattttcattgggagcatgatgggatcttactgcaaagttccctataatgctcttttcatcctaaggaacacaaacaattctaaggatggaagtacttaaatcgggacttgggctaggaacatgtgatgttctacccaggttaattaaggattggatgcgtatgtaggcctgtatgatcaaggactatcttaactggccacgatatgggacagggtaagcttgaacccgactattccatacatgaaaagacaatcgcgcactgtgagtggagagatggcaagagtggcacgtaccctcctggcaaagtaccgcctaaaagcggtggtgtgctctcgggtggcgcggacctgttcacgttgtggaggatttgtgggaacggctgacatatgcaagggttaagtgctacatatgtcgtgtggttagagatcctcagctgagtaaatcgatttggatcgccgttatatccccggagagtggagacttgatctccgacctgcaacctaagtcaggatgtaaacattatgaataaaaatgatgttgtattgatgagatggtgaaattagactagatgcaaccagagtctattaatatttaatctgacgttaaaatattgaaagtaaggactcactatagtaagttatttctgcaaaagtatctaagttgattcttgctaaagccttttccttgattcctatttaaccagcatatccttgagagtcatttttcttagtcggctaagacttgcgaaagtacacttcgtactcagggttttcgaacccatgttgttgtaggtgatgaggagtactctaggtgttcctaaggctggagggtgtttccagttctggaggaagattagttaggcttatgtttaagctttggagggttcctaccttcctgatattgtaataagttatgcactttgagtatatcaggacttgtaataaatgtaactgttcctatgtaataaccttccgttttagaaataaaaagaatattttgtaaagtcttccgcta

SEQ ID NO: 14502 - DNA, 597 bp, Zea Mays
aaaagcttttctcccttgttctcgagctctagtcccagtccactacaaaggtgctggagtcctggtattcttgctggtgtgcatcctctctttcagccaccaattttgctttactccagagctgaatgccaacctcttgtttgtggtgaccaaacccaaccgttcttcacctccccgtggacaaggcttcccacaagtattcttgaccgtgtactacttgttccatgctcgacaaagaattcctagaagaagaagatgaaattcaagaagtggtttcggaagaggagtctgcttcagtgcttgctcatcaagtgatgggagccatctaactgggtatttaatagagggatttggaacctcttcattgcaataaggtgatgaggagtactctaggtgttcctaaggctggagggtgtttccagttctggaggaagattagttaggcttatgtttaagctttggagggttcctaccttcctgatattgtaataagttatgcactttgagtatatcaggacttgtaataaatgtaactgttcctatgtaataaccttccgttttagaaataaaaagaatattttgtaaagtcttccgcta

SEQ ID NO: 14503 - DNA, 294 bp, Zea Mays
atggcgatctgtgataggtcatcgggccgccaagcgattcttcctgcgggagcggatcttccctgttcgttgagcggacgatcttcgatggcgcagagggtcatcttctccgcgaaagttcgtgaaagtagttcaatcttgattttctatgatctgttcactgaacttgatgactactgtactcaggttattctggctcctcgactcctggtcattcagatggtgattcttctaacagaacggtttgtggtatatgttggtgggcttgaccccaatgtcagtgaagatgaactg

SEQ ID NO: 14504 - DNA, 1223 bp, Zea Mays
caatcatatagaaaattttatttttcctatatatgttgtcgtttgaaacaaaacaaatgattgagttcctagaattcctatggaatagaccattatagtgagattttagaggattccaacctcttgaaaattttcctatagaattgcaagtgtcttgaacctctaatactacatttttcatatccttatgtttttaccgatcctgccatctaaagaagccctaacagaacagaacagttaaaacaaacaatatgactccttggccaggggtcgatcatagagaaggaatgagaatgcaagattacgacttggttatttttgggattaatccggcgttctgaatataaaacttggaagacccctaccatccttgccgtaaagatagtcaaagcactcctctaggtagtgcgccgccttaggacaggaaagaatggcggtgccccggacgatggcgtcctctggttccactcccttgcggctgtttggccgcctgccatgaaagtagtcctcgacgagctgacggagcttgggcatcctcgtgccgccaccgacgaggacgatctcgtcgaccatgtccttgcgactctcgtcgcggggctgggtcagccacccactccccgtccccatcaccgccccgtccacaagtcccatgaccctgtccaacaggtcctggttgagctcctccagcttggcccgtgtgaggggcgccgatgactcgatgccggcgacatgtatctgcaccatcgtctcttcctggtcgctcaatgccttcttggcgtgctcgtaggccacccttagcctgcgcagcgcctccgcgtcctgcctgatgtcccactggtgcttctccttgatgagctctgccatgtagtcgacgatccgcgccgtgaagtcgtcacctgcgatggcatgccagcaagcaagtactatagtagtagtacactacaaggtattgatccgtcatcgagcttgactacttgcctcccaagtagatatcatcttgcgccgcgatgtagcgagcctcgccatcgatgaacttgaagatggtggcgttggacgtgcggccgccaacacgcaagacaaggatagccttgccgtcaccctgctccgtgtggtggtgatacgacgcggccgccacgatctaccggtcgatggccttggcgccccggtggaagccagcgtcgtgccgtcccacattgacgatgtcatgcctttcgttgtagttg

SEQ ID NO: 14505 - DNA, 1407 bp, Zea Mays
ggcgctcaaccagggaccgcaaacgtcgtcgctgctgtcatgtggagtggaatgctgaacagtcatccttttatatagggaagaaggaacgattggatgagaggtcagggtgacgtggacacccgtcaggagatgcgggagccaaaacatgtcaccggccaacgtgtgtctgtcggatctcatcaacgcacatcaatgtccgtcggatgctcttctttccactctaagacaaaacagataggtatggaatcgtcctaccatgtagcctggcccatctactgcgatatagcttggcccgcgtgaccggcagccgagcagggggcacgtcaagaagggggaagcgtggactggacccgcggttgtcgccacgttcccgatcgtgtcgtacagggaggtcgtggagcacaaggtcggcaaggggtgctggagtgcgcggtgtgcctcacggcgttcgaggacgagtggacgacaatgaccaccgcctactgccgcactgctcccaccgtcccacgcgttccaccccgagtgcatcgacccctggctgcagtcgcgggccacgtgcctgctctgccgcgccaaggtaccggtgctggtgccgccggtggcgctagcgccgtgctagccttcgcggctgccggaggccgtggcggtaccggtgttggacgacgagttggaggaggacagcgacaaggaggacgataggaaggaggaggccatcgagctggagatgctgcgcagggcgcggcgggccgccacacgctctttgcggcggcggccggcggcaacgcgaaggaggagggcgaccacgagaggttcacgttgcgactgccggagcaagtgtgggatcaggtgctctggtctcgccgcctgtgccacgccactagcctcgtcaacctctcggacatgtgctccgagtccgaggaggggagctcccgaggtggacggcgtgtagcaggagcaggaagcgtcggcaacggcgggagcagccacagcgggcgccgatggtagtcgttcctggccaggacggtctcttgggcgcgaggcggcgacggctcggtgcagaaagggtgggatgggtctacaaggcggggaagggatgactgcgagtccagcgagaagggcgcggcctcggcgctacctgcgggccagtcgtgattgagatgtactgttggcggcggcgccaccgcgcccggaatgccgtgtttacgagttgtgtgctttcccttttccgttacgtatttgtttattgttaggaatattacgtgattgtggcctgatttccgctaagctttattttacttttgcaaagctcgattcgtttaatccgtagatttagcgggactgacaacggacgacgagagaagggattaaaagaaccacggggattctcacttctctttgattttg

SEQ ID NO: 14506 - DNA, 1184 bp, Zea Mays
aaacagtcaaggttggcagattgctgtatatatacttcttcctatgtacaaatgaccgtgttctcctttaattaatacgctgatagttggctgagagcgacagatttctaggcaaggacgaagtactagaagacagcaaccacaaggacattgcccccaagcaacaaacttggtactagataacatgaaagagtagcttcgacgtagaagaaactttggcgcccttcaaatcccatggccgcactcggttcttctgtcacatccagaggcttggcactccatacctccgtgtgtgtggtttttcttcatcgtcgccacgggaatccagtgatcccggccgcaccgtctcgtccccagcgaagtcttgcgagtgggttaacaacgagttcttcaggcatgaacaatgccttccctattatcaaaggaactacacgcaagtttcatgaagctacgacgactgcacaaacccggctttgtttatgagagtttgatctgcttttggggttcacagaattcctgcggttggtcctggccctgcaaatccgccaggaggaaacctaccgatacccagcagcatgcctccgtgggccaagtgggtggccggggccgtcatacttgcgatacctatctacaggaggttcagaactttagaagatagagaagacggcagaggtggccatcgaggtggtcgacacggtggcggaggcggcggagaaggtcgccggcgaggtcgccggcgcgtttcccggcaacgacggtctcagggaagcggcctcgaagattaagacggtcgcggatgagatcgaggaagacgccgagaaagccgaggccctaatcgagaaggttgacgagatcaagaaagaggttgattcaattgtggatcctataatcgacaaggttgtcaaggacaaagaaatatagagacaggtggtgaactgaagatgtaaacatttgttgggctggtctggttaggaatggatccggatatttattcagatgttaaattactttcgattgcaaacaaatatgatatataatttgttatgtaaatttatattggtgattttagtattaagcttatcaagattcataaaatttaaatatcaaatatgttatatatcattttaaatatttgatttaaaattcggatgcggatattattcggattcgaatgttgttttacc

SEQ ID NO: 14507 - DNA, 1107 bp, Zea Mays
aaacagtcaaggttggcagattgctgtatatatacttcttcctatgtacaaatgaccgtgttctcctttaattaatacgctgatagttggctgagagcgacagatttctaggcaaggacgaagtactagaagacagcaaccacaaggacattgcccccaagcaacaaacttggtactagataacatgaaagagtagcttcgacgtagaagaaactttggcgcccttcaaatcccatggccgcactcggttcttctgtcacatccagaggcttggcactccatacctccgtgtgtgtggtttttcttcatcgtcgccacgggaatccagtgatcccggccgcaccgtctcgtccccagcgaagtcttgcgagtgggttaacaacgagttcttcaggcatgaacaatgccttccctattatcaaaggaactacacgaattcctgcggttggtcctggccctgcaaatccgccaggaggaaacctaccgatacccagcagcatgcctccgtgggccaagtgggtggccggggccgtcatacttgcgatacctatctacaggaggttcagaactttagaagatagagaagacggcagaggtggccatcgaggtggtcgacacggtggcggaggcggcggagaaggtcgccggcgaggtcgccggcgcgtttcccggcaacgacggtctcagggaagcggcctcgaagattaagacggtcgcggatgagatcgaggaagacgccgagaaagccgaggccctaatcgagaaggttgacgagatcaagaaagaggttgattcaattgtggatcctataatcgacaaggttgtcaaggacaaagaaatatagagacaggtggtgaactgaagatgtaaacatttgttgggctggtctggttaggaatggatccggatatttattcagatgttaaattactttcgattgcaaacaaatatgatatataatttgttatgtaaatttatattggtgattttagtattaagcttatcaagattcataaaatttaaatatcaaatatgttatatatcattttaaatatttgatttaaaattcggatgcggatattattcggattcgaatgttgttttacc

SEQ ID NO: 14508 - DNA, 1158 bp, Zea Mays
gctgtatatatacttcttcctatgtacaaatgaccgtgttctcctttaattaatacgctgatagttggctgagagcgacagatttctaggcaaggacgaagtactagaagacagcaaccacaaggacattgcccccaagcaacaaacttggtactagataacatgaaagagtagcttcgacgtagaagaaactttggcgcccttcaaatcccatggccgcactcggttcttctgtcacatccagaggcttggcactccatacctccgtgtgtgtggtttttcttcatcgtcgccacgggaatccagtgatcccggccgcaccgtctcgtccccagcgaagtcttgcgagtgggttaacaacgagttcttcaggcatgaacaatgccttccctattatcaaaggaactacacgcaagtttcatgaagctacgacgactgcacaaacccggctttgtttatgagagtttgatctgcttttggggttcacagaattcctgcggttggtcctggccctgcaaatccgccaggaggaaacctaccgatacccagcagcatgcctccgtgggccaagtgggtggccggggccgtcatacttgcgatacctatctacaggaggttcagaactttagaagagaagacggcagaggtggccatcgaggtggtcgacacggtggcggaggcggcggagaaggtcgccggcgaggtcgccggcgcgtttcccggcaacgacggtctcagggaagcggcctcgaagattaagacggtcgcggatgagatcgaggaagacgccgagaaagccgaggccctaatcgagaaggttgacgagatcaagaaagaggttgattcaattgtggatcctataatcgacaaggttgtcaaggacaaagaaatatagagacaggtggtgaactgaagatgtaaacatttgttgggctggtctggttaggaatggatccggatatttattcagatgttaaattactttcgattgcaaacaaatatgatatataatttgttatgtaaatttatattggtgattttagtattaagcttatcaagattcataaaatttaaatatcaaatatgttatatatcattttaaatatttgatttaaaattcggatgcggatattattcggattcgaatgttgttttacc

SEQ ID NO: 14509 - DNA, 1038 bp, Zea Mays
ctttaattaatacgctgatagttggctgagagcgacagatttctaggcaaggacgaagtactagaagacagcaaccacaaggacattgcccccaagcaacaaacttggtactagataacatgaaagagtagcttcgacgtagaagaaactttggcgcccttcaaatcccatggccgcactcggttcttctgtcacatccagaggcttggcactccatacctccgtgtgtgtggtttttcttcatcgtcgccacgggaatccagtgatcccggccgcaccgtctcgtccccagcgaagtcttgcgagtgggttaacaacgagttcttcaggcatgaacaatgccttccctattatcaaaggaactacacgaattcctgcggttggtcctggccctgcaaatccgccaggaggaaacctaccgatacccagcagcatgcctccgtgggccaagtgggtggccggggccgtcatacttgcgatacctatctacaggaggttcagaactttagaagagaagacggcagaggtggccatcgaggtggtcgacacggtggcggaggcggcggagaaggtcgccggcgaggtcgccggcgcgtttcccggcaacgacggtctcagggaagcggcctcgaagattaagacggtcgcggatgagatcgaggaagacgccgagaaagccgaggccctaatcgagaaggttgacgagatcaagaaagaggttgattcaattgtggatcctataatcgacaaggttgtcaaggacaaagaaatatagagacaggtggtgaactgaagatgtaaacatttgttgggctggtctggttaggaatggatccggatatttattcagatgttaaattactttcgattgcaaacaaatatgatatataatttgttatgtaaatttatattggtgattttagtattaagcttatcaagattcataaaatttaaatatcaaatatgttatatatcattttaaatatttgatttaaaattcggatgcggatattattcggattcgaatgttgttttacc

SEQ ID NO: 14510 - DNA, 1060 bp, Zea Mays
aagacagcaaccacaaggacattgcccccaagcaacaaacttggtactagataacatgaaagagtagcttcgacgtagaagaaactttggcgcccttcaaatcccatggccgcactcggttcttctgtcacatccagaggcttggcactccatacctccgtgtgtgtggtttttcttcatcgtcgccacgggaatccagtgatcccggccgcaccgtctcgtccccagcgaagtcttgcgagtgggttaacaacgagttcttcaggcatgaacaatgccttccctattatcaaaggaactacacgcaagtttcatgaagctacgacgactgcacaaacccggctttgtttatgagagtttgatctgcttttggggttcacagaattcctgcggttggtcctggccctgcaaatccgccaggaggaaacctaccgatacccagcagcatgcctccgtgggccaagtgggtggccggggccgtcatacttgcgatacctatctacaggaggttcagaactttagaagacaagatagagaagacggcagaggtggccatcgaggtggtcgacacggtggcggaggcggcggagaaggtcgccggcgaggtcgccggcgcgtttcccggcaacgacggtctcagggaagcggcctcgaagattaagacggtcgcggatgagatcgaggaagacgccgagaaagccgaggccctaatcgagaaggttgacgagatcaagaaagaggttgattcaattgtggatcctataatcgacaaggttgtcaaggacaaagaaatatagagacaggtggtgaactgaagatgtaaacatttgttgggctggtctggttaggaatggatccggatatttattcagatgttaaattactttcgattgcaaacaaatatgatatataatttgttatgtaaatttatattggtgattttagtattaagcttatcaagattcataaaatttaaatatcaaatatgttatatatcattttaaatatttgatttaaaattcggatgcggatattattcggattcgaatgttgttttacc

SEQ ID NO: 14511 - DNA, 1888 bp, Zea Mays
aactctgatccgaaaacttctcatttcttgtgtattcagacgaaaagaacagggctacaaagcagtatatcgacggggagagaaggggaaaaacaaaagaatttagagtgtgtgcactggcgctaaattattcggcttgtagaagcttttcctccggaacagatcgccgaacttgcggagtatcggcctcttcttgcgcttcacgtggtcgaagtccaactcgtcgtccaggtccaccgccgccgcgtccgccgcggacttgaggtcggcgacgttgctgagcgacgcgaacacccgctccttggggttctggctccccatccgcgccgactgcgagaacctccggctgcccgccggcgtccgcggcttgtctgcatgcaccaaccgctgcggcggcgtcggcccgttgctgctgccgtttagcacgcgctggtcgaagccgcggtccggcgcggcggcggacgcgggcgtgctgcacgccgtcgtcgtcgtggtggcggcgaggagggtgttgagctccttgaggctgccctgcgcggcggcctcgctgaccctgacgcagtcgtactcctggcggaggctccgcagcgcgctctccttatccgcgacggcgtcgttgaggcgcgcgttgtcggccctggcgagctcgagcgagtcccggacagcgctggcctcggccacggcctgcttgaggacgtcccggaggcgcgcgttctcgtcgcggatgacgcgctgcgactcgaccagcttggtgttgtcccgccgcgcccgccctgcctcctcctcggccgcgcgcacgcagtcgaggagcacgcgctccttgtcgccccacgccgccgcgcactcgtcggcctcgagcctggaccggtcgcgctcggcggacgcggcggccagggccgcgcgcagccgccggacctcggcgctggccgcctccacctcggcctgcgcctcggagagccaggccttcacctgcttggcctccatggtcacgtcggcgagcgccacggagacgtcctccagcgccttgcggctcctctcctcgccctgcgtcgccgcccgcagctcgccgcgcagggccctgatctcgtcgtccgcgccgccgaacatgaggtccttgacgctccgcggctgctccgcgccgccgccgccgccgccacgccgggaggacgcggacgcggactcgagggtcttgttagcctgctgcagcgtggcgatctccagcctggcctcctcgagcgagatcttggtctgctccagctgcttggtctggtatatcagcgactccagcatcttgcgctccgactccttggacttgtccacctcccgctccagaagctgcaccttctccgcgacacccttggcggcgccgtcctcgctgtgctgcctcagctcctcgagctccctcacggcccgcgccttctcctcccgctcccgccggagctcctcctccagctgcgccacccgctgctgcatggcgaggggacggcttgcggtctctggaaacggacgaggcggtggcggtacccctgagcccggcctcgaaggagccggatctgcgaggcggatcccagagctcatgaaaccgtatcgacggactaaatagtcaaacaagaaaagaacgcacagggagtggcaacggcgagatccccgaccccgaccccaagccgagctggaaaagaaggatctatagacgtgcgtggccgtggcgtgggcgcgcgggcggggccgccactgcaatgcaaacccagccaaggcagtcagggtctcggctgaactctcacctcggcctggcggacagcatctcgggcaacgcggcgggcggcgcggactccgaggccgggaaaagaaatcagtgtcagagggggaaccgaatagaaggaggtcctgc

SEQ ID NO: 14512 - DNA, 2665 bp, Zea Mays
cccacgtccccacccgcaccgagaaggagccctaccaatctcgcccccgtttcgtatcagctgcattccaattccattcgtggtccctgccctgctcagctcatcagaacacagaaggcaggccacagcccgcagattgtgcgaccgcagagtttggatgctcctgcctatgcaagcaagatgtcaaccaccagagatattgtttagtgctgggcaagttatgcaattttggatcataaattacacagggacaagataattatggaccgcgcagacacatcaggctttgtcagtggtggttgctttggtactacactcctgctgatattcttccattttgtctattctacgatccatgtctgaaagaccctcaggaaccctgcagctgtctgggcagaaatatcatcaggcccctgttctttgagatctctggtgttttatctcattttgttttccaccattgttatattgtctcaactgtgatggataacggcttcatggacatccctcatccgcctctggtgaatgacccctttgtgttagtgggatgcccagcgccagcctccacgatggagaacatgggccaaagcacaatctgtatggatggcctgaacccagcaatggttagttgcagccatgttaatggaaacacacatataatgaacggcttaacagcaagagatgatggcagcaggttactccttggtttgggcccaacaccgaatttttattctgcagtgtccacgggctcaaaacaagctcagagattgtctggccagagttcaacttccattgattcagggatgctgaagcttggccttcagacggatgacagggaagcaattcaatatctgcaacaagcaccgaatggagcactccattctttagatattgttgacgaggcttcaacatctgctgctgtaaggaacatgggtggttacatgccatccctactctttgctccctgctccaattctattgccaatgagacacaagtagaaaaccaagattctctagacctcacgcacagcaccagcaacagtcagcaccttcaacatgacctccagctcagccccgaaccttctgcaacgaccgagtcatcatttggtatgagttctgatgttgtcactgcaacaactacatcagagcgtagccattcccgacatcctaagaaatgcaggtttaagggatgttccaaaggtgcaagaggagcatcaggattgtgtattgctcacggaggtgggcagagatgtcataaacctggatgccataaaggtgccgagagcagctccgcgtactgcaaagcccacggtggcggtcgtcggtgtgaggagcttggttgtaccaaaagcgcggaaggaaaaacagattattgcatcgctcatggtggaggctgccgctgccaacatcctggctgtcctaaagctgcccggggtaagtctgggcggtgcatcaagcacggtggtgggaagaggtgctcggttaaaggttgcatcaggagcgctgaggggaaggctgggctgtgcatttctcatggcggcggccgacggtgccagtatcctgattgcggcaagggggctcagggcagcacattgtactgcaaggggcatggtggcggcaagaggtgcatctttgatggttgcagcaaaggcgcagagggtagcacacctctgtgcaaagcacacggtggtgggaaacgatgcatgtttgaaggaggcggcgtctgtgcaaaaagcgtgcacggggctactgaatactgcgtggtgcatggaggagggaagcgctgttccgtgcccggctgcaccaaaagtgcccgtggccgcactgactgctgtgtgaagcacggtggcggcaagcggtgcaaggttgacagctgtggcaagagcgcccaggggagcacgcacttctgcaaagcccatggcggagggaagcggtgcacatggagcacaggctgcgaaaagttctcccgtggcaagagtggcttctgtgcagcacatggtaccttgatggccaggcagcgagaagaagaggtggtgaagaatgtagggagcatgattggaccaggtctcttcagcggcattgtggcgtcatctgccaccgcagcaagcagcatgacgaacgagcactcggcctctggtgtcagcaccgcttccgactgtgacggcacggtgaggagccaatcaatgattcctccgctggtgctggttcctcgctctatgatgccttcatggtcgactgagcctgtagatggaggcagagagggaggtcatgttgttcctgaggggagggtccatggtggtggcctactgtcacttctcggtggcagcttcagggacgccgacgtggaaaagctttgaagattttgtcagtttgtttgtacataaacaggccgcgttcccgcctatagaattgttattgtgccttttcttgtctagataaacatttcaaccttcatgtaccggttaaatcaatactggtttagtccattgtaaagtggtgactgtcaattgtcgtgaacacttttagcttgttggttcggttcggttgtagtctgtctgtttgtgcgtattcttaagaaactcgtctggactttctattgcaaattgtcgaatgtcaattttctgaaatctggaatttttcagcatataggtccaggttagtctgt

SEQ ID NO: 14513 - DNA, 2595 bp, Zea Mays
atcagctgcattccaattccattcgtggtccctgccctgctcagctcatcagaacacagaaggcaggccacagcccgcagagtttggatgctcctgcctatgcaagcaagatgtcaaccaccagagatattgtttagtgctgggcaagttatgcaattttggatcataaattacacagggacaagataattatggaccgcgcagacacatcaggctttgtcagtggtggttgctttggtactacactcctgctgatattcttccattttgtctattctacgatccatgtctgaaagaccctcaggaaccctgcagctgtctgggcagaaatatcatcaggcccctgttctttgagatctctggtgttttatctcattttgttttccaccattgttatattgtctcaactgtgatggataacggcttcatggacatccctcatccgcctctggtgaatgacccctttgtgttagtgggatgcccagcgccagcctccacgatggagaacatgggccaaagcacaatctgtatggatggcctgaacccagcaatggttagttgcagccatgttaatggaaacacacatataatgaacggcttaacagcaagagatgatggcagcaggttactccttggtttgggcccaacaccgaatttttattctgcagtgtccacgggctcaaaacaagctcagagattgtctggccagagttcaacttccattgattcagggatgctgaagcttggccttcagacggatgacagggaagcaattcaatatctgcaacaagcaccgaatggagcactccattctttagatattgttgacgaggcttcaacatctgctgctgtaaggaacatgggtggttacatgccatccctactctttgctccctgctccaattctattgccaatgagacacaagtagaaaaccaagattctctagacctcacgcacagcaccagcaacagtcagcaccttcaacatgacctccagctcagccccgaaccttctgcaacgaccgagtcatcatttggtatgagttctgatgttgtcactgcaacaactacatcagagcgtagccattcccgacatcctaagaaatgcaggtttaagggatgttccaaaggtgcaagaggagcatcaggattgtgtattgctcacggaggtgggcagagatgtcataaacctggatgccataaaggtgccgagagcagctccgcgtactgcaaagcccacggtggcggtcgtcggtgtgaggagcttggttgtaccaaaagcgcggaaggaaaaacagattattgcatcgctcatggtggaggctgccgctgccaacatcctggctgtcctaaagctgcccggggtaagtctgggcggtgcatcaagcacggtggtgggaagaggtgctcggttaaaggttgcatcaggagcgctgaggggaaggctgggctgtgcatttctcatggcggcggccgacggtgccagtatcctgattgcggcaagggggctcagggcagcacattgtactgcaaggggcatggtggcggcaagaggtgcatctttgatggttgcagcaaaggcgcagagggtagcacacctctgtgcaaagcacacggtggtgggaaacgatgcatgtttgaaggaggcggcgtctgtgcaaaaagcgtgcacggggctactgaatactgcgtggtgcatggaggagggaagcgctgttccgtgcccggctgcaccaaaagtgcccgtggccgcactgactgctgtgtgaagcacggtggcggcaagcggtgcaaggttgacagctgtggcaagagcgcccaggggagcacgcacttctgcaaagcccatggcggagggaagcggtgcacatggagcacaggctgcgaaaagttctcccgtggcaagagtggcttctgtgcagcacatggtaccttgatggccaggcagcgagaagaagaggtggtgaagaatgtagggagcatgattggaccaggtctcttcagcggcattgtggcgtcatctgccaccgcagcaagcagcatgacgaacgagcactcggcctctggtgtcagcaccgcttccgactgtgacggcacggtgaggagccaatcaatgattcctccgctggtgctggttcctcgctctatgatgccttcatggtcgactgagcctgtagatggaggcagagagggaggtcatgttgttcctgaggggagggtccatggtggtggcctactgtcacttctcggtggcagcttcagggacgccgacgtggaaaagctttgaagattttgtcagtttgtttgtacataaacaggccgcgttcccgcctatagaattgttattgtgccttttcttgtctagataaacatttcaaccttcatgtaccggttaaatcaatactggtttagtccattgtaaagtggtgactgtcaattgtcgtgaacacttttagcttgttggttcggttcggttgtagtctgtctgtttgtgcgtattcttaagaaactcgtctggactttctattgcaaattgtcgaatgtcaattttctgaaatctggaatttttcagcatataggtccaggttagtctgt

SEQ ID NO: 14514 - DNA, 3155 bp, Zea Mays
ccccgatcttctctctcctttacacgccaacagctcgcccctctccgtctgcttgattctgctccaggctccagcctcagaccggcactcgctcaaaaatgtcattacgcacccaatccgcttgtagctgtatgctggaacctactctgccttgtcttcttgcatcacactaagaatgcgcgcaacccccacccacccacgggccacgactaggccggcctttgctgctgtcctactttgccacccacgacattggccggcgacgagcaccaccaggacagcagggtttgaaaacttcttgtatgctcacgcgttcggcgctgattgttgaaagtagctttgggactctgaggacctaaattctaatcaattgtgaaatctgaaaggtgtagctatttgtacttctggaggtgtgggaagaaatggaatgcaacaaagatgaggcccaaagggcgaagggtattgcaaagaagaagtttgaagcaggggacttgcagggtgccaggaaattcgccctcaaggctcagactctctttcctgcgcttgagggcgttgatcaaatgatcgccacctttgatatctatcttgcttcagaagggaaggttgctggggagaaggactggtactctatcctttccgttcccatgaacgcaaacgatgaaaagatcaagaaacagtacaggaagttggttcttcagttccaccctgataaaaacaagtcagtgggcgctgagggtgctttccagatggttcaagaggcatacacggtgctatccgatagaaccaagcgagctgtatatgaccaaaagaggaatgtgaggacattccaacagaggacagcacaatcaggtaaagcaagcacggtccctggtgcatccaatggcttctataatttcgcagctaatgctgctactgcctccaagcggacagtaaacaagcaaacagtgggatcagcaacacatgccccatctgcaccttcaactgctactcgtgcacctgtggcaaagcctgatacattttggacctcatgcaacaaatgcaagatgaactatgagtacctcagggtgtatttgaataaccatcttcgctgccctagttgccgtcagccattcctagcaaaagaagtacaaaagccaccagcagggaacgtggtacaagattcaaacatcagtggtgctaatcaaaacacaaccactaatagaaatttgcggtggggtccattttcaagggctgctggtgcagctagtgccactgcatcgtctgctgctgctgctcaagctgctaatgtagttcatcagacatatgaaaaagttaggagggagagggaggaggcacaagcagcggcaacaagggaagaggctcttcgccggaagtacaatcctctaaagaggcatgcaagcatgtcagggaatgctaatcttggaccaggtgatgcaacatctggaaagaagacaaggactatgactaaagatgctgaagttggttcttcatccaccatatccagtccaggagcaaatttttttagagtgcctggtgtgaatatatccttttccaacaacattggggcctatgagtttcaaggcgttgatggtggccccaattggaaacccaggcctctgatccgcttaagtttagtcaagaccttctctcagatggatcttaggggtcttttgctggaaaaaacgaaaactgagcttaaaaacaagctaacagtaataaaaagtaaaacatcccaagttgctagtgaaaaagcgagcaagaaaattgcggtcaaggaaaatggtggggataatgaagctcttggaccagaagatcctacagctaataaagattctcatgattcagaacagattggttctaatactagcacagatgctgaaaatgaagatgatgaccccttatcttataatgttcctgatccagatttccatgattttgacaagaatcgcactgaggaatgtttccaaagtgatcaaatttgggctacatatgatgatgaagatggaatgcctcgttattatgcatttattcagaaagttctttccttgaaaccattcaagctcagaataagctatctcacatcaagggcaaatagcgaatttgggccttcgaattgggtttcttctggcttcataaagacttgtggtgatttcaggattggtaaatatgaaagctgtgatatagtcaacatgttctctcaccagatgaaatgggataaagggccgcgtgggcttatcaaaatttatccacagaaaggtgatatctgggctgtttatcggaattggtcctctgactgggatgaagatactccagataatgtgctccatgcctacaatgtggttgaggtactggatgcctatgatgaagtccatggcatctccataattcccttagtcaaggttactggatttcgaacagtatttcagcgccatcaggatccaaatgctaccatgaagattcctaaagaagagatgtttcggttttcacacctagtgcctttttacaggatgtcaggcgaagaagctgcaaatgtccccaaagatagttatgagcttgatccagctgctatttctaaagaactgcttcaggggatcacggaagcagtggagccaaatggaacctaaggcagttgatgatgcctgccttggttaacctgccattttgaagtaatcgagcaaaaagatattaacacttgctagttttatagatttccttctgcttttgactatcacctttgcatagaagagatacaatggggccagtcattcaggagtcagctgcttagcagcttctggtgtaattagcaggctctgatatgaattttgctgtgatatgttacttagggcttgtttagatgcatgtggattggaggggattgaagtgacatataatcccttactagtccatgcccctcaatcccatgcatccaaaccagcccttagcaactctagatgtgggtgtactaacgcgaagctcaagcagtttttatggtcagtgttgacacctgttatctgtcttatcttgagagtggatctgttgctttttttgcgaattcaaatgctaattgaactcgtggccgtttgttggttctgttattttgaaacacccatacgttgtatgtgaaaaactactagcattgcttcactcagtaattt

SEQ ID NO: 14515 - DNA, 2988 bp, Zea Mays
acgacattggccggcgacgagcaccaccaggacagcaggatttcctgatggtttgcaacaccgtggaatccttctttcttctttccagagctagcagtgtcagcaaaagcagacacgggtttgaaaacttcttgtatgctcacgcgttcggcgctgattgttgaaagtagctttgggactctgaggacctaaattctaatcaattgtgaaatctgaaaggtgtagctatttgtacttctggaggtgtgggaagaaatggaatgcaacaaagatgaggcccaaagggcgaagggtattgcaaagaagaagtttgaagcaggggacttgcagggtgccaggaaattcgccctcaaggctcagactctctttcctgcgcttgagggcgttgatcaaatgatcgccacctttgatatctatcttgcttcagaagggaaggttgctggggagaaggactggtactctatcctttccgttcccatgaacgcaaacgatgaaaagatcaagaaacagtacaggaagttggttcttcagttccaccctgataaaaacaagtcagtgggcgctgagggtgctttccagatggttcaagaggcatacacggtgctatccgatagaaccaagcgagctgtatatgaccaaaagaggaatgtgaggacattccaacagaggacagcacaatcaggtaaagcaagcacggtccctggtgcatccaatggcttctataatttcgcagctaatgctgctactgcctccaagcggacagtaaacaagcaaacagtgggatcagcaacacatgccccatctgcaccttcaactgctactcgtgcacctgtggcaaagcctgatacattttggacctcatgcaacaaatgcaagatgaactatgagtacctcagggtgtatttgaataaccatcttcgctgccctagttgccgtcagccattcctagcaaaagaagtacaaaagccaccagcagggaacgtggtacaagattcaaacatcagtggtgctaatcaaaacacaaccactaatagaaatttgcggtggggtccattttcaagggctgctggtgcagctagtgccactgcatcgtctgctgctgctgctcaagctgctaatgtagttcatcagacatatgaaaaagttaggagggagagggaggaggcacaagcagcggcaacaagggaagaggctcttcgccggaagtacaatcctctaaagaggcatgcaagcatgtcagggaatgctaatcttggaccaggtgatgcaacatctggaaagaagacaaggactatgactaaagatgctgaagttggttcttcatccaccatatccagtccaggagcaaatttttttagagtgcctggtgtgaatatatccttttccaacaacattggggcctatgagtttcaaggcgttgatggtggccccaattggaaacccaggcctctgatccgcttaagtttagtcaagaccttctctcagatggatcttaggggtcttttgctggaaaaaacgaaaactgagcttaaaaacaagctaacagtaataaaaagtaaaacatcccaagttgctagtgaaaaagcgagcaagaaaattgcggtcaaggaaaatggtggggataatgaagctcttggaccagaagatcctacagctaataaagattctcatgattcagaacagattggttctaatactagcacagatgctgaaaatgaagatgatgaccccttatcttataatgttcctgatccagatttccatgattttgacaagaatcgcactgaggaatgtttccaaagtgatcaaatttgggctacatatgatgatgaagatggaatgcctcgttattatgcatttattcagaaagttctttccttgaaaccattcaagctcagaataagctatctcacatcaagggcaaatagcgaatttgggccttcgaattgggtttcttctggcttcataaagacttgtggtgatttcaggattggtaaatatgaaagctgtgatatagtcaacatgttctctcaccagatgaaatgggataaagggccgcgtgggcttatcaaaatttatccacagaaaggtgatatctgggctgtttatcggaattggtcctctgactgggatgaagatactccagataatgtgctccatgcctacaatgtggttgaggtactggatgcctatgatgaagtccatggcatctccataattcccttagtcaaggttactggatttcgaacagtatttcagcgccatcaggatccaaatgctaccatgaagattcctaaagaagagatgtttcggttttcacacctagtgcctttttacaggatgtcaggcgaagaagctgcaaatgtccccaaagatagttatgagcttgatccagctgctatttctaaagaactgcttcaggggatcacggaagcagtggagccaaatggaacctaaggcagttgatgatgcctgccttggttaacctgccattttgaagtaatcgagcaaaaagatattaacacttgctagttttatagatttccttctgcttttgactatcacctttgcatagaagagatacaatggggccagtcattcaggagtcagctgcttagcagcttctggtgtaattagcaggctctgatatgaattttgctgtgatatgttacttagggcttgtttagatgcatgtggattggaggggattgaagtgacatataatcccttactagtccatgcccctcaatcccatgcatccaaaccagcccttagcaactctagatgtgggtgtactaacgcgaagctcaagcagtttttatggtcagtgttgacacctgttatctgtcttatcttgagagtggatctgttgctttttttgcgaattcaaatgctaattgaactcgtggccgtttgttggttctgttattttgaaacacccatacgttgtatgtgaaaaactactagcattgcttcactcagtaattt

SEQ ID NO: 14516 - DNA, 2975 bp, Zea Mays
ctgagatccatccgtggagggcggcggtcgcctcctcttcccctgcggccgagctcgccagtcgcctgaactcgtctcgcccgctgccgatctcctctctctgctcgtcgcgccgcaacctggagaggggaccgcgctcggtcgactaccacctggggagcgggcgggcggcgtccgccctctgcacccccccggtgtccccgcgaccggctccggcgcggccggcacacaggtccgcagggtttgaaaacttctcatatgctcatgcgttcggcgctgattgttgaaagtagctttgggactccgaggacctaaattctaatcaattgtgaaatctgaaaggtgtagctatttgtacttctggaggtgtgggaagaaatggaatgcaacaaagatgaggcccaaagggcgaagggtattgcaaagaagaagtttgaagcaggggacttgcagggtgccaggaaattcgccctcaaggctcagactctctttcctgcgcttgagggcgttgatcaaatgatcgccatctttgatatctatcttgcttcagaagggaaggttgctggggagaaggactggtactctatcctttctgttcccttgaacgcaaacgatgaaaagatcaagaaacagtacaagaagttggttcttcagttccaccctgataaaaacaagtcagtgggcgctgagggtgctttccagatggttcaagaggcatacacagtgctatcggatagaaccaagcgagctgtatatgaccaaaagaggaatgtgaggacattccaacagaggacagcacaatcaggtaaagcaagcacggtccctggtgcatccaatggcttctataattttgcagctaatgctgctactgcctccaagtggacagtaaacaagcaaacagtgggatcagcaacacatgccccatctgcaccttcaactgctactcgtgcacctgtggcaaagcctgatacattttggacctcatgcaacaaatgcaagatgaactatgagtacctcagggtgtatttgaataaccatcttcgctgccctagttgccgtcagccattcctagcaaaagaagtacaaaagccaccagcagggaacgtggtacaagattcaaacatcagtggtgctaatcaaaacacaaccactaatagaaatttgcagtggggtccattttcaagggctgctggtgcagctagtgccactgcatcgtctgctgctgctgctcaagctgctaatgtagttcatcagacatatgaaaaagttaggagggagagggaggaagcacaagcagcggcaagaagggaagaggctcttcgccggaagtacaatcctctaaagaggcatgcaagcatgtcagggaatgttaatcttggaccaggtgatgcaacatctggaaagaagacaaggactatgactaaagatgctgaagttggttcttcatccaccatatccagtccaggagcaaatttttttagagtgcctggtgtgaatatatccttttccaacaacattggggcctatgagtttcaaggcgatgatggtggccccagttggaaacccaggcctctgatccacttaagtttagccaagaccttctctcagatggatcttaggggtcttttgctggaaaaaacgaaaactgagcttaaaaacaagctaacagtaataaaaagtaaaacatcccaagttgctagtgaaaaagcgagcaagaaaattgcggtcaaggaaaatggtggggataatgaagctcttggaccagaagatcctacagctattaaagattctcatgattcagaacagactggttctaatactagcacagatgctgaaaatgaagatgatgaccacttatcttataatgttcctgatccagatttccatgattttgacaagaatcgcactgaggaatgtttccaaagtgatcaaatttgggctacatatgatgatgaagatggaatgcctcgttattatgcatttattcagaaagttctttccttgaaaccattcaagctcagaataagctatctcacatcaagagcaaatagtgaatttgggcctttgaattgggtttcttctggcttcataaagacttgtggtgatttcaggattggtaaatatgaaagctgtgatatagtcaacatgttctctcaccagatgaaatgggataaagggccgcgcgggcttatcaaaatttatccacagaaaggtgatatctgggctgtttatcggaattggtcctctgactgggatgaagatactccagataatgtgctccatgcctacaatgtggttgaggtactggacgcctatgatgaagaccatggcatctccataattcccttagttaaggttactggatttcgaacagtatttcagcgccatcaggatccaaatgctaccatgaagattcctaaagaagagatgtttcggttttcacacctagtgcctttttacaggatgtcaggcgaagaagctgcaaatgtccccaaagatagttatgagcttgatccagctgctatttctaaagaactgcttcaggggatcacggaagcagtggagccaaatggaacctaaggcagttgatgatgcctgccttggttaacctgccattttgaagtaatcgagcaaaaaaatattaacgcttgctagttttatagatttccttctgcttttgactatcacctttgcatagaagagatacaatggggccagtcattcaggagtcagctgcttagcagcttctggtgtaattagcaggctctgatatgaattttgctgtgatatgttacttagggcttgtttggatgtacgtggattggaggggatcgaagcggcatataatcccttactagtccattcccctcaatcccatgcatccaaaccagcccttagcaactctagatgtgggtgtactaacgcgaagctcaagcagtttttatggtcaaagaaacgataaaaaaataataaaa

SEQ ID NO: 14517 - DNA, 2806 bp, Zea Mays
caccagatcatgcctttcacttgttgcatctcctgcctcaactacgtggacatcatcttcttcatgcgccgggtttgaaaacttctcatatgctcatgcgttcggcgctgattgttgaaagtagctttgggactccgaggacctaaattctaatcaattgtgaaatctgaaaggtgtagctatttgtacttctggaggtgtgggaagaaatggaatgcaacaaagatgaggcccaaagggcgaagggtattgcaaagaagaagtttgaagcaggggacttgcagggtgccaggaaattcgccctcaaggctcagactctctttcctgcgcttgagggcgttgatcaaatgatcgccatctttgatatctatcttgcttcagaagggaaggttgctggggagaaggactggtactctatcctttctgttcccttgaacgcaaacgatgaaaagatcaagaaacagtacaagaagttggttcttcagttccaccctgataaaaacaagtcagtgggcgctgagggtgctttccagatggttcaagaggcatacacagtgctatcggatagaaccaagcgagctgtatatgaccaaaagaggaatgtgaggacattccaacagaggacagcacaatcaggtaaagcaagcacggtccctggtgcatccaatggcttctataattttgcagctaatgctgctactgcctccaagtggacagtaaacaagcaaacagtgggatcagcaacacatgccccatctgcaccttcaactgctactcgtgcacctgtggcaaagcctgatacattttggacctcatgcaacaaatgcaagatgaactatgagtacctcagggtgtatttgaataaccatcttcgctgccctagttgccgtcagccattcctagcaaaagaagtacaaaagccaccagcagggaacgtggtacaagattcaaacatcagtggtgctaatcaaaacacaaccactaatagaaatttgcagtggggtccattttcaagggctgctggtgcagctagtgccactgcatcgtctgctgctgctgctcaagctgctaatgtagttcatcagacatatgaaaaagttaggagggagagggaggaagcacaagcagcggcaagaagggaagaggctcttcgccggaagtacaatcctctaaagaggcatgcaagcatgtcagggaatgttaatcttggaccaggtgatgcaacatctggaaagaagacaaggactatgactaaagatgctgaagttggttcttcatccaccatatccagtccaggagcaaatttttttagagtgcctggtgtgaatatatccttttccaacaacattggggcctatgagtttcaaggcgatgatggtggccccagttggaaacccaggcctctgatccacttaagtttagccaagaccttctctcagatggatcttaggggtcttttgctggaaaaaacgaaaactgagcttaaaaacaagctaacagtaataaaaagtaaaacatcccaagttgctagtgaaaaagcgagcaagaaaattgcggtcaaggaaaatggtggggataatgaagctcttggaccagaagatcctacagctattaaagattctcatgattcagaacagactggttctaatactagcacagatgctgaaaatgaagatgatgaccacttatcttataatgttcctgatccagatttccatgattttgacaagaatcgcactgaggaatgtttccaaagtgatcaaatttgggctacatatgatgatgaagatggaatgcctcgttattatgcatttattcagaaagttctttccttgaaaccattcaagctcagaataagctatctcacatcaagagcaaatagtgaatttgggcctttgaattgggtttcttctggcttcataaagacttgtggtgatttcaggattggtaaatatgaaagctgtgatatagtcaacatgttctctcaccagatgaaatgggataaagggccgcgcgggcttatcaaaatttatccacagaaaggtgatatctgggctgtttatcggaattggtcctctgactgggatgaagatactccagataatgtgctccatgcctacaatgtggttgaggtactggacgcctatgatgaagaccatggcatctccataattcccttagttaaggttactggatttcgaacagtatttcagcgccatcaggatccaaatgctaccatgaagattcctaaagaagagatgtttcggttttcacacctagtgcctttttacaggatgtcaggcgaagaagctgcaaatgtccccaaagatagttatgagcttgatccagctgctatttctaaagaactgcttcaggggatcacggaagcagtggagccaaatggaacctaaggcagttgatgatgcctgccttggttaacctgccattttgaagtaatcgagcaaaaaaatattaacgcttgctagttttatagatttccttctgcttttgactatcacctttgcatagaagagatacaatggggccagtcattcaggagtcagctgcttagcagcttctggtgtaattagcaggctctgatatgaattttgctgtgatatgttacttagggcttgtttggatgtacgtggattggaggggatcgaagcggcatataatcccttactagtccattcccctcaatcccatgcatccaaaccagcccttagcaactctagatgtgggtgtactaacgcgaagctcaagcagtttttatggtcaaagaaacgataaaaaaataataaaa

SEQ ID NO: 14518 - DNA, 2476 bp, Zea Mays
cggaactttgcgatttcatccaaaaagagcagaacactacgagactacctccttctctccaagtcgttgtcttcttcggttcttcctagcgtctccccgttcttctctccgtagtagctaacagtatagtgtggcctcgcatggagactttccctcctcgctggccccgcatctggcccggattaaccgccttgggctccctccccagattgccccacccaccgtcagcctcgtcaggcccttaacccgaaggtaattgagattgcgaagaagatgaaagaggagagggtcaagttgtttacttcagaatattttgcttacagatgatacgactagatcaaatcagttgcattgtgagttgtgacatgttggcaggatgtcagtttcccttttaacctggctcttgtttgcttcctgtgtaatttgtgtatatccctgtgatgaacattttagtaatctgggtgctcattcaattggcgcgccctcctcatcactcttagatggggaggttgaaggaacccatatcgatgatgtatacaccgttgagatgtttgcttctcgtgtaatttgtgtatatccccgtgatgaacattttagtaatttgagtgctcattcagttggtgctccctcctcatcacgcaaataggtactgaagcccatatgactatgcagatctaggacagaatgtttgcaataaatactgacatggatatctagctttggctttgaaagatgtagggatcttttgttaaattgatttacctagggtcctgctacaagagcttacctgttacctcgttatatctttgtgagattacagcaaaagtatccaatttctacatattttactgctacacagatttgtctgtctgtttggtcatggatatggttcggttttactgctgtaaaaagggattaaaaaatctgcaacctgatttcaatttttattttttatttgcatcacgatgaaatggtagggtcctcccaggacaaaccatgctccggagacagaggcggcagagctggggcaggagcagagccatcacagaaattcttgtctccaggtatgttgaagtttcaacaacttggtttataaattaacatgattttaaaaaatcacagtgactcctcttgcagattttgtaaaatgtttttttctctactgcactgcctatcatttgctgcaatttgaggattataacattctagacacactaaaatctatcatctatcataaacagtagctatttccccctctgttctttgtgtctctgattgtgtggtaccagctactttggcatacatttgttttttgctttaatcttctgttcagcttctaattcagaaatctttacttcagataaccagaatacttcagcttccatagttccacttacacagttgtaacaatctagcctgtaatggcttgtaacagtacagtgagttgggagttgggacacctctgatgtttagagctccaatggtcctgtgggagggatatatttttgttttcatattgtttagccatggggtgccagggtctacgttctaccttggtttggttctctccttttctcctatctgtcaacacatagtcgtctattacttataaaaaaccacattttcccattttgatccctttatgaacaatgctggaaatcaaattctattcattttggaaaataattacatatttattcgtcgtagctatattccattgttttattaggtgctcaaaaattgtgttgaccggacacatgctattttggcctatgtgctatccattgctatgttttatcggtagggttttccatgcttagataacttcctaatttctcattttttgtaaataaataaatacttggagattcttggtcaaaggaatgttggacacctgctagccaatgtgcagccgcgagaggtctcagacagataagatggtcgacggcatggacttcgaggagctctgcagcgacttcgaatgcataagcagcccctacgtggagtccataatgaggcaggtcgcgcgggacatctttgagcttcgcgaggataaccgcgcattcagctgctacgccgtccccgtgaagtatgaggctccttcctgatgataatttataatgataaatcgaggaaactccaataagtttccttcctttttttcctttcgtttttctcccttctctgatttttcagtgtggagggactggacttccgacaaaggaaatcacaacattgtatatgattgacttgtaatatgttagtaaatatgtctgtacgttatgacaagagatataacttgttttagggctagtttggtaacttcatttttttcaaggaattttttcatttttccgagggaaattagttcattttttacaggaaaaatgtaaatcccttgagaaaaatgagttgccaaactagctcttatctagataatttgtagctcaaaattttacatccaacaaacaaggtg

SEQ ID NO: 14519 - DNA, 3160 bp, Zea Mays
cagaacactacgagactacctccttctctccaagtcgttgtcttcttcggttcttcctagcgtctccccgttcttctctccgtagtagctaacagtatagtgtggcctcgcatggagactttccctcctcgctggccccgcatctggcccggattaaccgccttgggctccctccccagattgccccacccaccgtcagcctcgtcaggtatgtctcgtgttccctaaccttgacgcttctcccttctcggcgcctgcttcgttggttgccttcagcggacgccgccgattcggctctcctgttcggcgccctccccagattgccccacccaccgtcagcctcgtcaggtatgtctagtgttccctaaccttgacgcttctcccttctcggcgcctgcttcgttggttgccttcagcggacgccgccgattcggctctcctgttcggcgccgtgtcttgcgacagacaatgctacattctggagtacatggattagatgggtgttgtgcactgcttttatatggatctaatgattgtggccttgaacgttctcgccaggcatatctcatgtttttacatggattagataagtacatgaatctttatttaggcctgtttggttactttagtctagggactaaagtttagtactccatatccagcttgatttgagggactaaaagtatccataacgcattaaatgactcgtaagaaaccaaaatgcctctcatcattctctggcattagagcatctgaaataaatgagagccaaaagtggaattaatatggtttagtcccttttatcacccctttaagggactagagactaaagcagtttaatccttgttttagtcctactatttggcaatttatagactaaatgagactaaaatggagggactaatctttagtccttggaaccaaacaggcccttaacccgaaggtaattgagattgcgaagaagatgaaagaggagagggtcaagttgtttacttcagaatattttgcttacagatgatacgactagatcaaatcagttgcattgtgagttgtgacatgttggcaggatgtcagtttcccttttaacctggctcttgtttgcttcctgtgtaatttgtgtatatccctgtgatgaacattttagtaatctgggtgctcattcaattggcgcgccctcctcatcactcttagatggggaggttgaaggaacccatatcgatgatgtatacaccgttgagatgtttgcttctcgtgtaatttgtgtatatccccgtgatgaacattttagtaatttgagtgctcattcagttggtgctccctcctcatcacgcaaataggtactgaagcccatatgactatgcagatctaggacagaatgtttgcaataaatactgacatggatatctagctttggctttgaaagatgtagggatcttttgttaaattgatttacctagggtcctgctacaagagcttacctgttacctcgttatatctttgtgagattacagcaaaagtatccaatttctacatattttactgctacacagatttgtctgtctgtttggtcatggatatggttcggttttactgctgtaaaaagggattaaaaaatctgcaacctgatttcaatttttattttttatttgcatcacgatgaaatggtagggtcctcccaggacaaaccatgctccggagacagaggcggcagagctggggcaggagcagagccatcacagaaattcttgtctccaggtatgttgaagtttcaacaacttggtttataaattaacatgattttaaaaaatcacagtgactcctcttgcagattttgtaaaatgtttttttctctactgcactgcctatcatttgctgcaatttgaggattataacattctagacacactaaaatctatcatctatcataaacagtagctatttccccctctgttctttgtgtctctgattgtgtggtaccagctactttggcatacatttgttttttgctttaatcttctgttcagcttctaattcagaaatctttacttcagataaccagaatacttcagcttccatagttccacttacacagttgtaacaatctagcctgtaatggcttgtaacagtacagtgagttgggagttgggacacctctgatgtttagagctccaatggtcctgtgggagggatatatttttgttttcatattgtttagccatggggtgccagggtctacgttctaccttggtttggttctctccttttctcctatctgtcaacacatagtcgtctattacttataaaaaaccacattttcccattttgatccctttatgaacaatgctggaaatcaaattctattcattttggaaaataattacatatttattcgtcgtagctatattccattgttttattaggtgctcaaaaattgtgttgaccggacacatgctattttggcctatgtgctatccattgctatgttttatcggtagggttttccatgcttagataacttcctaatttctcattttttgtaaataaataaatacttggagattcttggtcaaaggaatgttggacacctgctagccaatgtgcagccgcgagaggtctcagacagataagatggtcgacggcatggacttcgaggagctctgcagcgacttcgaatgcataagcagcccctacgtggagtccataatgaggcaggtcgcgcgggacatctttgagcttcgcgaggataaccgcgcattcagctgctacgccgtccccgtgaagctccttcctgatgataatttataatgataaatcgaggaaactccaataagtttccttcctttttttcctttcgtttttctcccttctctgatttttcagtgtggagggactggacttccgacaaaggaaatcacaacattgtatatgattgacttgtaatatgttagtaaatatgtctgtacgttatgacaagagatataacttgttttagggctagtttggtaacttcatttttttcaaggaattttttcatttttccgagggaaattagttcattttttacaggaaaaatgtaaatcccttgagaaaaatgagttgccaaactagctcttatctagataatttgtagctcaaaattttacatccaacaaacaaggtg

SEQ ID NO: 14520 - DNA, 2330 bp, Zea Mays
cagaacactacgagactacctccttctctccaagtcgttgtcttcttcggttcttcctagcgtctccccgttcttctctccgtagtagctaacagtatagtgtggcctcgcatggagactttccctcctcgctggccccgcatctggcccggattaaccgccttgggctccctccccagattgccccacccaccgtcagcctcgtcaggtatgtctcgtgttccctaaccttgacgcttctcccttctcggcgcctgcttcgttggttgccttcagcggacgccgccgattcggctctcctgttcggcgccctccccagattgccccacccaccgtcagcctcgtcaggtatgtctagtgttccctaaccttgacgcttctcccttctcggcgcctgcttcgttggttgccttcagcggacgccgccgattcggctctcctgttcggcgccgtgtcttgcgacagacaatgctacattctggagtacatggattagatgggtgttgtgcactgcttttatatggatctaatgattgtggccttgaacgttctcgccaggcatatctcatgtttttacatggattagataagtacatgaatctttatttaggcctgtttggttactttagtctagggactaaagtttagtactccatatccagcttgatttgagggactaaaagtatccataacgcattaaatgactcgtaagaaaccaaaatgcctctcatcattctctggcattagagcatctgaaataaatgagagccaaaagtggaattaatatggtttagtcccttttatcacccctttaagggactagagactaaagcagtttaatccttgttttagtcctactatttggcaatttatagactaaatgagactaaaatggagggactaatctttagtccttggaaccaaacaggcccttaacccgaaggtaattgagattgcgaagaagatgaaagaggagagggtcaagttgtttacttcagaatattttgcttacagatgatacgactagatcaaatcagttgcattgtgagttgtgacatgttggcaggatgtcagtttcccttttaacctggctcttgtttgcttcctgtgtaatttgtgtatatccctgtgatgaacattttagtaatctgggtgctcattcaattggcgcgccctcctcatcactcttagatggggaggttgaaggaacccatatcgatgatgtatacaccgttgagatgtttgcttctcgtgtaatttgtgtatatccccgtgatgaacattttagtaatttgagtgctcattcagttggtgctccctcctcatcacgcaaataggtactgaagcccatatgactatgcagatctaggacagaatgtttgcaataaatactgacatggatatctagctttggctttgaaagatgtagggatcttttgttaaattgatttacctagggtcctgctacaagagcttacctgttacctcgttatatctttgtgagattacagcaaaagtatccaatttctacatattttactgctacacagatttgtctgtctgtttggtcatggatatggttcggttttactgctgtaaaaagggattaaaaaatctgcaacctgatttcaatttttattttttatttgcatcacgatgaaatggtagggtcctcccaggacaaaccatgctccggagacagaggcggcagagctggggcaggagcagagccatcacagaaattcttgtctccagccaatgtgcagccgcgagaggtctcagacagataagatggtcgacggcatggacttcgaggagctctgcagcgacttcgaatgcataagcagcccctacgtggagtccataatgaggcaggtcgcgcgggacatctttgagcttcgcgaggataaccgcgcattcagctgctacgccgtccccgtgaagtatgaggctccttcctgatgataatttataatgataaatcgaggaaactccaataagtttccttcctttttttcctttcgtttttctcccttctctgatttttcagtgtggagggactggacttccgacaaaggaaatcacaacattgtatatgattgacttgtaatatgttagtaaatatgtctgtacgttatgacaagagatataacttgttttagggctagtttggtaacttcatttttttcaaggaattttttcatttttccgagggaaattagttcattttttacaggaaaaatgtaaatcccttgagaaaaatgagttgccaaactagctcttatctagataatttgtagctcaaaattttacatccaacaaacaaggtg

SEQ ID NO: 14521 - DNA, 3438 bp, Zea Mays
cagaacactacgagactacctccttctctccaagtcgttgtcttcttcggttcttcctagcgtctccccgttcttctctccgtagtagctaacagtatagtgtggcctcgcatggagactttccctcctcgctggccccgcatctggcccggattaaccgccttgggctccctccccagattgccccacccaccgtcagcctcgtcaggtatgtctcgtgttccctaaccttgacgcttctcccttctcggcgcctgcttcgttggttgccttcagcggacgccgccgattcggctctcctgttcggcgccctccccagattgccccacccaccgtcagcctcgtcaggtatgtctagtgttccctaaccttgacgcttctcccttctcggcgcctgcttcgttggttgccttcagcggacgccgccgattcggctctcctgttcggcgccgtgtcttgcgacagacaatgctacattctggagtacatggattagatgggtgttgtgcactgcttttatatggatctaatgattgtggccttgaacgttctcgccaggcatatctcatgtttttacatggattagataagtacatgaatctttatttaggcctgtttggttactttagtctagggactaaagtttagtactccatatccagcttgatttgagggactaaaagtatccataacgcattaaatgactcgtaagaaaccaaaatgcctctcatcattctctggcattagagcatctgaaataaatgagagccaaaagtggaattaatatggtttagtcccttttatcacccctttaagggactagagactaaagcagtttaatccttgttttagtcctactatttggcaatttatagactaaatgagactaaaatggagggactaatctttagtccttggaaccaaacaggcccttaacccgaaggtaattgagattgcgaagaagatgaaagaggagagggtcaagttgtttacttcagaatattttgcttacagatgatacgactagatcaaatcagttgcattgtgagttgtgacatgttggcaggatgtcagtttcccttttaacctggctcttgtttgcttcctgtgtaatttgtgtatatccctgtgatgaacattttagtaatctgggtgctcattcaattggcgcgccctcctcatcactcttagatggggaggttgaaggaacccatatcgatgatgtatacaccgttgagatgtttgcttctcgtgtaatttgtgtatatccccgtgatgaacattttagtaatttgagtgctcattcagttggtgctccctcctcatcacgcaaataggtactgaagcccatatgactatgcagatctaggacagaatgtttgcaataaatactgacatggatatctagctttggctttgaaagatgtagggatcttttgttaaattgatttacctagggtcctgctacaagagcttacctgttacctcgttatatctttgtgagattacagcaaaagtatccaatttctacatattttactgctacacagatttgtctgtctgtttggtcatggatatggttcggttttactgctgtaaaaagggattaaaaaatctgcaacctgatttcaatttttattttttatttgcatcacgatgaaatggtagggtcctcccaggacaaaccatgctccggagacagaggcggcagagctggggcaggagcagagccatcacagaaattcttgtctccaggtatgttgaagtttcaacaacttggtttataaattaacatgattttaaaaaatcacagtgactcctcttgcagattttgtaaaatgtttttttctctactgcactgcctatcatttgctgcaatttgaggattataacattctagacacactaaaatctatcatctatcataaacagtagctatttccccctctgttctttgtgtctctgattgtgtggtaccagctactttggcatacatttgttttttgctttaatcttctgttcagcttctaattcagaaatctttacttcagataaccagaatacttcagcttccatagttccacttacacagttgtaacaatctagcctgtaatggcttgtaacagtacagtgagttgggagttgggacacctctgatgtttagagctccaatggtcctgtgggagggatatatttttgttttcatattgtttagccatggggtgccagggtctacgttctaccttggtttggttctctccttttctcctatctgtcaacacatagtcgtctattacttataaaaaaccacattttcccattttgatccctttatgaacaatgctggaaatcaaattctattcattttggaaaataattacatatttattcgtcgtagctatattccattgttttattaggtgctcaaaaattgtgttgaccggacacatgctattttggcctatgtgctatccattgctatgttttatcggtagggttttccatgcttagataacttcctaatttctcattttttgtaaataaataaatacttggagattcttggtcaaaggaatgttggacacctgctagccaatgtgcagccgcgagaggtctcagacagataagatggtcgacggcatggacttcgaggagctctgcagcgacttcgaatgcataagcagcccctacgtggagtccataatgaggcaggtcgcgcgggacatctttgagcttcgcgaggataaccgcgcattcagctgctacgccgtccccgtgaagtatgaggtgttcctctgctatgtgaaatcttttacattttgtacattaattggctctttcaggcttttggtttgagtcctcttagatcgatatttcactttggattttgcacttgaaaacttgcaggcggttacactatgttgccacggttatcagtttctatgcgtttttatcatttatgttatatgacattttcatgacacgtatgtagagcatttgatagggcgtttttttctagtatcttgtaactcaccctcgtctttatttttttccccaggctccttcctgatgataatttataatgataaatcgaggaaactccaataagtttccttcctttttttcctttcgtttttctcccttctctgatttttcagtgtggagggactggacttccgacaaaggaaatcacaacattgtatatgattgacttgtaatatgttagtaaatatgtctgtacgttatgacaagagatataacttgttttagggctagtttggtaacttcatttttttcaaggaattttttcatttttccgagggaaattagttcattttttacaggaaaaatgtaaatcccttgagaaaaatgagttgccaaactagctcttatctagataatttgtagctcaaaattttacatccaacaaacaaggtg

SEQ ID NO: 14522 - DNA, 2961 bp, Zea Mays
cagaacactacgagactacctccttctctccaagtcgttgtcttcttcggttcttcctagcgtctccccgttcttctctccgtagtagctaacagtatagtgtggcctcgcatggagactttccctcctcgctggccccgcatctggcccggattaaccgccttgggctccctccccagattgccccacccaccgtcagcctcgtcaggtatgtctcgtgttccctaaccttgacgcttctcccttctcggcgcctgcttcgttggttgccttcagcggacgccgccgattcggctctcctgttcggcgccctccccagattgccccacccaccgtcagcctcgtcaggtatgtctagtgttccctaaccttgacgcttctcccttctcggcgcctgcttcgttggttgccttcagcggacgccgccgattcggctctcctgttcggcgccgtgtcttgcgacagacaatgctacattctggagtacatggattagatgggtgttgtgcactgcttttatatggatctaatgattgtggccttgaacgttctcgccaggcatatctcatgtttttacatggattagataagtacatgaatctttatttaggcctgtttggttactttagtctagggactaaagtttagtactccatatccagcttgatttgagggactaaaagtatccataacgcattaaatgactcgtaagaaaccaaaatgcctctcatcattctctggcattagagcatctgaaataaatgagagccaaaagtggaattaatatggtttagtcccttttatcacccctttaagggactagagactaaagcagtttaatccttgttttagtcctactatttggcaatttatagactaaatgagactaaaatggagggactaatctttagtccttggaaccaaacaggcccttaacccgaaggtaattgagattgcgaagaagatgaaagaggagagggtcaagttgtttacttcagaatattttgcttacagatgatacgactagatcaaatcagttgcattgtgagttgtgacatgttggcaggatgtcagtttcccttttaacctggctcttgtttgcttcctgtgtaatttgtgtatatccctgtgatgaacattttagtaatctgggtgctcattcaattggcgcgccctcctcatcactcttagatggggaggttgaaggaacccatatcgatgatgtatacaccgttgagatgtttgcttctcgtgtaatttgtgtatatccccgtgatgaacattttagtaatttgagtgctcattcagttggtgctccctcctcatcacgcaaataggtactgaagcccatatgactatgcagatctaggacagaatgtttgcaataaatactgacatggatatctagctttggctttgaaagatgtagggatcttttgttaaattgatttacctagggtcctgctacaagagcttacctgttacctcgttatatctttgtgagattacagcaaaagtatccaatttctacatattttactgctacacagatttgtctgtctgtttggtcatggatatggttcggttttactgctgtaaaaagggattaaaaaatctgcaacctgatttcaatttttattttttatttgcatcacgatgaaatggtagggtcctcccaggacaaaccatgctccggagacagaggcggcagagctggggcaggagcagagccatcacagaaattcttgtctccagataaccagaatacttcagcttccatagttccacttacacagttgtaacaatctagcctgtaatggcttgtaacagtacagtgagttgggagttgggacacctctgatgtttagagctccaatggtcctgtgggagggatatatttttgttttcatattgtttagccatggggtgccagggtctacgttctaccttggtttggttctctccttttctcctatctgtcaacacatagtcgtctattacttataaaaaaccacattttcccattttgatccctttatgaacaatgctggaaatcaaattctattcattttggaaaataattacatatttattcgtcgtagctatattccattgttttattaggtgctcaaaaattgtgttgaccggacacatgctattttggcctatgtgctatccattgctatgttttatcggtagggttttccatgcttagataacttcctaatttctcattttttgtaaataaataaatacttggagattcttggtcaaaggaatgttggacacctgctagccaatgtgcaggtaacaggaacctgaacaaaatggccttgcagtcttttttttttgactgtgtatatctttttcatgtggagtccattaaaaatccatgcataagcagccgcgagaggtctcagacagataagatggtcgacggcatggacttcgaggagctctgcagcgacttcgaatgcataagcagcccctacgtggagtccataatgaggcaggtcgcgcgggacatctttgagcttcgcgaggataaccgcgcattcagctgctacgccgtccccgtgaagctccttcctgatgataatttataatgataaatcgaggaaactccaataagtttccttcctttttttcctttcgtttttctcccttctctgatttttcagtgtggagggactggacttccgacaaaggaaatcacaacattgtatatgattgacttgtaatatgttagtaaatatgtctgtacgttatgacaagagatataacttgttttagggctagtttggtaacttcatttttttcaaggaattttttcatttttccgagggaaattagttcattttttacaggaaaaatgtaaatcccttgagaaaaatgagttgccaaactagctcttatctagataatttgtagctcaaaattttacatccaacaaacaaggtg

SEQ ID NO: 14523 - DNA, 2871 bp, Zea Mays
cagaacactacgagactacctccttctctccaagtcgttgtcttcttcggttcttcctagcgtctccccgttcttctctccgtagtagctaacagtatagtgtggcctcgcatggagactttccctcctcgctggccccgcatctggcccggattaaccgccttgggctccctccccagattgccccacccaccgtcagcctcgtcaggtatgtctcgtgttccctaaccttgacgcttctcccttctcggcgcctgcttcgttggttgccttcagcggacgccgccgattcggctctcctgttcggcgccctccccagattgccccacccaccgtcagcctcgtcaggtatgtctagtgttccctaaccttgacgcttctcccttctcggcgcctgcttcgttggttgccttcagcggacgccgccgattcggctctcctgttcggcgccgtgtcttgcgacagacaatgctacattctggagtacatggattagatgggtgttgtgcactgcttttatatggatctaatgattgtggccttgaacgttctcgccaggcatatctcatgtttttacatggattagataagtacatgaatctttatttaggcctgtttggttactttagtctagggactaaagtttagtactccatatccagcttgatttgagggactaaaagtatccataacgcattaaatgactcgtaagaaaccaaaatgcctctcatcattctctggcattagagcatctgaaataaatgagagccaaaagtggaattaatatggtttagtcccttttatcacccctttaagggactagagactaaagcagtttaatccttgttttagtcctactatttggcaatttatagactaaatgagactaaaatggagggactaatctttagtccttggaaccaaacaggcccttaacccgaaggtaattgagattgcgaagaagatgaaagaggagagggtcaagttgtttacttcagaatattttgcttacagatgatacgactagatcaaatcagttgcattgtgagttgtgacatgttggcaggatgtcagtttcccttttaacctggctcttgtttgcttcctgtgtaatttgtgtatatccctgtgatgaacattttagtaatctgggtgctcattcaattggcgcgccctcctcatcactcttagatggggaggttgaaggaacccatatcgatgatgtatacaccgttgagatgtttgcttctcgtgtaatttgtgtatatccccgtgatgaacattttagtaatttgagtgctcattcagttggtgctccctcctcatcacgcaaataggtactgaagcccatatgactatgcagatctaggacagaatgtttgcaataaatactgacatggatatctagctttggctttgaaagatgtagggatcttttgttaaattgatttacctagggtcctgctacaagagcttacctgttacctcgttatatctttgtgagattacagcaaaagtatccaatttctacatattttactgctacacagatttgtctgtctgtttggtcatggatatggttcggttttactgctgtaaaaagggattaaaaaatctgcaacctgatttcaatttttattttttatttgcatcacgatgaaatggtagggtcctcccaggacaaaccatgctccggagacagaggcggcagagctggggcaggagcagagccatcacagaaattcttgtctccagataaccagaatacttcagcttccatagttccacttacacagttgtaacaatctagcctgtaatggcttgtaacagtacagtgagttgggagttgggacacctctgatgtttagagctccaatggtcctgtgggagggatatatttttgttttcatattgtttagccatggggtgccagggtctacgttctaccttggtttggttctctccttttctcctatctgtcaacacatagtcgtctattacttataaaaaaccacattttcccattttgatccctttatgaacaatgctggaaatcaaattctattcattttggaaaataattacatatttattcgtcgtagctatattccattgttttattaggtgctcaaaaattgtgttgaccggacacatgctattttggcctatgtgctatccattgctatgttttatcggtagggttttccatgcttagataacttcctaatttctcattttttgtaaataaataaatacttggagattcttggtcaaaggaatgttggacacctgctagccaatgtgcagccgcgagaggtctcagacagataagatggtcgacggcatggacttcgaggagctctgcagcgacttcgaatgcataagcagcccctacgtggagtccataatgaggcaggtcgcgcgggacatctttgagcttcgcgaggataaccgcgcattcagctgctacgccgtccccgtgaagtatgaggctccttcctgatgataatttataatgataaatcgaggaaactccaataagtttccttcctttttttcctttcgtttttctcccttctctgatttttcagtgtggagggactggacttccgacaaaggaaatcacaacattgtatatgattgacttgtaatatgttagtaaatatgtctgtacgttatgacaagagatataacttgttttagggctagtttggtaacttcatttttttcaaggaattttttcatttttccgagggaaattagttcattttttacaggaaaaatgtaaatcccttgagaaaaatgagttgccaaactagctcttatctagataatttgtagctcaaaattttacatccaacaaacaaggtg

SEQ ID NO: 14524 - DNA, 2312 bp, Zea Mays
cagaacactacgagactacctccttctctccaagtcgttgtcttcttcggttcttcctagcgtctccccgttcttctctccgtagtagctaacagtatagtgtggcctcgcatggagactttccctcctcgctggccccgcatctggcccggattaaccgccttgggctccctccccagattgccccacccaccgtcagcctcgtcaggtatgtctcgtgttccctaaccttgacgcttctcccttctcggcgcctgcttcgttggttgccttcagcggacgccgccgattcggctctcctgttcggcgccctccccagattgccccacccaccgtcagcctcgtcaggtatgtctagtgttccctaaccttgacgcttctcccttctcggcgcctgcttcgttggttgccttcagcggacgccgccgattcggctctcctgttcggcgccgtgtcttgcgacagacaatgctacattctggagtacatggattagatgggtgttgtgcactgcttttatatggatctaatgattgtggccttgaacgttctcgccaggcatatctcatgtttttacatggattagataagtacatgaatctttatttaggcctgtttggttactttagtctagggactaaagtttagtactccatatccagcttgatttgagggactaaaagtatccataacgcattaaatgactcgtaagaaaccaaaatgcctctcatcattctctggcattagagcatctgaaataaatgagagccaaaagtggaattaatatggtttagtcccttttatcacccctttaagggactagagactaaagcagtttaatccttgttttagtcctactatttggcaatttatagactaaatgagactaaaatggagggactaatctttagtccttggaaccaaacaggcccttaacccgaaggtaattgagattgcgaagaagatgaaagaggagagggtcaagttgtttacttcagaatattttgcttacagatgatacgactagatcaaatcagttgcattgtgagttgtgacatgttggcaggatgtcagtttcccttttaacctggctcttgtttgcttcctgtgtaatttgtgtatatccctgtgatgaacattttagtaatctgggtgctcattcaattggcgcgccctcctcatcactcttagatggggaggttgaaggaacccatatcgatgatgtatacaccgttgagatgtttgcttctcgtgtaatttgtgtatatccccgtgatgaacattttagtaatttgagtgctcattcagttggtgctccctcctcatcacgcaaataggtactgaagcccatatgactatgcagatctaggacagaatgtttgcaataaatactgacatggatatctagctttggctttgaaagatgtagggatcttttgttaaattgatttacctagggtcctgctacaagagcttacctgttacctcgttatatctttgtgagattacagcaaaagtatccaatttctacatattttactgctacacagatttgtctgtctgtttggtcatggatatggttcggttttactgctgtaaaaagggattaaaaaatctgcaacctgatttcaatttttattttttatttgcatcacgatgaaatggtagggtcctcccaggacaaaccatgctccggagacagaggcggcagagctggggcaggagcagagccatcacagaaattcttgtctccagccgcgagaggtctcagacagataagatggtcgacggcatggacttcgaggagctctgcagcgacttcgaatgcataagcagcccctacgtggagtccataatgaggcaggtcgcgcgggacatctttgagcttcgcgaggataaccgcgcattcagctgctacgccgtccccgtgaagctccttcctgatgataatttataatgataaatcgaggaaactccaataagtttccttcctttttttcctttcgtttttctcccttctctgatttttcagtgtggagggactggacttccgacaaaggaaatcacaacattgtatatgattgacttgtaatatgttagtaaatatgtctgtacgttatgacaagagatataacttgttttagggctagtttggtaacttcatttttttcaaggaattttttcatttttccgagggaaattagttcattttttacaggaaaaatgtaaatcccttgagaaaaatgagttgccaaactagctcttatctagataatttgtagctcaaaattttacatccaacaaacaaggtg

SEQ ID NO: 14525 - DNA, 2345 bp, Zea Mays
cagaacactacgagactacctccttctctccaagtcgttgtcttcttcggttcttcctagcgtctccccgttcttctctccgtagtagctaacagtatagtgtggcctcgcatggagactttccctcctcgctggccccgcatctggcccggattaaccgccttgggctccctccccagattgccccacccaccgtcagcctcgtcaggtatgtctcgtgttccctaaccttgacgcttctcccttctcggcgcctgcttcgttggttgccttcagcggacgccgccgattcggctctcctgttcggcgccctccccagattgccccacccaccgtcagcctcgtcaggtatgtctagtgttccctaaccttgacgcttctcccttctcggcgcctgcttcgttggttgccttcagcggacgccgccgattcggctctcctgttcggcgccgtgtcttgcgacagacaatgctacattctggagtacatggattagatgggtgttgtgcactgcttttatatggatctaatgattgtggccttgaacgttctcgccaggcatatctcatgtttttacatggattagataagtacatgaatctttatttaggcctgtttggttactttagtctagggactaaagtttagtactccatatccagcttgatttgagggactaaaagtatccataacgcattaaatgactcgtaagaaaccaaaatgcctctcatcattctctggcattagagcatctgaaataaatgagagccaaaagtggaattaatatggtttagtcccttttatcacccctttaagggactagagactaaagcagtttaatccttgttttagtcctactatttggcaatttatagactaaatgagactaaaatggagggactaatctttagtccttggaaccaaacaggcccttaacccgaaggtaattgagattgcgaagaagatgaaagaggagagggtcaagttgtttacttcagaatattttgcttacagatgatacgactagatcaaatcagttgcattgtgagttgtgacatgttggcaggatgtcagtttcccttttaacctggctcttgtttgcttcctgtgtaatttgtgtatatccctgtgatgaacattttagtaatctgggtgctcattcaattggcgcgccctcctcatcactcttagatggggaggttgaaggaacccatatcgatgatgtatacaccgttgagatgtttgcttctcgtgtaatttgtgtatatccccgtgatgaacattttagtaatttgagtgctcattcagttggtgctccctcctcatcacgcaaataggtactgaagcccatatgactatgcagatctaggacagaatgtttgcaataaatactgacatggatatctagctttggctttgaaagatgtagggatcttttgttaaattgatttacctagggtcctgctacaagagcttacctgttacctcgttatatctttgtgagattacagcaaaagtatccaatttctacatattttactgctacacagatttgtctgtctgtttggtcatggatatggttcggttttactgctgtaaaaagggattaaaaaatctgcaacctgatttcaatttttattttttatttgcatcacgatgaaatggtagggtcctcccaggacaaaccatgctccggagacagaggcggcagagctggggcaggagcagagccatcacagaaattcttgtctccagtccattaaaaatccatgcataagcagccgcgagaggtctcagacagataagatggtcgacggcatggacttcgaggagctctgcagcgacttcgaatgcataagcagcccctacgtggagtccataatgaggcaggtcgcgcgggacatctttgagcttcgcgaggataaccgcgcattcagctgctacgccgtccccgtgaagtatgaggctccttcctgatgataatttataatgataaatcgaggaaactccaataagtttccttcctttttttcctttcgtttttctcccttctctgatttttcagtgtggagggactggacttccgacaaaggaaatcacaacattgtatatgattgacttgtaatatgttagtaaatatgtctgtacgttatgacaagagatataacttgttttagggctagtttggtaacttcatttttttcaaggaattttttcatttttccgagggaaattagttcattttttacaggaaaaatgtaaatcccttgagaaaaatgagttgccaaactagctcttatctagataatttgtagctcaaaattttacatccaacaaacaaggtg

SEQ ID NO: 14526 - DNA, 3167 bp, Zea Mays
cagaacactacgagactacctccttctctccaagtcgttgtcttcttcggttcttcctagcgtctccccgttcttctctccgtagtagctaacagtatagtgtggcctcgcatggagactttccctcctcgctggccccgcatctggcccggattaaccgccttgggctccctccccagattgccccacccaccgtcagcctcgtcaggtatgtctcgtgttccctaaccttgacgcttctcccttctcggcgcctgcttcgttggttgccttcagcggacgccgccgattcggctctcctgttcggcgccctccccagattgccccacccaccgtcagcctcgtcaggtatgtctagtgttccctaaccttgacgcttctcccttctcggcgcctgcttcgttggttgccttcagcggacgccgccgattcggctctcctgttcggcgccgtgtcttgcgacagacaatgctacattctggagtacatggattagatgggtgttgtgcactgcttttatatggatctaatgattgtggccttgaacgttctcgccaggcatatctcatgtttttacatggattagataagtacatgaatctttatttaggcctgtttggttactttagtctagggactaaagtttagtactccatatccagcttgatttgagggactaaaagtatccataacgcattaaatgactcgtaagaaaccaaaatgcctctcatcattctctggcattagagcatctgaaataaatgagagccaaaagtggaattaatatggtttagtcccttttatcacccctttaagggactagagactaaagcagtttaatccttgttttagtcctactatttggcaatttatagactaaatgagactaaaatggagggactaatctttagtccttggaaccaaacaggcccttaacccgaaggtaattgagattgcgaagaagatgaaagaggagagggtcaagttgtttacttcagaatattttgcttacagatgatacgactagatcaaatcagttgcattgtgagttgtgacatgttggcaggatgtcagtttcccttttaacctggctcttgtttgcttcctgtgtaatttgtgtatatccctgtgatgaacattttagtaatctgggtgctcattcaattggcgcgccctcctcatcactcttagatggggaggttgaaggaacccatatcgatgatgtatacaccgttgagatgtttgcttctcgtgtaatttgtgtatatccccgtgatgaacattttagtaatttgagtgctcattcagttggtgctccctcctcatcacgcaaataggtactgaagcccatatgactatgcagatctaggacagaatgtttgcaataaatactgacatggatatctagctttggctttgaaagatgtagggatcttttgttaaattgatttacctagggtcctgctacaagagcttacctgttacctcgttatatctttgtgagattacagcaaaagtatccaatttctacatattttactgctacacagatttgtctgtctgtttggtcatggatatggttcggttttactgctgtaaaaagggattaaaaaatctgcaacctgatttcaatttttattttttatttgcatcacgatgaaatggtagggtcctcccaggacaaaccatgctccggagacagaggcggcagagctggggcaggagcagagccatcacagaaattcttgtctccaggtatgttgaagtttcaacaacttggtttataaattaacatgattttaaaaaatcacagtgactcctcttgcagattttgtaaaatgtttttttctctactgcactgcctatcatttgctgcaatttgaggattataacattctagacacactaaaatctatcatctatcataaacagtagctatttccccctctgttctttgtgtctctgattgtgtggtaccagctactttggcatacatttgttttttgctttaatcttctgttcagcttctaattcagaaatctttacttcagataaccagaatacttcagcttccatagttccacttacacagttgtaacaatctagcctgtaatggcttgtaacagtacagtgagttgggagttgggacacctctgatgtttagagctccaatggtcctgtgggagggatatatttttgttttcatattgtttagccatggggtgccagggtctacgttctaccttggtttggttctctccttttctcctatctgtcaacacatagtcgtctattacttataaaaaaccacattttcccattttgatccctttatgaacaatgctggaaatcaaattctattcattttggaaaataattacatatttattcgtcgtagctatattccattgttttattaggtgctcaaaaattgtgttgaccggacacatgctattttggcctatgtgctatccattgctatgttttatcggtagggttttccatgcttagataacttcctaatttctcattttttgtaaataaataaatacttggagattcttggtcaaaggaatgttggacacctgctagccaatgtgcagccgcgagaggtctcagacagataagatggtcgacggcatggacttcgaggagctctgcagcgacttcgaatgcataagcagcccctacgtggagtccataatgaggcaggtcgcgcgggacatctttgagcttcgcgaggataaccgcgcattcagctgctacgccgtccccgtgaagtatgaggctccttcctgatgataatttataatgataaatcgaggaaactccaataagtttccttcctttttttcctttcgtttttctcccttctctgatttttcagtgtggagggactggacttccgacaaaggaaatcacaacattgtatatgattgacttgtaatatgttagtaaatatgtctgtacgttatgacaagagatataacttgttttagggctagtttggtaacttcatttttttcaaggaattttttcatttttccgagggaaattagttcattttttacaggaaaaatgtaaatcccttgagaaaaatgagttgccaaactagctcttatctagataatttgtagctcaaaattttacatccaacaaacaaggtg

SEQ ID NO: 14527 - DNA, 2590 bp, Zea Mays
cagaacactacgagactacctccttctctccaagtcgttgtcttcttcggttcttcctagcgtctccccgttcttctctccgtagtagctaacagtatagtgtggcctcgcatggagactttccctcctcgctggccccgcatctggcccggattaaccgccttgggctccctccccagattgccccacccaccgtcagcctcgtcaggtatgtctcgtgttccctaaccttgacgcttctcccttctcggcgcctgcttcgttggttgccttcagcggacgccgccgattcggctctcctgttcggcgccctccccagattgccccacccaccgtcagcctcgtcaggtatgtctagtgttccctaaccttgacgcttctcccttctcggcgcctgcttcgttggttgccttcagcggacgccgccgattcggctctcctgttcggcgccgtgtcttgcgacagacaatgctacattctggagtacatggattagatgggtgttgtgcactgcttttatatggatctaatgattgtggccttgaacgttctcgccaggcatatctcatgtttttacatggattagataagtacatgaatctttatttaggcctgtttggttactttagtctagggactaaagtttagtactccatatccagcttgatttgagggactaaaagtatccataacgcattaaatgactcgtaagaaaccaaaatgcctctcatcattctctggcattagagcatctgaaataaatgagagccaaaagtggaattaatatggtttagtcccttttatcacccctttaagggactagagactaaagcagtttaatccttgttttagtcctactatttggcaatttatagactaaatgagactaaaatggagggactaatctttagtccttggaaccaaacaggcccttaacccgaaggtaattgagattgcgaagaagatgaaagaggagagggtcaagttgtttacttcagaatattttgcttacagatgatacgactagatcaaatcagttgcattgtgagttgtgacatgttggcaggatgtcagtttcccttttaacctggctcttgtttgcttcctgtgtaatttgtgtatatccctgtgatgaacattttagtaatctgggtgctcattcaattggcgcgccctcctcatcactcttagatggggaggttgaaggaacccatatcgatgatgtatacaccgttgagatgtttgcttctcgtgtaatttgtgtatatccccgtgatgaacattttagtaatttgagtgctcattcagttggtgctccctcctcatcacgcaaataggtactgaagcccatatgactatgcagatctaggacagaatgtttgcaataaatactgacatggatatctagctttggctttgaaagatgtagggatcttttgttaaattgatttacctagggtcctgctacaagagcttacctgttacctcgttatatctttgtgagattacagcaaaagtatccaatttctacatattttactgctacacagatttgtctgtctgtttggtcatggatatggttcggttttactgctgtaaaaagggattaaaaaatctgcaacctgatttcaatttttattttttatttgcatcacgatgaaatggtagggtcctcccaggacaaaccatgctccggagacagaggcggcagagctggggcaggagcagagccatcacagaaattcttgtctccagccgcgagaggtctcagacagataagatggtcgacggcatggacttcgaggagctctgcagcgacttcgaatgcataagcagcccctacgtggagtccataatgaggcaggtcgcgcgggacatctttgagcttcgcgaggataaccgcgcattcagctgctacgccgtccccgtgaagtatgaggtgttcctctgctatgtgaaatcttttacattttgtacattaattggctctttcaggcttttggtttgagtcctcttagatcgatatttcactttggattttgcacttgaaaacttgcaggcggttacactatgttgccacggttatcagtttctatgcgtttttatcatttatgttatatgacattttcatgacacgtatgtagagcatttgatagggcgtttttttctagtatcttgtaactcaccctcgtctttatttttttccccaggctccttcctgatgataatttataatgataaatcgaggaaactccaataagtttccttcctttttttcctttcgtttttctcccttctctgatttttcagtgtggagggactggacttccgacaaaggaaatcacaacattgtatatgattgacttgtaatatgttagtaaatatgtctgtacgttatgacaagagatataacttgttttagggctagtttggtaacttcatttttttcaaggaattttttcatttttccgagggaaattagttcattttttacaggaaaaatgtaaatcccttgagaaaaatgagttgccaaactagctcttatctagataatttgtagctcaaaattttacatccaacaaacaaggtg

SEQ ID NO: 14528 - DNA, 1828 bp, Zea Mays
acagaacactctatgagactacttccttctctccaagtcgttgtcttcttcctagcgtctccccgttcttctctccgtagtagctaacagtatagtgtgggcgtgtggccccgcatggagactttccctcctcgctggccccgcatctggcccggattaaccgccttcggctcccttcccagattgccccacccaccgtcagcctcgtcaggcccttaacccgaagggtcctcccaggacaaaccatgctccggagacagaggcggcagagctggggcaggagcagagccatcacagaaattcttgtctccaggtatgttgaagtttcaacaacttggtttataaattaacatgattttaaaaaatcacagtgactcctcttgcagattttgtaaaatgttttttttctctagtgcactgcctatcatttgctgcaatttgaggatgataacattctagacacactaaaatctatcatctatcataaacagtagctatttccccctctgttctttgtgtctctgattgtgtggtaccagctactttggcatacatttgttttttgctttaatcttctgttcagcttctaattcagaaatctttacttcagataaccagaatacttcagcttccatagttccacttccacagttgtaacaatctagcctgtaatggcttgtaacagtacagtgagttgggacacctctgatgtttagagctccaatggtcctgtgggagggatatatttttgttttcatagtgtttagccatggggtgccagggtctacgttctaccttggtttggttctctccttttctcctatctgtcaacacatagtcgtctattacttataaaaaaccacattttcccattttgatccctttatgaacaatgctggaaatcaaattctattcattttggaaaataattacatatttattcgtcgtagctatattccattgttttattaggtgctcaaaaattgtgttgaccggacacatgctattttggcctatgtgctatccatttctatgttttatcggtagggttttccatgcttagataacttcctaatttctcattttttttgtaaataaataaatacttggagattcttggtcaaaggaatgttggacacctgctagccaatgtgcaggtaacaggaacctgaacaaaatggccttgcagtctttttttttactgtgtatatctttttcatgtggagtccattaaaaatccatgcataagcagccgcgagaggtctcagacagataagatggtcgacggcatggacttcgaggagctctgcagcgacttcgaatgcataagcagcccctacgtggagtccataatgaggcaggtcgcgcgggacatctttgagcttcgcgaggataaccgcgcattcagctgctacgccgtccccgtgaagctccttcctgatgataatttataattataaatcgaggaaactccaataagtttccttcctttttttcctttcgtttttctcccttctctgatttttcactgtggagggactggacttccgacaaaggaaatcacaacattgtatatgattgacttgtaatatgttagtaaatatatctgtacgttatgacaagagatataacttgttttagggctagtttggtaactttatttttttcaaggaattttttcatttttccgagggaaattagttcattttttacaggaaaaatgtaaatcccttgagaaaaatgagttgccaaactagctcttatctagataatttgtagctcaaaattttacatccaacaaacaaggtgtatatatatgtatatttac

SEQ ID NO: 14529 - DNA, 1516 bp, Zea Mays
acagaacactctatgagactacttccttctctccaagtcgttgtcttcttcctagcgtctccccgttcttctctccgtagtagctaacagtatagtgtgggcgtgtggccccgcatggagactttccctcctcgctggccccgcatctggcccggattaaccgccttcggctcccttcccagattgccccacccaccgtcagcctcgtcagggtcctcccaggacaaaccatgctccggagacagaggcggcagagctggggcaggagcagagccatcacagaaattcttgtctccagataaccagaatacttcagcttccatagttccacttccacagttgtaacaatctagcctgtaatggcttgtaacagtacagtgagttgggacacctctgatgtttagagctccaatggtcctgtgggagggatatatttttgttttcatagtgtttagccatggggtgccagggtctacgttctaccttggtttggttctctccttttctcctatctgtcaacacatagtcgtctattacttataaaaaaccacattttcccattttgatccctttatgaacaatgctggaaatcaaattctattcattttggaaaataattacatatttattcgtcgtagctatattccattgttttattaggtgctcaaaaattgtgttgaccggacacatgctattttggcctatgtgctatccatttctatgttttatcggtagggttttccatgcttagataacttcctaatttctcattttttttgtaaataaataaatacttggagattcttggtcaaaggaatgttggacacctgctagccaatgtgcaggtaacaggaacctgaacaaaatggccttgcagtctttttttttactgtgtatatctttttcatgtggagtccattaaaaatccatgcataagcagccgcgagaggtctcagacagataagatggtcgacggcatggacttcgaggagctctgcagcgacttcgaatgcataagcagcccctacgtggagtccataatgaggcaggtcgcgcgggacatctttgagcttcgcgaggataaccgcgcattcagctgctacgccgtccccgtgaagctccttcctgatgataatttataattataaatcgaggaaactccaataagtttccttcctttttttcctttcgtttttctcccttctctgatttttcactgtggagggactggacttccgacaaaggaaatcacaacattgtatatgattgacttgtaatatgttagtaaatatatctgtacgttatgacaagagatataacttgttttagggctagtttggtaactttatttttttcaaggaattttttcatttttccgagggaaattagttcattttttacaggaaaaatgtaaatcccttgagaaaaatgagttgccaaactagctcttatctagataatttgtagctcaaaattttacatccaacaaacaaggtgtatatatatgtatatttac

SEQ ID NO: 14530 - DNA, 805 bp, Zea Mays
ggtcgtccggagcttcagtcgggaagagaatagcaaggaagataaggaggctctcgccgtctcgcacaggctcgttgttcctcttatccgcggaggaagaaccttggcccgacaccatgctcccaatggccgtccaccccaccaccacgccggccttgtccccgcgcgcccgcgtctcgccgcacaggcctcccatctcctccctggcggacccctcgtcctccccctgccatcgcatcgtcagtttcaaaagcaggaggctgccacttcgctctctccacatcgccgctgccgctgccgccggggcagaggaagaagaggcgcaactaggtggaagtgtgaacgcggtcgacgaggaggaagcggagaataaggtggtggtgcccgagagacaggacccgatgctggtactcaagttcatctggatggagaagaacatcggcatagcactcgaccagctggttcctggctatggcagcatcccgttgagcccgtactacttctggccgcggaaggacgcgtgggaggagcttagagccaagttggaagagaaagagtggatctcgcagaagcagatgatcatccttctcaaccaggccaccgatatcatcaacctctggcagcagggtggtgggaacctgtcgacatgagtccctccccgccctgttctttcaaccgtgcaaagcttgcgttttgttggtttcactacaggctctctctgttgttaatgttaaaagtatggtacatggccttgtagatcggttcaaactgttctcaggttgtcctcctgacaaggaggtggagt

SEQ ID NO: 14531 - DNA, 1929 bp, Zea Mays
ttgtcgatggctccgctcctccgcctgcgcctgcccggtgggccagatagcccacatgcaccgcgcagtattagggctgccacggtggcgccgacacgcgtcgatatctcattggagtgcaggactcggaggcagcccatttctaggcagcgccgtctcttcgcgcaccccccaattcgaacgacggagcacgacgcacgcagagccgcagaggtacccctcgctcccttctccgcccctcggcttctcctcctctcttgaatctgggtcgctgctgcttcgattccctttcttccctgacgcttgcttgcttttgcgtccgatttgtaatctaaacatctcgtttccgcacgggtttggtgcgcgtctacttgtggttgggcctctttcgatcgagtaggctcgaggacggggatccatgcccgcttgacctgacgtgatacgcgtactacggatccgtcaaagcctgtactccagacgaaccagtcgattctgtgtaatcatgcatattaagcggcagtttttaccgcttgaaggtcgtcgtagttaggtgctcagatctggcgcttttcaagatccgtcacactgcaagttttgaaaactgaactgtaagatggcatcagcagagctttcccgtgaggaaaatgtgtacatggcgaagctcgccgagcaggcagagaggtacgaggaaatggttgagttcatggagaaggtagcgaaaactgttgactcggaggagctcactgtggaggagcgcaacctcctgtctgttgcatacaagaacgtcattggagcccgccgtgcctcatggcgcatcatctcctccatcgagcagaaggaggagggtcgaggcaatgaggaccgtgtaacactcatcaaggactaccgtggcaagattgaaactgagctcaccaagatctgtgatggcatcctcaagcttctcgaatctcaccttgtgccgtcttccaccgctcccgagtccaaggtcttctatctcaagatgaagggtgactactacagataccttgctgagttcaagactggagctgagagaaaggacgctgctgagaacaccatggtggcatacaaggctgcccaggacattgctttggctgagcttgctccaactcaccctattaggcttggactggcactcaacttctcagtgttctactatgagattctcaactcacccgatcgcgcctgcagtcttgcaaagcaggcttttgacgaggccatctcggaactggacaccctgagcgaggagtcctacaaggacagcactttgatcatgcagctccttcgtgataacttgaccctatggacttctgacatctcggaggaccctgcggaagagatcagggaggcgcccaagcacgactcgagcgaggggcagtaaagccggctttacgtgcctagaagctagtacctagtgtttgctgctgtctaatgacactatgcaatgtgatctggaccctggtttcttgggtgcgacgcttgtagcagccgtgttatgattatttgtcgggaaaatttgggggctccccatatgagatgctgccgggcaagacctcggcatcccacctcgtttcaggcgggggacgctggagcgtggtccggttgtgttgggaagccccttaaactgttgtcgcttgcattttaaccttttcatcgccgttcagtggtcctaaatctatggctcgtctcagtggtctagtatatgttttcttggttctctcttgattcctcacacggtgagtgggaccgttcgcatttgtctgtcccatcccatcttaacggtgaatgtgttttgtttggtgtctcgttctgatgtgaatttgcagcatctcgatttcatcttcaataagatagtattatataaatactgtcctttcagattagactattaaaaatatattctaacaaatc

SEQ ID NO: 14532 - DNA, 1467 bp, Zea Mays
ttgtcgatggctccgctcctccgcctgcgcctgcccggtgggccagatagcccacatgcaccgcgcagtattagggctgccacggtggcgccgacacgcgtcgatatctcattggagtgcaggactcggaggcagcccatttctaggcagcgccgtctcttcgcgcaccccccaattcgaacgacggagcacgacgcacgcagagccgcagagatccgtcacactgcaagttttgaaaactgaactgtaagatggcatcagcagagctttcccgtgaggaaaatgtgtacatggcgaagctcgccgagcaggcagagagaacgtcattggagcccgccgtgcctcatggcgcatcatctcctccatcgagcagaaggaggagggtcgaggcaatgaggaccgtgtaacactcatcaaggactaccgtggcaagattgaaactgagctcaccaagatctgtgatggcatcctcaagcttctcgaatctcaccttgtgccgtcttccaccgctcccgagtccaaggtcttctatctcaagatgaagggtgactactacagataccttgctgagttcaagactggagctgagagaaaggacgctgctgagaacaccatggtggcatacaaggctgcccaggacattgctttggctgagcttgctccaactcaccctattaggcttggactggcactcaacttctcagtgttctactatgagattctcaactcacccgatcgcgcctgcagtcttgcaaagcaggcttttgacgaggccatctcggaactggacaccctgagcgaggagtcctacaaggacagcactttgatcatgcagctccttcgtgataacttgaccctatggacttctgacatctcggaggaccctgcggaagagatcagggaggcgcccaagcacgactcgagcgaggggcagtaaagccggctttacgtgcctagaagctagtacctagtgtttgctgctgtctaatgacactatgcaatgtgatctggaccctggtttcttgggtgcgacgcttgtagcagccgtgttatgattatttgtcgggaaaatttgggggctccccatatgagatgctgccgggcaagacctcggcatcccacctcgtttcaggcgggggacgctggagcgtggtccggttgtgttgggaagccccttaaactgttgtcgcttgcattttaaccttttcatcgccgttcagtggtcctaaatctatggctcgtctcagtggtctagtatatgttttcttggttctctcttgattcctcacacggtgagtgggaccgttcgcatttgtctgtcccatcccatcttaacggtgaatgtgttttgtttggtgtctcgttctgatgtgaatttgcagcatctcgatttcatcttcaataagatagtattatataaatactgtcctttcagattagactattaaaaatatattctaacaaatc

SEQ ID NO: 14533 - DNA, 1365 bp, Zea Mays
gtgattagcaaaaccggccgtttggttggggacagaccacggctaccgaacagccgggttccacgaccaacccaaccgcgggggaaaggggaaaaccccacggcccggagcaacccttgggaaagtcgtcgacgccgttgagttcgaggcgaccggcggctcgccgccccgccacagcgccgctgcgatttcttctgatccctgtggctcagcgcggagggttaaatggcaaatagagcaagatggatgatgaagtacgaaaagggtcttgttgatatacttcatgagaacaatacttcacattatcgtacccaaaacggttggagaacggaggggtggaggaaaatcgttagggatttcaatagtgcatccatggttagaacaacagatgaaatctgggatgatataatcgaggatatgcccaaggcacggaagtaccaaagtaagagctttccattgctcgactcactagaactgttatttgatggtccaattcctgaagggggacagaaatcgccttccagcgtacctcagaatgttggtgaaaatgttgacgatggaggcaacaataccagcacagtcccagcaaacagcattaggacctcaaggcatagatgatctcgacacgctgcaaaaacgcggcgaagaggtgctggaacggctacagcatggcgcggaccgaaggctaccgagagctgatgaccaggcgcagtcgagttcttgtgtagaactgcagagggacaggcgcaagaagcggaaggccccggacgtccagcagatgatggagacctatttgaatttcaggatgaagcaagctcacgtcaaagaacaaagagcgaaggacgctggccagttcacgatttcaggctgtatcaaggctctgcacaccatggccgatgtgtcagacgaggtcaaggtgttagcctctgatgttttcaaggacgctgagaacagggagatctttctctcctatgaacccaggctgcgcagcttgtggctgaagagggaagttggcaagctactctcctgatagtggtgttttgtttgttacctgtgtcagtgagtcagtctgacattcgattctggagggagctattgaaggtctaggcttcattcacaaactctattaaaccatctccgtcagtttgagagaacactcccctttttcctaaaacctgccatatataggggaattaggtgaaaagagccgctccagcatatcctatctcaatcatctttttctatatttttcaatccatcacaacatctcctcaatccctaagaaatattcgttttaaccttaatccacgtgcattggacaagacgtcgtctttttccttaattctctttctgtcactgacgcac

SEQ ID NO: 14534 - DNA, 1495 bp, Zea Mays
gtgattagcaaaaccggccgtttggttggggacagaccacggctaccgaacagccgggttccacgaccaacccaaccgcgggggaaaggggaaaaccccacggcccggagcaacccttgggaaagtcgtcgacgccgttgagttcgaggcgaccggcggctcgccgccccgccacagcgccgctgcgatttcttctgatccctgtggctcagcgcggagggttaaatggcaaatagagcaagatggatgatgaagtacgaaaagggtcttgttgatatacttcatgagaacaatacttcacattatcgtacccaaaacggttggagaacggaggggtggaggaaaatcgttagggatttcaatgtaaggtaccccgaagcaaagtttagtaaaatgcaaatccaggaacatgagactcaattgaagaaagattataagttgataaaatctatcctccaacgtgatggtgtctcatgggaccagagtgcatccatggttagaacaacagatgaaatctgggatgatataatcgaggatatgcccaaggcacggaagtaccaaagtaagagctttccattgctcgactcactagaactgttatttgatggtccaattcctgaagggggacagaaatcgccttccagcgtacctcagaatgttggtgaaaatgttgacgatggaggcaacaataccagcacagtcccagcctactccagcaaacagcattaggacctcaaggcatagatgatctcgacacgctgcaaaaacgcggcgaagaggtgctggaacggctacagcatggcgcggaccgaaggctaccgagagctgatgaccaggcgcagtcgagttcttgtgtagaactgcagagggacaggcgcaagaagcggaaggccccggacgtccagcagatgatggagacctatttgaatttcaggatgaagcaagctcacgtcaaagaacaaagagcgaaggacgctggccagttcacgatttcaggctgtatcaaggctctgcacaccatggccgatgtgtcagacgaggtcaaggtgttagcctctgatgttttcaaggacgctgagaacagggagatctttctctcctatgaacccaggctgcgcagcttgtggctgaagagggaagttggcaagctactctcctgatagtggtgttttgtttgttacctgtgtcagtgagtcagtctgacattcgattctggagggagctattgaaggtctaggcttcattcacaaactctattaaaccatctccgtcagtttgagagaacactcccctttttcctaaaacctgccatatataggggaattaggtgaaaagagccgctccagcatatcctatctcaatcatctttttctatatttttcaatccatcacaacatctcctcaatccctaagaaatattcgttttaaccttaatccacgtgcattggacaagacgtcgtctttttccttaattctctttctgtcactgacgcac

SEQ ID NO: 14535 - DNA, 1582 bp, Zea Mays
gtgattagcaaaaccggccgtttggttggggacagaccacggctaccgaacagccgggttccacgaccaacccaaccgcgggggaaaggggaaaaccccacggcccggagcaacccttgggaaagtcgtcgacgccgttgagttcgaggcgaccggcggctcgccgccccgccacagcgccgctgcgatttcttctgatccctgtggctcagcgcggagttttctttattggcttattacagggttaaatggcaaatagagcaagatggatgatgaagtacgaaaagggtcttgttgatatacttcatgagaacaatacttcacattatcgtacccaaaacggttggagaacggaggggtggaggaaaatcgttagggatttcaatgtaaggtaccccgaagcaaagtttagtaaaatgcaaatccaggaacatgagactcaattgaagaaagattataagttgataaaatctatcctccaacgtgatggtgtctcatgggaccagagtgcatccatggttagaacaacagatgaaatctgggatgatataatcgaggatatgcccaaggcacggaagtaccaaagtaagagctttccattgctcgactcactagaactgttatttgatggtccaattcctgaagggggacagaaatcgccttccagcgtacctcagaatgttggtgaaaatgttgacgatggaggcaacaataccagcacagtcccaggtttgtctgaaagacctagtggaacgtttaacacaagcgttactgaggcatggaataatatcagcctactccagcaaacagcattaggacctcaaggcatagatgatctcgacacgctgcaaaaacgcggcgaagaggtgctggaacggctacagcatggcgcggaccgaaggctaccgagagctgatgaccaggcgcagtcgagttcttgtgtagaactgcagagggacaggcgcaagaagcggaaggccccggacgtccagcagatgatggagacctatttgaatttcaggatgaagcaagctcacgtcaaagaacaaagagcgaaggacgctggccagttcacgatttcaggctgtatcaaggctctgcacaccatggccgatgtgtcagacgaggtcaaggtgttagcctctgatgttttcaaggacgctgagaacagggagatctttctctcctatgaacccaggctgcgcagcttgtggctgaagagggaagttggcaagctactctcctgatagtggtgttttgtttgttacctgtgtcagtgagtcagtctgacattcgattctggagggagctattgaaggtctaggcttcattcacaaactctattaaaccatctccgtcagtttgagagaacactcccctttttcctaaaacctgccatatataggggaattaggtgaaaagagccgctccagcatatcctatctcaatcatctttttctatatttttcaatccatcacaacatctcctcaatccctaagaaatattcgttttaaccttaatccacgtgcattggacaagacgtcgtctttttccttaattctctttctgtcactgacgcac

SEQ ID NO: 14536 - DNA, 1358 bp, Zea Mays
gtgattagcaaaaccggccgtttggttggggacagaccacggctaccgaacagccgggttccacgaccaacccaaccgcgggggaaaggggaaaaccccacggcccggagcaacccttgggaaagtcgtcgacgccgttgagttcgaggcgaccggcggctcgccgccccgccacagcgccgctgcgatttcttctgatccctgtggctcagcgcggagggttaaatggcaaatagagcaagatggatgatgaagtacgaaaagggtcttgttgatatacttcatgagaacaatacttcacattatcgtacccaaaacggttggagaacggaggggtggaggaaaatcgttagggatttcaatagtgcatccatggttagaacaacagatgaaatctgggatgatataatcgaggatatgcccaaggcacggaagtaccaaagtaagagctttccattgctcgactcactagaactgttatttgatggtccaattcctgaagggggacagaaatcgccttccagcgtacctcagaatgttggtgaaaatgttgacgatggaggcaacaataccagcacagtcccagcattaggacctcaaggcatagatgatctcgacacgctgcaaaaacgcggcgaagaggtgctggaacggctacagcatggcgcggaccgaaggctaccgagagctgatgaccaggcgcagtcgagttcttgtgtagaactgcagagggacaggcgcaagaagcggaaggccccggacgtccagcagatgatggagacctatttgaatttcaggatgaagcaagctcacgtcaaagaacaaagagcgaaggacgctggccagttcacgatttcaggctgtatcaaggctctgcacaccatggccgatgtgtcagacgaggtcaaggtgttagcctctgatgttttcaaggacgctgagaacagggagatctttctctcctatgaacccaggctgcgcagcttgtggctgaagagggaagttggcaagctactctcctgatagtggtgttttgtttgttacctgtgtcagtgagtcagtctgacattcgattctggagggagctattgaaggtctaggcttcattcacaaactctattaaaccatctccgtcagtttgagagaacactcccctttttcctaaaacctgccatatataggggaattaggtgaaaagagccgctccagcatatcctatctcaatcatctttttctatatttttcaatccatcacaacatctcctcaatccctaagaaatattcgttttaaccttaatccacgtgcattggacaagacgtcgtctttttccttaattctctttctgtcactgacgcac

SEQ ID NO: 14537 - DNA, 1382 bp, Zea Mays
agcaattctagttggtcgacataccacgcggtgcttggccaaggttaaatggcaaatagagcaagatggatgatgaagtacgaaaagggtcttgttgatatacttcatgagaacaatacttcacattatcgtacccaaaacggttggagaacggaggggtggaggaaaatcgttagggatttcaatgtaaggtaccccgaagcaaagtttagtaaaatgcaaatccaggaacatgagactcaattgaagaaagattataagttgataaaatctatcctccaacgtgatggtgtctcatgggaccagagtgcatccatggttagaacaacagatgaaatctgggatgatataatcgaggatatgcccaaggcacggaagtaccaaagtaagagctttccattgctcgactcactagaactgttatttgatggtccaattcctgaagggggacagaaatcgccttccagcgtacctcagaatgttggtgaaaatgttgacgatggaggcaacaataccagcacagtcccaggtttgtctgaaagacctagtggaacgtttaacacaagcgttactgaggcatggaataatatcagcctactccagcaaacagcattaggacctcaaggcatagatgatctcgacacgctgcaaaaacgcggcgaagaggtgctggaacggctacagcatggcgcggaccgaaggctaccgagagctgatgaccaggcgcagtcgagttcttgtgtagaactgcagagggacaggcgcaagaagcggaaggccccggacgtccagcagatgatggagacctatttgaatttcaggatgaagcaagctcacgtcaaagaacaaagagcgaaggacgctggccagttcacgatttcaggctgtatcaaggctctgcacaccatggccgatgtgtcagacgaggtcaaggtgttagcctctgatgttttcaaggacgctgagaacagggagatctttctctcctatgaacccaggctgcgcagcttgtggctgaagagggaagttggcaagctactctcctgatagtggtgttttgtttgttacctgtgtcagtgagtcagtctgacattcgattctggagggagctattgaaggtctaggcttcattcacaaactctattaaaccatctccgtcagtttgagagaacactcccctttttcctaaaacctgccatatataggggaattaggtgaaaagagccgctccagcatatcctatctcaatcatctttttctatatttttcaatccatcacaacatctcctcaatccctaagaaatattcgttttaaccttaatccacgtgcattggacaagacgtcgtctttttccttaattctctttctgtcactgacgcac

SEQ ID NO: 14538 - DNA, 1342 bp, Zea Mays
gtcgcgcaccacccgcagttaatccgagccgtctatcgcgcttctacacggccgaccttctgtgacagttcgggcaccgacgtccgtctccgtacttccggctgtgtgcgaactgcgaacgcgtgatcgggaccctccgcaaacgcgacgcgaaggtgccggaggcggcgacagcggcagcgacgacgacgagccacaggaatactacaccggtggcgagaagagtggaatgcttgttcaagatccaacaagaagaaatgatgtggatgcgatatttgaacaagccagacaagcgggtatcaaaggaatgcctcctcctcttggtggcgagtcttccagctctaggagctttacagggactggccgacttcttacaggggagacaatatcatctgctgcacctcaggaaccagtaccaattcgagtacgccacaatatacatttgtggaacaatggctttagtgtggatgatggtccactgagatactacgacgatcctgaaaatgcagagttccttgagagccttaagatgtcaaagtgccccaaggagctggtgcctactgatggagaacatgttgatgcgtctgttattagaaggatggaagattacagggaacctgtaaggcctcgatcagctttccagggtgttggaagaacccttggtggtggaccttccccagatgagagcgcaacagctgctcctgcatcagcggcccctgctgcttcgaggtccgctggcgttgtcgtggatgactcccagccatttacgtccatacagctgaggctggctgacggcactcgcatggtcgcccggttcaacatgcaccacaccgtgggagacatcaggtcctttatagacgcagctcggcctggagctgcaaggccttatcagctgcagacgggtttccctcccaagcagctggctgacccaacgcagaccgtggagcaagctgggcttgcaaactctgttatcatgcagaagatgtaaatgcttcggctggcaacctggggagctcggatgcatcgtactgcatcttctgaaaaccgtaatattatggttgatcatgttatcagatactgctctggtgcatcattctcattcatggttacttacagtagcatctggtgcctcgttgggagcacaggagtttataattcatctaggaactgaagtatgctttctgatttacggcagagcgccgaatcgatggttatgtatgtctggttataaccaaccattgcatcactatttttcatttttaatattggtgttacgatatttcgtgttgccatggccgcttccttcaaattgaagcgcgactcgcaagtcgcagcataatta

SEQ ID NO: 14539 - DNA, 1147 bp, Zea Mays
gatggacttattgatcgggttggcacttagtggaatgcttgttcaagatccaacaagaagaaatgatgtggatgcgatatttgaacaagccagacaagcgggtatcaaaggaatgcctcctcctcttggtggcgagtcttccagctctaggagctttacagggactggccgacttcttacaggggagacaatatcatctgctgcacctcaggaaccagtaccaattcgagtacgccacaatatacatttgtggaacaatggctttagtgtggatgatggtccactgagatactacgacgatcctgaaaatgcagagttccttgagagccttaagatgtcaaagtgccccaaggagctggtgcctactgatggagaacatgttgatgcgtctgttattagaaggatggaagattacagggaacctgtaaggcctcgatcagctttccagggtgttggaagaacccttggtggtggaccttccccagatgagagcgcaacagctgctcctgcatcagcggcccctgctgcttcgaggtccgctggcgttgtcgtggatgactcccagccatttacgtccatacagctgaggctggctgacggcactcgcatggtcgcccggttcaacatgcaccacaccgtgggagacatcaggtcctttatagacgcagctcggcctggagctgcaaggccttatcagctgcagacgggtttccctcccaagcagctggctgacccaacgcagaccgtggagcaagctgggcttgcaaactctgttatcatgcagaagatgtaaatgcttcggctggcaacctggggagctcggatgcatcgtactgcatcttctgaaaaccgtaatattatggttgatcatgttatcagatactgctctggtgcatcattctcattcatggttacttacagtagcatctggtgcctcgttgggagcacaggagtttataattcatctaggaactgaagtatgctttctgatttacggcagagcgccgaatcgatggttatgtatgtctggttataaccaaccattgcatcactatttttcatttttaatattggtgttacgatatttcgtgttgccatggccgcttccttcaaattgaagcgcgactcgcaagtcgcagcataatta

SEQ ID NO: 14540 - DNA, 1203 bp, Zea Mays
gaaaaaatgtagtttacaaactagcccttagtcgggtttaccactgcagagtgcagatagagagcctgatctggagaaaatacagtagtagctagcacaaccaatcaaccatggtgcattggtgtcggcagtgccgaaacaaatccacaggtttcgccctgcccctgctcctgccctggccggattccagcaagggggcagcaccccagccggattccagcgtactactccacatcaccggcaggtcttttgccagattccagcagacggcgataccatttgccggatgtcacccgctgcgctgacgcgtgagccgacgagttccttaccgcaatactcgactcaggccgttcgagggtgaagatctacgaggtggggacaccgacaaagctacagctatgcccgtttcttctccactggcggaggcagacgtgatgctgtgagcgacagaatgtcgaagacattggctcagtttagatcaatatatgctatacgtgccagtgctaatgtgccacatgactaaaggagccttgtatgtgcaattggtttgattataaaacagtgcacggccagttgtggttggacaatgtcagcgtggctggagatgtcgaggaagacattcagactggagagagtgaagacagtcagaccaaaggcgaggacctgtgtgccggacaagctacagaagtaactgggtcgcagagggacaaaaggcttcggaggcgtaatatgaaggtgtttgggctggcttgggtgaattgagcccggcgtcgtatggggaataaaagatggttgtgtgtgtgcgtgaggataagctgtaacagaactataatttcttcttgctctccaagtatccgaactagctacttcctctcttcatgtctccttcttctttgtgatttccagtactagacgattgtaaggaagtcaacaagtggtatcagattcggtggtcttcagcttgtggggttttctcacactggattcagttgctcataattagtatttcactcgttgccgtcgtcgggaggtcctgatgaatcctgatacctagatcatcttgaatgagctctcccggcggttcgcggaccacgacgccaagtgggatcgacgtgtgtccgagcaggacacgcgctgggatgctaccttcatggagttcaccatcggtcaggatcatcgtgttgacgccttggagaaggcgac

SEQ ID NO: 14541 - DNA, 1296 bp, Zea Mays
aaagcgaaaaatgcccgcccgcacctgcgtgcgtgtgctgtgtgggcatgggcagcgtcaccaaagcgaggctcctctcgtcccaagcgccggttaactccgtctcagcgcacgcggcacgcccctaatcttcattcccccgaaaccctagccggtccttggccttgtcccggtcgcgccgctcccgtcgcctcttccgcggaagccgtcctctgcgcgtcggcggcggtggagatggcctcctcgtcggcatcttcgaggcaccaggtcaccatcaccctcggccgcagcggtcaggttgttaaaaggaggactatatctgatgatattaacggcgatgaaatgccattgtcggggaaaaaacgatctgtgagggataggttaggaagtaatgtgtctgattctgatttttatggaagccagcagaggaacaaaaggcaacagacagaaattaatagctcacatggagatgatggttcagatcgcttggttggcaaggatgatctgagactgaaactcatgaggaaaggctcgtttcagaggagcaatggtggtgcagaacagaatacaatggatctccgtgaaaagctttcccgaaatcataagaagttgccaagatatgattctagaggccatgctgcagaatcaagggctagttatgatatgagagatgagccaccagagttaaggtccagatatttttcaagggaggatgtcctagggtcaaggaactcttctgttgtaagtcgagttccttattcaagaactgcggatgacttgttaaaatcgaacccttcaagaaaatcttacccctcatggacagacgatggtttgaggcacagatcacctgaaaggattttaagtgttcgtagtgatgtgtctccaccagtaggttatgatcagattaggtccatgccaccacttagatctgccggttcctcaagacctcaaagttttattacaagaggtgctcctgatacgccaaggagtcaaccatatgctggcaaagccaccatttctgttgatacagtacagagaactaatgggatcactccatctagtgcacctttgcctaaggtccctgttatggctgaagccccgcttacagttactggattgttgaattcgttgggtcttgagaagtatattgttctctttcaggctgaggaggtggatatggctgcattgaggcaaatgggggagagtgacctcaaagacatgggggtacctatgggacggagccggagccagaaaaaagtttaggaaggactgaactaaattgctatagtataaaag

SEQ ID NO: 14542 - DNA, 948 bp, Zea Mays
aaagcgaaaaatgcccgcccgcacctgcgtgcgtgtgctgtgtgggcatgggcagcgtcaccaaagcgaggctcctctcgtcccaagcgccggttaactccgtctcagcgcacgcggcacgcccctaatcttcattcccccgaaaccctagccggtccttggccttgtcccggtcgcgccgctcccgtcgcctcttccgcggaagccgtcctctgcgcgtcggcggcggtggagatggcctcctcgtcggcatcttcgaggcaccaggtcaccatcaccctcggccgcagcggtcaggttgttaaaaggaggactatatctgatgatattaacggcgatgaaatgccattgtcggggaaaaaacgatctgtgagggataggttaggaagtaatgtgtctgattctgatttttatggaagccagcagaggaacaaaaggcaacagacagaaattaatagctcacatggagatgatggttcagatcgcttggttggcaaggatgatctgagactgaaactcatgaggaaaggctcgtttcagaggagcaatggtggtgcagaacagaatacaatggatctccgtgaaaagctttcccgaaatcataagaagttgccaagatatgattctagaggccatgctgcagaatcaagggctagttatgatatgagagatgagccaccagagttaaggtccagatatttttcaagggaggatgtcctagggtcaaggaactcttctgttgctgaagccccgcttacagttactggattgttgaattcgttgggtcttgagaagtatattgttctctttcaggctgaggaggtggatatggctgcattgaggcaaatgggggagagtgacctcaaagacatgggggtacctatgggacggagccggagccagaaaaaagtttaggaaggactgaactaaattgctatagtataaaag

SEQ ID NO: 14543 - DNA, 1284 bp, Zea Mays
aaagcgaaaaatgcccgcccgcacctgcgtgcgtgtgctgtgtgggcatgggcagcgtcaccaaagcgaggctcctctcgtcccaagcgccggttaactccgtctcagcgcacgcggcacgcccctaatcttcattcccccgaaaccctagccggtccttggccttgtcccggtcgcgccgctcccgtcgcctcttccgcggaagccgtcctctgcgcgtcggcggcggtggagatggcctcctcgtcggcatcttcgaggcaccaggtcaccatcaccctcggccgcagcggtcaggttgttaaaaggaggactatatctgatgatattaacggcgatgaaatgccattgtcggggaaaaaacgatctgtgagggataggttaggaagtaatgtgtctgattctgatttttatggaagccagcagaggaacaaaaggcaacagacagaaattaatagctcacatggagatgatggttcagatcgcttggttggcaaggatgatctgagactgaaactcatgaggaaaggctcgtttcagaggagcaatggtggtgcagaacagaatacaatggatctccgtgaaaagctttcccgaaatcataagaagttgccaagatatgattctagaggccatgctgcagaatcaagggctagttatgatatgagagatgagccaccagagttaaggtccagatatttttcaagggaggatgtcctagggtcaaggaactcttctgttgtaagtcgagttccttattcaagaactgcggatgacttgttaaaatcgaacccttcaagaaaatcttacccctcatggacagacgatggtttgaggcacagatcacctgaaaggattttaagtgttcgtagtgatgtgtctccaccagtaggttatgatcagattaggtccatgccaccacttagatctgccggttcctcaagacctcaaagttttattacaagaggtgctcctgatacgccaaggagtcaaccatatgctggcaaagccaccatttctgttgatacagtacagagaactaatgggatcactccatctagtgcacctttgcctaaggctgaagccccgcttacagttactggattgttgaattcgttgggtcttgagaagtatattgttctctttcaggctgaggaggtggatatggctgcattgaggcaaatgggggagagtgacctcaaagacatgggggtacctatgggacggagccggagccagaaaaaagtttaggaaggactgaactaaattgctatagtataaaag

SEQ ID NO: 14544 - DNA, 3066 bp, Zea Mays
aaagcgaaaaatgcccgcccgcacctgcgtgcgtgtgctgtgtgggcatgggcagcgtcaccaaagcgaggctcctctcgtcccaagcgccggttaactccgtctcagcgcacgcggcacgcccctaatcttcattcccccgaaaccctagccggtccttggccttgtcccggtcgcgccgctcccgtcgcctcttccgcggaagccgtcctctgcgcgtcggcggcggtggagatggcctcctcgtcggcatcttcgaggcaccaggtcaccatcaccctcggccgcagcggtcaggttgttaaaaggaggactatatctgatgatattaacggcgatgaaatgccattgtcggggaaaaaacgatctgtgagggataggttaggaagtaatgtgtctgattctgatttttatggaagccagcagaggaacaaaaggcaacagacagaaattaatagctcacatggagatgatggttcagatcgcttggttggcaaggatgatctgagactgaaactcatgaggaaaggctcgtttcagaggagcaatggtggtgcagaacagaatacaatggatctccgtgaaaagctttcccgaaatcataagaagttgccaagatatgattctagaggccatgctgcagaatcaagggctagttatgatatgagagatgagccaccagagttaaggtccagatatttttcaagggaggatgtcctagggtcaaggaactcttctgttgtaagtcgagttccttattcaagaactgcggatgacttgttaaaatcgaacccttcaagaaaatcttacccctcatggacagacgatggtttgaggcacagatcacctgaaaggattttaagtgttcgtagtgatgtgtctccaccagtaggttatgatcagattaggtccatgccaccacttagatctgccggttcctcaagacctcaaagttttattacaagaggtgctcctgatacgccaaggagtcaaccatatgctggcaaagccaccatttctgttgatacagtacagagaactaatgggatcactccatctagtgcacctttgcctaaggtccctgttatggtttgtatctgtacctcctctcatataccctaattcatcgatgcttctgagaaaacatagggcattttggagcaaaattccttttcttttgtgcacaacattttcaaattctttctaaaatcacgtctgactgtttttaatgctgttggggctatgaaattggcatacagtcaacaacaataacaaagccttttagtaccaatcaagttgggttagtctagagttgaaacccccacaagtcaaggatcagacacgtggatagctgttttccatgtcaatttcagccttcccctgcttctttccacatgtccaaaccatctcaatcggtgttgaacaagcttttcttcaattggtgctacccctagcctatcatgtatatcattgttttgaattcgttctcttcttgtatggcttcaaatccaatgtaactacgcatttccacaatactttatttgttgaacatttttttgtggacaaacattttgcaccatgcaacatagtaggtctagtcgccatcttataaaacttgcattttagcttctacaagaccctcttgtcacctagaacgctagatgctcaccactttattcactccgctttgattctatggctaacatcttcatcaatatctacgcctctctgtatcattgattttaaacactgaaaagtattcattcttgggcactacttgacctaactagcatctccttcctcatgtgtagtagtgtcgaagtcacatcttatatatttagttttagttctattgagtctaagaggttgtttggcatcgctctagagcaaaactccgaaggggagctggccagagctagccaaacaatgtaactccaaacttgcaaacttcatagagttttgagagctacaatacaaacttttagagtacctcttttgctgctctaaaatccttaaaaaacaacttagatatggagtttgaaggtatttacccgccactaccactagttatgagaaagcaatctagactttggagcagaactgctccatccagagttttggagcagagatgctctagagtggagcggagtcatgccaaacaccccctaactctagggtcttttgctgcaactccaatttcctatttgctcttgcttactttcatcaactagcattacatgattacatcgtccgcaaaaagcatacaccaagagacatcctcttgtatgtcacttgtgacctcatccatcaccaaggcaaaaaggtaaggctcaatgatgacccttgatgtagtcctattctaatcggaaagtcattcatgtctacatgacttgtcccatcattgttgtacatgttcttaatgagtctaattcgtgagaactttatgtttgtccaaagtcgatcacataacattccttggtattttgtcataagctttctccaagttaatgaaaaccatgtgtagattctttttttggtccatgtaatgctccattacttgtcttattaagaaaatggcttacatggttgacctttcgtgcatgaaaccaatttggttcatagagatcctcattatttctctcagatggtactcgataactctctcccattgcttcatgtaatcttttaacatttgttaagtttgctcattgttatctaagaatctaggttccacatctgaattataataacttctgcagtcttagaattttattagttatatatggttatgaattcctataccggtgttcatagaatcatacttgaagtttaataacattgctctatgcaactttgcaggctgaagccccgcttacagttactggattgttgaattcgttgggtcttgagaagtatattgttctctttcaggctgaggaggtggatatggctgcattgaggcaaatgggggagagtgacctcaaagacatgggggtacctatgggacggagccggagccagaaaaaagtttaggaaggactgaactaaattgctatagtataaaag

SEQ ID NO: 14545 - DNA, 3493 bp, Zea Mays
aaagcgaaaaatgcccgcccgcacctgcgtgcgtgtgctgtgtgggcatgggcagcgtcaccaaagcgaggctcctctcgtcccaagcgccggttaactccgtctcagcgcacgcggcacgcccctaatcttcattcccccgaaaccctagccggtccttggccttgtcccggtcgcgccgctcccgtcgcctcttccgcggaagccgtcctctgcgcgtcggcggcggtggagatggcctcctcgtcggcatcttcgaggcaccaggtcaccatcaccctcggccgcagcggtcaggttgttaaaaggaggactatatctgatgatattaacggcgatgaaatgccattgtcggggaaaaaacgatctgtgagggataggttaggaagtaatgtgtctgattctgatttttatggaagccagcagaggaacaaaaggcaacagacagaaattaatagctcacatggagatgatggttcagatcgcttggttggcaaggatgatctgagactgaaactcatgaggaaaggctcgtttcagaggagcaatggtggtgcagaacagaatacaatggatctccgtgaaaagctttcccgaaatcataagaagttgccaagatatgattctagaggccatgctgcagaatcaagggctagttatgatatgagagatgagccaccagagttaaggtccagatatttttcaagggaggatgtcctagggtcaaggaactcttctgttgtaagtcgagttccttattcaagaactgcggatgacttgttaaaatcgaacccttcaagaaaatcttacccctcatggacagacgatggtttgaggcacagatcacctgaaaggattttaagtgttcgtagtgatgtgtctccaccagtaggttatgatcagattaggtccatgccaccacttagatctgccggttcctcaagacctcaaagttttattacaagaggtgctcctgatacgccaaggagtcaaccatatgctggcaaagccaccatttctgttgatacagtacagagaactaatgggatcactccatctagtgcacctttgcctaaggtccctgttatggtttgtatctgtacctcctctcatataccctaattcatcgatgcttctgagaaaacatagggcattttggagcaaaattccttttcttttgtgcacaacattttcaaattctttctaaaatcacgtctgactgtttttaatgctgttggggctatgaaattggcatacagtcaacaacaataacaaagccttttagtaccaatcaagttgggttagtctagagttgaaacccccacaagtcaaggatcagacacgtggatagctgttttccatgtcaatttcagccttcccctgcttctttccacatgtccaaaccatctcaatcggtgttgaacaagcttttcttcaattggtgctacccctagcctatcatgtatatcattgttttgaattcgttctcttcttgtatggcttcaaatccaatgtaactacgcatttccacaatactttatttgttgaacatttttttgtggacaaacattttgcaccatgcaacatagtaggtctagtcgccatcttataaaacttgcattttagcttctacaagaccctcttgtcacctagaacgctagatgctcaccactttattcactccgctttgattctatggctaacatcttcatcaatatctacgcctctctgtatcattgattttaaacactgaaaagtattcattcttgggcactacttgacctaactagcatctccttcctcatgtgtagtagtgtcgaagtcacatcttatatatttagttttagttctattgagtctaagaggttgtttggcatcgctctagagcaaaactccgaaggggagctggccagagctagccaaacaatgtaactccaaacttgcaaacttcatagagttttgagagctacaatacaaacttttagagtacctcttttgctgctctaaaatccttaaaaaacaacttagatatggagtttgaaggtatttacccgccactaccactagttatgagaaagcaatctagactttggagcagaactgctccatccagagttttggagcagagatgctctagagtggagcggagtcatgccaaacaccccctaactctagggtcttttgctgcaactccaatttcctatttgctcttgcttactttcatcaactagcattacatgattacatcgtccgcaaaaagcatacaccaagagacatcctcttgtatgtcacttgtgacctcatccatcaccaaggcaaaaaggtaaggctcaatgatgacccttgatgtagtcctattctaatcggaaagtcattcatgtctacatgacttgtcccatcattgttgtacatgttcttaatgagtctaattcgtgagaactttatgtttgtccaaagtcgatcacataacattccttggtattttgtcataagctttctccaagttaatgaaaaccatgtgtagattctttttttggtccatgtaatgctccattacttgtcttattaagaaaatggcttacatggttgacctttcgtgcatgaaaccaatttggttcatagagatcctcattatttctctcagatggtactcgataactctctcccattgcttcatgtaatcttttaacatttgttaagtttgctcattgttatctaagaatctaggttccacatctgaattataataacttctgcagtcttagaattttattagttatatatggttatgaattcctataccggtgttcatagaatcatacttgaagtttaataacattgctctatgcaactttgcaggctgaagccccgcttacagttactggattgttgaattcgttgggtcttgagaagtatattgttctctttcaggctgaggaggtggatatggctgcattgaggcaaatgggggagagtgacctcaaagacatgggggtacctatgctgaagttcactggaagcatggacccggaatcccgcaggccactctgttcatgttttttcaaaaagggcccgaggaagaagattctccttgcagttggccctcagtcgaaacaacggcaaatatgagcaacatggtgtgggacttgcgagcatttgttggcaactgaaaatattggtgcaagaacgccagatagcagatattgtatatcaatccatattgtctgtctcaatccactcttttgttgctgatggcgttgtttcgtgccgtagttgacaccatgtaaagtctattcagccagctgttaatctaggttctatcattcagtctgcctgcccactgttattgtttcgaaacgggtggatacgtgtggtttactcgtgacgattagtttggaatggatgctacgttcgattcttttgtgtcacaagacgccgagcctttaagaaggccctatttatctatccaaatgaaagcgtttattgattgtca

SEQ ID NO: 14546 - DNA, 3427 bp, Zea Mays
aaagcgaaaaatgcccgcccgcacctgcgtgcgtgtgctgtgtgggcatgggcagcgtcaccaaagcgaggctcctctcgtcccaagcgccggttaactccgtctcagcgcacgcggcacgcccctaatcttcattcccccgaaaccctagccggtccttggccttgtcccggtcgcgccgctcccgtcgcctcttccgcggaagccgtcctctgcgcgtcggcggcggtggagatggcctcctcgtcggcatcttcgaggcaccaggtcaccatcaccctcggccgcagcggtcaggttgttaaaaggaggactatatctgatgatattaacggcgatgaaatgccattgtcggggaaaaaacgatctgtgagggataggttaggaagtaatgtgtctgattctgatttttatggaagccagcagaggaacaaaaggcaacagacagaaattaatagctcacatggagatgatggttcagatcgcttggttggcaaggatgatctgagactgaaactcatgaggaaaggctcgtttcagaggagcaatggtggtgcagaacagaatacaatggatctccgtgaaaagctttcccgaaatcataagaagttgccaagatatgattctagaggccatgctgcagaatcaagggctagttatgatatgagagatgagccaccagagttaaggtccagatatttttcaagggaggatgtcctagggtcaaggaactcttctgttgtaagtcgagttccttattcaagaactgcggatgacttgttaaaatcgaacccttcaagaaaatcttacccctcatggacagacgatggtttgaggcacagatcacctgaaaggattttaagtgttcgtagtgatgtgtctccaccagtaggttatgatcagattaggtccatgccaccacttagatctgccggttcctcaagacctcaaagttttattacaagaggtgctcctgatacgccaaggagtcaaccatatgctggcaaagccaccatttctgttgatacagtacagagaactaatgggatcactccatctagtgcacctttgcctaaggtccctgttatggtttgtatctgtacctcctctcatataccctaattcatcgatgcttctgagaaaacatagggcattttggagcaaaattccttttcttttgtgcacaacattttcaaattctttctaaaatcacgtctgactgtttttaatgctgttggggctatgaaattggcatacagtcaacaacaataacaaagccttttagtaccaatcaagttgggttagtctagagttgaaacccccacaagtcaaggatcagacacgtggatagctgttttccatgtcaatttcagccttcccctgcttctttccacatgtccaaaccatctcaatcggtgttgaacaagcttttcttcaattggtgctacccctagcctatcatgtatatcattgttttgaattcgttctcttcttgtatggcttcaaatccaatgtaactacgcatttccacaatactttatttgttgaacatttttttgtggacaaacattttgcaccatgcaacatagtaggtctagtcgccatcttataaaacttgcattttagcttctacaagaccctcttgtcacctagaacgctagatgctcaccactttattcactccgctttgattctatggctaacatcttcatcaatatctacgcctctctgtatcattgattttaaacactgaaaagtattcattcttgggcactacttgacctaactagcatctccttcctcatgtgtagtagtgtcgaagtcacatcttatatatttagttttagttctattgagtctaagaggttgtttggcatcgctctagagcaaaactccgaaggggagctggccagagctagccaaacaatgtaactccaaacttgcaaacttcatagagttttgagagctacaatacaaacttttagagtacctcttttgctgctctaaaatccttaaaaaacaacttagatatggagtttgaaggtatttacccgccactaccactagttatgagaaagcaatctagactttggagcagaactgctccatccagagttttggagcagagatgctctagagtggagcggagtcatgccaaacaccccctaactctagggtcttttgctgcaactccaatttcctatttgctcttgcttactttcatcaactagcattacatgattacatcgtccgcaaaaagcatacaccaagagacatcctcttgtatgtcacttgtgacctcatccatcaccaaggcaaaaaggtaaggctcaatgatgacccttgatgtagtcctattctaatcggaaagtcattcatgtctacatgacttgtcccatcattgttgtacatgttcttaatgagtctaattcgtgagaactttatgtttgtccaaagtcgatcacataacattccttggtattttgtcataagctttctccaagttaatgaaaaccatgtgtagattctttttttggtccatgtaatgctccattacttgtcttattaagaaaatggcttacatggttgacctttcgtgcatgaaaccaatttggttcatagagatcctcattatttctctcagatggtactcgataactctctcccattgcttcatgtaatcttttaacatttgttaagtttgctcattgttatctaagaatctaggttccacatctgaattataataacttctgcagtcttagaattttattagttatatatggttatgaattcctataccggtgttcatagaatcatacttgaagtttaataacattgctctatgcaactttgcaggctgaagccccgcttacagttactggattgttgaattcgttgggtcttgagaagtatattgttctctttcaggctgaggaggtggatatggctgcattgaggcaaatgggggagagtgacctcaaagacatgggggtacctatgggcccgaggaagaagattctccttgcagttggccctcagtcgaaacaacggcaaatatgagcaacatggtgtgggacttgcgagcatttgttggcaactgaaaatattggtgcaagaacgccagatagcagatattgtatatcaatccatattgtctgtctcaatccactcttttgttgctgatggcgttgtttcgtgccgtagttgacaccatgtaaagtctattcagccagctgttaatctaggttctatcattcagtctgcctgcccactgttattgtttcgaaacgggtggatacgtgtggtttactcgtgacgattagtttggaatggatgctacgttcgattcttttgtgtcacaagacgccgagcctttaagaaggccctatttatctatccaaatgaaagcgtttattgattgtca

SEQ ID NO: 14547 - DNA, 1645 bp, Zea Mays
aaagcgaaaaatgcccgcccgcacctgcgtgcgtgtgctgtgtgggcatgggcagcgtcaccaaagcgaggctcctctcgtcccaagcgccggttaactccgtctcagcgcacgcggcacgcccctaatcttcattcccccgaaaccctagccggtccttggccttgtcccggtcgcgccgctcccgtcgcctcttccgcggaagccgtcctctgcgcgtcggcggcggtggagatggcctcctcgtcggcatcttcgaggcaccaggtcaccatcaccctcggccgcagcggtcaggttgttaaaaggaggactatatctgatgatattaacggcgatgaaatgccattgtcggggaaaaaacgatctgtgagggataggttaggaagtaatgtgtctgattctgatttttatggaagccagcagaggaacaaaaggcaacagacagaaattaatagctcacatggagatgatggttcagatcgcttggttggcaaggatgatctgagactgaaactcatgaggaaaggctcgtttcagaggagcaatggtggtgcagaacagaatacaatggatctccgtgaaaagctttcccgaaatcataagaagttgccaagatatgattctagaggccatgctgcagaatcaagggctagttatgatatgagagatgagccaccagagttaaggtccagatatttttcaagggaggatgtcctagggtcaaggaactcttctgttgtaagtcgagttccttattcaagaactgcggatgacttgttaaaatcgaacccttcaagaaaatcttacccctcatggacagacgatggtttgaggcacagatcacctgaaaggattttaagtgttcgtagtgatgtgtctccaccagtaggttatgatcagattaggtccatgccaccacttagatctgccggttcctcaagacctcaaagttttattacaagaggtgctcctgatacgccaaggagtcaaccatatgctggcaaagccaccatttctgttgatacagtacagagaactaatgggatcactccatctagtgcacctttgcctaaggctgaagccccgcttacagttactggattgttgaattcgttgggtcttgagaagtatattgttctctttcaggctgaggaggtggatatggctgcattgaggcaaatgggggagagtgacctcaaagacatgggggtacctatgggcccgaggaagaagattctccttgcagttggccctcagtcgaaacaacggcaaatatgagcaacatggtgtgggacttgcgagcatttgttggcaactgaaaatattggtgcaagaacgccagatagcagatattgtatatcaatccatattgtctgtctcaatccactcttttgttgctgatggcgttgtttcgtgccgtagttgacaccatgtaaagtctattcagccagctgttaatctaggttctatcattcagtctgcctgcccactgttattgtttcgaaacgggtggatacgtgtggtttactcgtgacgattagtttggaatggatgctacgttcgattcttttgtgtcacaagacgccgagcctttaagaaggccctatttatctatccaaatgaaagcgtttattgattgtca

SEQ ID NO: 14548 - DNA, 3209 bp, Zea Mays
ttcagggcttgaatgttgattgattagcatcagagcagactctccagcaagagagaacatggccgctgatttggtagaggttgttaaaaggaggactatatctgatgatattaacggcgatgaaatgccattgtcggggaaaaaacgatctgtgagggataggttaggaagtaatgtgtctgattctgatttttatggaagccagcagaggaacaaaaggcaacagacagaaattaatagctcacatggagatgatggttcagatcgcttggttggcaaggatgatctgagactgaaactcatgaggaaaggctcgtttcagaggagcaatggtggtgcagaacagaatacaatggatctccgtgaaaagctttcccgaaatcataagaagttgccaagatatgattctagaggccatgctgcagaatcaagggctagttatgatatgagagatgagccaccagagttaaggtccagatatttttcaagggaggatgtcctagggtcaaggaactcttctgttgtaagtcgagttccttattcaagaactgcggatgacttgttaaaatcgaacccttcaagaaaatcttacccctcatggacagacgatggtttgaggcacagatcacctgaaaggattttaagtgttcgtagtgatgtgtctccaccagtaggttatgatcagattaggtccatgccaccacttagatctgccggttcctcaagacctcaaagttttattacaagaggtgctcctgatacgccaaggagtcaaccatatgctggcaaagccaccatttctgttgatacagtacagagaactaatgggatcactccatctagtgcacctttgcctaaggtccctgttatggtttgtatctgtacctcctctcatataccctaattcatcgatgcttctgagaaaacatagggcattttggagcaaaattccttttcttttgtgcacaacattttcaaattctttctaaaatcacgtctgactgtttttaatgctgttggggctatgaaattggcatacagtcaacaacaataacaaagccttttagtaccaatcaagttgggttagtctagagttgaaacccccacaagtcaaggatcagacacgtggatagctgttttccatgtcaatttcagccttcccctgcttctttccacatgtccaaaccatctcaatcggtgttgaacaagcttttcttcaattggtgctacccctagcctatcatgtatatcattgttttgaattcgttctcttcttgtatggcttcaaatccaatgtaactacgcatttccacaatactttatttgttgaacatttttttgtggacaaacattttgcaccatgcaacatagtaggtctagtcgccatcttataaaacttgcattttagcttctacaagaccctcttgtcacctagaacgctagatgctcaccactttattcactccgctttgattctatggctaacatcttcatcaatatctacgcctctctgtatcattgattttaaacactgaaaagtattcattcttgggcactacttgacctaactagcatctccttcctcatgtgtagtagtgtcgaagtcacatcttatatatttagttttagttctattgagtctaagaggttgtttggcatcgctctagagcaaaactccgaaggggagctggccagagctagccaaacaatgtaactccaaacttgcaaacttcatagagttttgagagctacaatacaaacttttagagtacctcttttgctgctctaaaatccttaaaaaacaacttagatatggagtttgaaggtatttacccgccactaccactagttatgagaaagcaatctagactttggagcagaactgctccatccagagttttggagcagagatgctctagagtggagcggagtcatgccaaacaccccctaactctagggtcttttgctgcaactccaatttcctatttgctcttgcttactttcatcaactagcattacatgattacatcgtccgcaaaaagcatacaccaagagacatcctcttgtatgtcacttgtgacctcatccatcaccaaggcaaaaaggtaaggctcaatgatgacccttgatgtagtcctattctaatcggaaagtcattcatgtctacatgacttgtcccatcattgttgtacatgttcttaatgagtctaattcgtgagaactttatgtttgtccaaagtcgatcacataacattccttggtattttgtcataagctttctccaagttaatgaaaaccatgtgtagattctttttttggtccatgtaatgctccattacttgtcttattaagaaaatggcttacatggttgacctttcgtgcatgaaaccaatttggttcatagagatcctcattatttctctcagatggtactcgataactctctcccattgcttcatgtaatcttttaacatttgttaagtttgctcattgttatctaagaatctaggttccacatctgaattataataacttctgcagtcttagaattttattagttatatatggttatgaattcctataccggtgttcatagaatcatacttgaagtttaataacattgctctatgcaactttgcaggctgaagccccgcttacagttactggattgttgaattcgttgggtcttgagaagtatattgttctctttcaggctgaggaggtggatatggctgcattgaggcaaatgggggagagtgacctcaaagacatgggggtacctatgggcccgaggaagaagattctccttgcagttggccctcagtcgaaacaacggcaaatatgagcaacatggtgtgggacttgcgagcatttgttggcaactgaaaatattggtgcaagaacgccagatagcagatattgtatatcaatccatattgtctgtctcaatccactcttttgttgctgatggcgttgtttcgtgccgtagttgacaccatgtaaagtctattcagccagctgttaatctaggttctatcattcagtctgcctgcccactgttattgtttcgaaacgggtggatacgtgtggtttactcgtgacgattagtttggaatggatgctacgttcgattcttttgtgtcacaagacgccgagcctttaagaaggccctatttatctatccaaatgaaagcgtttattgattgtca

SEQ ID NO: 14549 - DNA, 1048 bp, Zea Mays
ccagcaagagagaacatggccgctgatttggtagaggttgttaaaaggaggactatatctgatgatattaacggcgatgaaatgccattgtcggggaaaaaacgatctgtgagggataggttaggaagtaatgtgtctgattctgatttttatggaagccagcagaggaacaaaaggcaacagacagaaattaatagctcacatggagatgatggttcagatcgcttggttggcaaggatgatctgagactgaaactcatgaggaaaggctcgtttcagaggagcaatggtggtgcagaacagaatacaatggatctccgtgaaaagctttcccgaaatcataagaagttgccaagatatgattctagaggccatgctgcagaatcaagggctagttatgatatgagagatgagccaccagagttaaggtccagatatttttcaagggaggatgtcctagggtcaaggaactcttctgttgctgaagccccgcttacagttactggattgttgaattcgttgggtcttgagaagtatattgttctctttcaggctgaggaggtggatatggctgcattgaggcaaatgggggagagtgacctcaaagacatgggggtacctatgggcccgaggaagaagattctccttgcagttggccctcagtcgaaacaacggcaaatatgagcaacatggtgtgggacttgcgagcatttgttggcaactgaaaatattggtgcaagaacgccagatagcagatattgtatatcaatccatattgtctgtctcaatccactcttttgttgctgatggcgttgtttcgtgccgtagttgacaccatgtaaagtctattcagccagctgttaatctaggttctatcattcagtctgcctgcccactgttattgtttcgaaacgggtggatacgtgtggtttactcgtgacgattagtttggaatggatgctacgttcgattcttttgtgtcacaagacgccgagcctttaagaaggccctatttatctatccaaatgaaagcgtttattgattgtca

SEQ ID NO: 14550 - DNA, 1398 bp, Zea Mays
cccgcgctaggttatgtgtcggcttgtccttgcagtggccacgtatcgctcagacgggcagcctggcctgtgggccttggagcgtccagataactggagggagaatgctggtccagctcaagaggtatttgctagaactgcaattgccatttcaaagtttgaacccgtcacgttatgtgcaagtgccaagcagtaccccaaagtccacgagctgatggaacatcaaaccaacatcagggtcgttgagatgagcatgaacgattcctggttccgcgacatgggccccacttttgtcacctgtaaaggggattcaggaattgcagaacaaacaatagcaggaattgattggcaattcaatgcctggggaggaatctatgacgactggagtcttgacagcgatgttgccaagaaaatagtcgagatcgagaggatccctaggtttccccaaaaaattatccttgagggtggaagcattcatgtagatggagaaggtacatgcattacaacggaagaatgcttgctgaatcctaataggaaccccaacatgaccaaactagagatagagaatgagctgaaggattttcttggagtctcgaaggtcatctggatacctcgtggactttatggcgacgaggatacaaacggccacgttgacaacatgtgctgcttcatcaaacccggtgtgatcctgctgtcgtggaccgacgacgagaaggattatcagtacgaacggtcggtcgaggcgctgtctgttctctcccagtccgtcgacgcgaaagggcggcagctccaagtggtgaagatccacgtccccgggcctctgtacatgacagaggaagaggcacagggcgttgtttcatcgggacattctgtgccgaggccagcgggcacgagattggccgcctcgtacgtcaacttctacatcgccaatggtgggatcatagcgccttccttcggcgacaggtgggacgaggaggcgtatgcggttctccagaaggcattccccgatcacgaggtggtgatggtcgaaggcggacgggagatcgcgctgggaggtgggaacattcactgcatcacgcagcagcagcccgtgcgcccgtcctagctgaaaccggcgtcgacgcgaggggcgatgaagagcttgcgagtagtattgttttgtatgctgctcctgtcgttatcacgctcaccaatacgctcgcgaaataagccacgccagcagttcgttgacacatactgtatgagtactattatactatacggcacaaacggccaaacgccacacaggcgtggatcaaaattgtactagttcctgtctacaattcgtggcctttatcatcctgattggctgcccgtatattatttatcttaagtcatctatattcttatcttaagtca

SEQ ID NO: 14551 - DNA, 1565 bp, Zea Mays
cttgagctgagaaacgattcaaacggttttttctgttgtaaatcgaattggcacctaactcgcatgttgctgggagccctgctcaattactattgctgtgtgaagttggaatctgagtaggagcgtccagataactggagggagaatgctggtccagctcaagaggtatttgctagaactgcaattgccatttcaaagtttgaacccgtcacgttatgtgcaagtgccaagcagtaccccaaagtccacgagctgatggaacatcaaaccaacatcagggtcgttgagatgagcatgaacgattcctggttccgcgacatgggccccacttttgtcacctgtaaaggggattcaggaattgcagaacaaacaatagcaggaattgattggcaattcaatgcctggggaggaatctatgacgactggagtcttgacagcgatgttgccaagaaaatagtcgagatcgagaggatccctaggtttccccaaaaaattatccttgagggtggaagcattcatgtagatggagaaggtacatgcattacaacggaagaatgcttgctgaatcctaataggaaccccaacatgaccaaactagagatagagaatgagctgaaggattttcttggagtctcgaaggtcatctggatacctcgtggactttatggcgacgaggatacaaacggccacgttgacaacatgtgctgcttcatcaaacccggtgtgatcctgctgtcgtggaccgacgacgagaaggattatcagtacgaacggtcggtcgaggcgctgtctgttctctcccagtccgtcgacgcgaaagggcggcagctccaagtggtgaagatccacgtccccgggcctctgtacatgacagaggaagaggcacagggcgttgtttcatcgggacattctgtgccgaggccagcgggcacgagattggccgcctcgtacgtcaacttctacatcgccaatggtgggatcatagcgccttccttcggcgacaggtgggacgaggaggcgtatgcggttctccagaaggcattccccgatcacgaggttgtatatctttgttttttgttccacctccgaactttaaggctgctcacaatcgcattgtgtgcggttgaacacttgttagaggttagaagatggtgtgatgaatgctgtggttggcacgcgcaggtggtgatggtcgaaggcggacgggagatcgcgctgggaggtgggaacattcactgcatcacgcagcagcagcccgtgcgcccgtcctagctgaaaccggcgtcgacgcgaggggcgatgaagagcttgcgagtagtattgttttgtatgctgctcctgtcgttatcacgctcaccaatacgctcgcgaaataagccacgccagcagttcgttgacacatactgtatgagtactattatactatacggcacaaacggccaaacgccacacaggcgtggatcaaaattgtactagttcctgtctacaattcgtggcctttatcatcctgattggctgcccgtatattatttatcttaagtcatctatattcttatcttaagtca

SEQ ID NO: 14552 - DNA, 867 bp, Zea Mays
aaattcttcttcctatcttagcaactgagggcttatatcgccccacacacaagccaccaatcgagctgatgtatgcatagaccacgatgagctgcatcagaagaactagtgcaataatgagtagtctcgctttgtcgtgctaaatccaagcgataatgggatgatgaacagcagaggaaagaaggttagttccaccgtgggagcggcggcggcggcggcgacgacgcggacggtgaagatgcgcgcggcagtcaagcacgggtacgcggtcgccgaggtgtacgagatgctgaggagggactacgcgtccaaggcgaggcgccgccggccgatcaacaacggcgccacgccgctgcaggtgaacaagaagccctagagagagctataccgtacgtcgtagattacttcttccccgcctccccggcgtgctcggtacatatagttagaggcttagagctacctggctgcttccttcttcaggctttagttgctagccctagtagattaggagagggtttgggcacttagttgccccatatggaataggaatgatgccttgtgtgcccagccttaatctagccttcgagctgctggacaacctgcttagcccaatctgcagaaacagcatggatcgatcatccatgtgcagatgggcgattttgtcactggtgttcatgcttgaggatagatgccatgtagtatgcacatctgcatcagtatcaggtcgcagatgtgctcatatgcctgattgtattgtaatagctccagtggtttacatgtattttgcaccagttctcggcttatgttctggcggcagattgtcatcaggaatgacaatacttcaacaagtagtatacacaaaataat

SEQ ID NO: 14553 - DNA, 1064 bp, Zea Mays
gaatgcagttcaacatggaaaacattgcatcttcatgagctctgaagctacaatattctgggctggtcaagagtcattcagatccataactagatcatactacagaggcgctgctggtgctcttttggtttatgacataactaggagggagactttcaaccaccttgcaagctggctggaggatgcgagacagcacgccaatgctaacatgacaataatgcttgttgggaacaagtgcgatctgtctcacaggcgtgcggtgagctatgaggaaggcgagcagtttgcaaaagaacatggtcttatcttcatggaagcctctgcgaagaccgcacagaatgtcgaggaggcatttgttaagactgctggagcaatctacaagaagattcaagatggtgttttcgatgtatctaatgagtcctatggaatcaaagttggatatgcaatccctgggcaatctggaggtgctggtagctcgtcttctcaaggtggtggctgctgcagctaatctgctaacgccgttaacaaatgcatatctgtcgtgtgtcacataccagctgcgctgtgaaaaatagttattgctgctccagggtgccttgttatttgacgcaccaatggatcctgtgcctgatcgacttgagagattcagtttatttacgtcaggtgtttataaactccctgtaaatcactagattcttcactgttttccgtcattaggcactcaacaatcgtgtgtccgtttgcatgtgtaaataaggcacatctacatattgtttgatatgatattaatttgtcctgttcgaatatgttggcaagtttcgtaaaatatgcgtcttcaatacatgcccaaagaaaaaatgttaggacaccttttgtgtgtgcttcgatgattgcatcttgctggttttgtagttaaatggcatcaagcggagaggttgagaagagagaaaaaaataaaagtaaaataaaagaaggggaaaaagaaataagatgcagagagagagagataaaaggaaagaaaaacaaggtttgcagctattgtacctcgttgttatatatatata

SEQ ID NO: 14554 - DNA, 832 bp, Zea Mays
gacgactgctttgaccgagaggaatagggtttcagcggcggcggcagctgccgagccccatcccccgatccaaagcacctcaaaccaccgctctgcccagatccacccagctactgcggtgagcccgtggggacggtggcggtggcgacggagcggttccctcgggaggtgagctcggaggcgttattccactgcgtccgcctaggcccggtccacgagactggcaccgaggtggcgtaccagaccagcgtcaaaatcgccggccacgtcttcaagggcatcctgcacgacgtcggcccggacccatcatcgtcggtcgctgcgagcgacgactacttccgccacgccaccgacgggtcctccccgggcacggtgggcgaaggcagcgtcgcgggggcgggcccgtctcgtcattggctgtggtcatggacccgtacccgacgccaacgcccgaaccgtacgacggctcacatttcttccacggccatccgagatatggacgacatgattttctccatattaggaaagctggaagagccttttgaactcacttttttttgctaacaatggtgttatggtgaaacatagttttgcgtgtatgtaccaacaactaaaatataaatacgacattatcatagttgagtacaggaataattattcttatatcttattgtaaaatctaaaacagttctcctgtagatggttagcttgcattttacgctacaattacctcagatcacttcttgttgtattttacacgaatttacgatatttcttgatgcgttttatgacaacctcgtgcgcagagagatatattcggtctacattcgtt

SEQ ID NO: 14555 - DNA, 1740 bp, Zea Mays
gacgactgctttgaccgagaggaatagggtttcagcggcggcggcagctgccgagccccatcccccgatccaaagcacctcaaaccaccgctctgcccagatccacccagctactgcggtgagcccgtggggacggtggcggtggcgacggagcggttccctcgggaggtgagctcggaggcgttattccactgcgtccgcctaggcccggtccacgagactggcaccgaggtggcgtaccagaccagcgtcaaaatcgccggccacgtcttcaagggcatcctgcacgacgtcggcccggacccatcatcgtcggtcgctgcgagcgacgactacttccgccacgccaccgacgggtcctccccgggcacggtgggcgaaggcagcgtcgcgggggcgggcccgtctcgtcattggctgtggtcatggacccgtacccgacgccaacgcccgaaccgtacgacggctcacatttcttccacggccatccgaggtacgttgaaaataaatattggatctcaaaaatggcattctagatctatctaccatttcgcttacacattatggctatctcacattcatgggttgcaaggtaaaatatttgcattttataatttgttagcactttatacttattttgtttgaatattaatattacatgtttgttagcattttctaatttgttagcactttatacttactgtaacaagcacacatttatccaccgatgtgattcttatttctgctaatttgaatgtgttattatgctcaattatcagatcttatgtacgctccgcgttgtaaacacgtagaccaccaattctacattgtttttgttgttttatgcttttacgataatttaaattggtccttttcagaacaatgcaccctagtacctagtacactctagagcagtatacaacatatacgcccagtaccccagtaagtatatgctcttttgtttttgtgatccaccgaccatgtatccagaaggcaaactagattctgatgtacgcatataaaattgccgatatgaaataaatcgtccatgagttgtcctagagtttccactgtgaaggatatgcattgaatcagttttctatgtttttcagaaagatggacaaggtacaccatgtcagtagaattttttacaccctggttatcttgttttaattcacccgttatgcgctccaattattttcgtatgtttggtacaccatgacagcatagaacttgaccttctattattttgtatgtttggtttgcatgggataatctggcatgggatgtatttacggacattgatatcgttttttatgtttactgacagaataatgcatatggtctgaaaatggagaatcacttttcctcaatgattaacagttcatgttacgtttgcagatatggacgacatgattttctccatattaggaaagctggaagagccttttgaactcacttttttttgctaacaatggtgttatggtgaaacatagttttgcgtgtatgtaccaacaactaaaatataaatacgacattatcatagttgagtacaggaataattattcttatatcttattgtaaaatctaaaacagttctcctgtagatggttagcttgcattttacgctacaattacctcagatcacttcttgttgtattttacacgaatttacgatatttcttgatgcgttttatgacaacctcgtgcgcagagagatatattcggtctacattcgtt

SEQ ID NO: 14556 - DNA, 1632 bp, Zea Mays
cgacgccgcagccgtacaggctcacgtactgcagcgagccgcaagcccaggtatgcttcttgcctgagcatgtcgccacagagcagcacacagtagacgggttattcactatgaagaaacaaggccatacaaccacaccacgaagcaatttttcaattgagaagttctctctcgtagttcgttcgtagcttctgctgtgtttcgttctagtagcagctagcaagtagtgagacggcaggtatacgtttatatggcgtagcggtatagtataccgaggtacacgtagatggcgtccatttaggagcggttccgttgcccttctcggggtctccgcgccggtagccgttggcgaggcgagcagcgccgcggagacgtgggtgatgacgagcgcgaagcagaacatgcccgacgggccgaccacccagcctagctgcgccacgctggcacgctccatgccaaggacagcaccccggagccgatcaccgccgtgctgatgtgcgccgcgcacgtccacggtccacgcggtccctgcgcgtgcacgacgcacgccgtcccgcgcagtaattggcggagacacgtaggagaggcaaggtccaaaggtgggcacgcgaactcgcgaagggcgtattaggctatctccacctggccatagactacggagcgggtggccgtcgagcacctcgaccgagtggtgcgccgccttcgcagttgctcccgtccgagaactccgcgcgcgggtgttccaccacacaattggtacgtccgagaggcgagatgctggcttgggggctgcgatcggccgatgcactgcgggctgcggcgcagtatcactctatgcgggaggagctacggctatggctaagcacgcaacaacaaagaccgcggcggggaagcataataacgcagggcagagaactggtgaacgaggtccgcggtggtctaaccataccctctagtagtatctcttatacaaattcgtctaaatttttttctcttctactatatcatactatgtaaaagcactccaatggactctctatattattcctaattaacataaatagagatttttcttacaaaatcaattccaaacaacttatctaaatgattatccaaatataaccatcctttttctagatttctcgttagacaaagttaaaaaaacgtgaataactctctagagtgcaaacaagataaagaaaaagttgttaaagattgaaaagatatataaagtcacttttatacgaatgactctccaaatgataatttaaagtgtgaaatttaaaaagacttttggaaatgtgttatatctcattctctatatatatgtcaatattagatatatatatatattttgcttttaatttttatttatcatacccttaaatattttatacatattttagttttacttaatcacttatctaaagtacaaaaatagatagaaattatgatctcagcgtggtgtgatcttgacgaaccacgtgtgccaactaccatgtccgtgtagaggaggatgcaagcggcgtacctgcagctgatggaggccgtgatggtgtaggcgatgccatagccgaacagggccgtgtgctgcagaagcatgcacacccacgagctgttgctacctgtgcg

SEQ ID NO: 14557 - DNA, 2877 bp, Zea Mays
cgactctcgagtcccgagggatccttccgctccaccattctcttggtcaaaccgcccctcctcctccgcccctcaccctgctctctctctctctcgttctcagcctctgttccagtgttccttcctcctccactctttattatattttactcttctctctccagcgtaaaaaacaaatcgtgctgtgcgaacgatgagagagaaaagagagacggaggcaagtaatggcaggaggaaccttcttttcctgactccctgtggctgcagagtgcccatcatttgtccctgatccttgtgcttcgttcctgttgcgctttccttgggccatcggtagactgagccgtcgcgaagccttcccgttcccacaaggggtgtggcgtggagcgagcctcgccaccactgggctcctccggcgacctcctccctccagtcacaggttgagcaatccaagctgagatggaaggccatgtagcaatggggtggaaggatcctaatccaggccaagaatcttccatggtcttccaatccagagctgttcggccagacaccgtagaggggcacagcaacgaggacgttgaagccggatttgagaagcatggcttgtcagccgccttaaactcgcctcagcacgaaggccgatcactgccactgaccccacagtttggccagaactccagtcctggaagcagcctcgccgagaggatgcaggcaagagccggattcaaggtgccgaagctgaacatgcctttcagcacggtagctggagatgatagttcagtgccaggagctccatcgccctacctcacgatcccgcctggcttgagcccagcaacgctgctggagtcacctgtcttcatttcgaatgccctgggacaagcctcaccaaccacggggaagctattcttgtttggtagcacaaatgacaacgatcctattcgacctggaggccctccagttggagatggcactgatgctttttctttcaagcccttagatctgaaatcctcacactacactgctgaagtaatgaaggaacaaaatacgcagtcttctgtgaagactgaagctaagactcaggcagtccaagaggctaatttgctgggccaactgaaccagcagaatcacgatgggcagacaaacatgaatagtgacggtgctcgtgactccaagctcagccgtcttgcgtctggcaccggtgcaggcaatgaacacgcatcacccccggattacggccagagagccgaggaagctgatgcgagggaagactacccggcggcaatggccgttacagcgccagcggaggacgggtacagctggaggaagtacgggcagaagcaggtgaagcacagcgagtacccgcgcagctacttcaagtgcacgcatcccaactgcctggtgaagaagaaggttgagcgctcgcacgaggggcacgtcacggagatcatctacaagggaacgcacaaccacccgaagcccacgcagagccgccggccaggcgcaggcgcgcacccgttgggcggcggtgcgcaggcggacgcagccgacaacctgcaggggtcacaggcaaacgcggcggaagccaaccaggcgtggcgtgcgggtgtccaggatggcgtggacgcgacgtcgcccccgtcggttcccggtgagctctgtgactcggcggcgtcgatgcaggtcgactgcgcggcccggtttgggtcccccgagggcgcggacgtgacgtctgccgtgtctgacgaggtggacggggacgacagggtgactctgactcatggcggtgccaacgcggcggagggcgacgaactggaatctaaacgaaggaagctggagtcatacgccattgacatgagcactgcgtcgagagctgttcgcgagcctcgagtggtgatccaaacgacgagcgaggtggacatcctcgatgacggctaccgctggcgcaagtacgggcagaaggtcgtcaagggcaacccgaatccaaggagctactacaagtgcacgcaaccgggctgcacggtgcggaagcacgtggagcgcgcgtcgcacgacctcaaggccgtgatcaccacgtacgagggcaagcacaaccacgaggttcccgccgcgaggaacagcggccacccgagcgccgcggcggcgccaggcgcgggtggcccgcgcaggcaggagcacccgtccgtgcacgacggcctgatgagacagcacctgggcggctgcggcgtgccgttcggcctgccgccgccgccgccgccgccaagggacccgctggcgccgatgcgcaactacccgacgtacggcttcactgcccttggcgccggctccacgtcactgccgagcctgccgatgctcccggtgttggcgccgtcctccctgcaccagcacccgctgctgaggcaccggcaggcggtgcaggctgccggtctcgcgtggcgcccaaggccgacgtgaaggtagagggcagcgttgccggcggcgggatcccgtcggtgtaccagcagatgatccgctgcgggctgcgtctgccccaccagatgtagatacttaaaagtggagaggattagagtgattctcaagttcgtttcttaccattcctgttagtatgagttcgtgataagtattatagcgtggaaactgacgcccgctgcattcgttttttttcacccttctgttccacttcattttttcccgtatttatttatttactacccttcctcaatgatattcggttcttcttgttcagcaagacagcaactggcatcagttaatgttcatttgagaaatgaccaacagtttctgggctggcaacttggtatcagcccagaaagcactttagccggtgagcccagctgattagctactgtttctagtaccaagccc

SEQ ID NO: 14558 - DNA, 2594 bp, Zea Mays
attttgagtttgtgggaaaaaaactgatgataattggactgggaatatagtgtctctgattagaagtataaaagttggtgttcttccagttggaggagattgcctgccatctctgagaaatctctggttgagcaatccaagctgagatggaaggccatgtagcaatggggtggaaggatcctaatccaggccaagaatcttccatggtcttccaatccagagctgttcggccagacaccgtagaggggcacagcaacgaggacgttgaagccggatttgagaagcatggcttgtcagccgccttaaactcgcctcagcacgaaggccgatcactgccactgaccccacagtttggccagaactccagtcctggaagcagcctcgccgagaggatgcaggcaagagccggattcaaggtgccgaagctgaacatgcctttcagcacggtagctggagatgatagttcagtgccaggagctccatcgccctacctcacgatcccgcctggcttgagcccagcaacgctgctggagtcacctgtcttcatttcgaatgccctgggacaagcctcaccaaccacggggaagctattcttgtttggtagcacaaatgacaacgatcctattcgacctggaggccctccagttggagatggcactgatgctttttctttcaagcccttagatctgaaatcctcacactacactgctgaagtaatgaaggaacaaaatacgcagtcttctgtgaagactgaagctaagactcaggcagtccaagaggctaatttgctgggccaactgaaccagcagaatcacgatgggcagacaaacatgaatagtgacggtgctcgtgactccaagctcagccgtcttgcgtctggcaccggtgcaggcaatgaacacgcatcacccccggattacggccagagagccgaggaagctgatgcgagggaagactacccggcggcaatggccgttacagcgccagcggaggacgggtacagctggaggaagtacgggcagaagcaggtgaagcacagcgagtacccgcgcagctacttcaagtgcacgcatcccaactgcctggtgaagaagaaggttgagcgctcgcacgaggggcacgtcacggagatcatctacaagggaacgcacaaccacccgaagcccacgcagagccgccggccaggcgcaggcgcgcacccgttgggcggcggtgcgcaggcggacgcagccgacaacctgcaggggtcacaggcaaacgcggcggaagccaaccaggcgtggcgtgcgggtgtccaggatggcgtggacgcgacgtcgcccccgtcggttcccggtgagctctgtgactcggcggcgtcgatgcaggtcgactgcgcggcccggtttgggtcccccgagggcgcggacgtgacgtctgccgtgtctgacgaggtggacggggacgacagggtgactctgactcatggcggtgccaacgcggcggagggcgacgaactggaatctaaacgaagagctgaccgtctgtctggttatttcaggaagctggagtcatacgccattgacatgagcactgcgtcgagagctgttcgcgagcctcgagtggtgatccaaacgacgagcgaggtggacatcctcgatgacggctaccgctggcgcaagtacgggcagaaggtcgtcaagggcaacccgaatccaaggagctactacaagtgcacgcaaccgggctgcacggtgcggaagcacgtggagcgcgcgtcgcacgacctcaaggccgtgatcaccacgtacgagggcaagcacaaccacgaggttcccgccgcgaggaacagcggccacccgagcgccgcggcggcgccaggcgcgggtggcccgcgcaggcaggagcacccgtccgtgcacgacggcctgatgagacagcacctgggcggctgcggcgtgccgttcggcctgccgccgccgccgccgccgccaagggacccgctggcgccgatgcgcaactacccgacgtacggcttcactgcccttggcgccggctccacgtcactgccgagcctgccgatgctcccggtgttggcgccgtcctccctgcaccagcacccgctgctgaggcaccggcaggcggtgcaggctgccggtctcgcgtggcgcccaaggccgacgtgaaggtagagggcagcgttgccggcggcgggatcccgtcggtgtaccagcagatgatccgctgcgggctgcgtctgccccaccagatgtagatacttaaaagtggagaggattagagtgattctcaagttcgtttcttaccattcctgttagtatgagttcgtgataagtattatagcgtggaaactgacgcccgctgcattcgttttttttcacccttctgttccacttcattttttcccgtatttatttatttactacccttcctcaatgatattcggttcttcttgttcagcaagacagcaactggcatcagttaatgttcatttgagaaatgaccaacagtttctgggctggcaacttggtatcagcccagaaagcactttagccggtgagcccagctgattagctactgtttctagtaccaagccc

SEQ ID NO: 14559 - DNA, 2462 bp, Zea Mays
tcttgatgcatttggatcctggttgagcaatccaagctgagatggaaggccatgtagcaatggggtggaaggatcctaatccaggccaagaatcttccatggtcttccaatccagagctgttcggccagacaccgtagaggggcacagcaacgaggacgttgaagccggatttgagaagcatggcttgtcagccgccttaaactcgcctcagcacgaaggccgatcactgccactgaccccacagtttggccagaactccagtcctggaagcagcctcgccgagaggatgcaggcaagagccggattcaaggtgccgaagctgaacatgcctttcagcacggtagctggagatgatagttcagtgccaggagctccatcgccctacctcacgatcccgcctggcttgagcccagcaacgctgctggagtcacctgtcttcatttcgaatgccctgggacaagcctcaccaaccacggggaagctattcttgtttggtagcacaaatgacaacgatcctattcgacctggaggccctccagttggagatggcactgatgctttttctttcaagcccttagatctgaaatcctcacactacactgctgaagtaatgaaggaacaaaatacgcagtcttctgtgaagactgaagctaagactcaggcagtccaagaggctaatttgctgggccaactgaaccagcagaatcacgatgggcagacaaacatgaatagtgacggtgctcgtgactccaagctcagccgtcttgcgtctggcaccggtgcaggcaatgaacacgcatcacccccggattacggccagagagccgaggaagctgatgcgagggaagactacccggcggcaatggccgttacagcgccagcggaggacgggtacagctggaggaagtacgggcagaagcaggtgaagcacagcgagtacccgcgcagctacttcaagtgcacgcatcccaactgcctggtgaagaagaaggttgagcgctcgcacgaggggcacgtcacggagatcatctacaagggaacgcacaaccacccgaagcccacgcagagccgccggccaggcgcaggcgcgcacccgttgggcggcggtgcgcaggcggacgcagccgacaacctgcaggggtcacaggcaaacgcggcggaagccaaccaggcgtggcgtgcgggtgtccaggatggcgtggacgcgacgtcgcccccgtcggttcccggtgagctctgtgactcggcggcgtcgatgcaggtcgactgcgcggcccggtttgggtcccccgagggcgcggacgtgacgtctgccgtgtctgacgaggtggacggggacgacagggtgactctgactcatggcggtgccaacgcggcggagggcgacgaactggaatctaaacgaaggaagctggagtcatacgccattgacatgagcactgcgtcgagagctgttcgcgagcctcgagtggtgatccaaacgacgagcgaggtggacatcctcgatgacggctaccgctggcgcaagtacgggcagaaggtcgtcaagggcaacccgaatccaaggagctactacaagtgcacgcaaccgggctgcacggtgcggaagcacgtggagcgcgcgtcgcacgacctcaaggccgtgatcaccacgtacgagggcaagcacaaccacgaggttcccgccgcgaggaacagcggccacccgagcgccgcggcggcgccaggcgcgggtggcccgcgcaggcaggagcacccgtccgtgcacgacggcctgatgagacagcacctgggcggctgcggcgtgccgttcggcctgccgccgccgccgccgccgccaagggacccgctggcgccgatgcgcaactacccgacgtacggcttcactgcccttggcgccggctccacgtcactgccgagcctgccgatgctcccggtgttggcgccgtcctccctgcaccagcacccgctgctgaggcaccggcaggcggtgcaggctgccggtctcgcgtggcgcccaaggccgacgtgaaggtagagggcagcgttgccggcggcgggatcccgtcggtgtaccagcagatgatccgctgcgggctgcgtctgccccaccagatgtagatacttaaaagtggagaggattagagtgattctcaagttcgtttcttaccattcctgttagtatgagttcgtgataagtattatagcgtggaaactgacgcccgctgcattcgttttttttcacccttctgttccacttcattttttcccgtatttatttatttactacccttcctcaatgatattcggttcttcttgttcagcaagacagcaactggcatcagttaatgttcatttgagaaatgaccaacagtttctgggctggcaacttggtatcagcccagaaagcactttagccggtgagcccagctgattagctactgtttctagtaccaagccc

SEQ ID NO: 14560 - DNA, 2845 bp, Zea Mays
gcaaagcaaccaagtactactaacacgcgcgcggccgcacggccgcaccgcaccgcaccgcacaatcgaccgtccccgcgacggtccagactgcagagagaccagaccccaacgccgctcgcgttcgggcgcggcccttcccccgccgccctcaccaccctccctccccgccgcttccgccccgtaggacgcggccacgttcgccgcctcaaactgttggtgctgtggctggggcgagaggagcggcggcgctagggtttcccatggacggcggcgaggatcggacgttcaaggcgaactttaccggcgagggggtgacgatgctgcaggaccgcgtcaaggagaagctcagggagctcatgggcgactactccgacgacacccttgccgagtatgttgtagtgttgctaaggaatgggagacgcaaggatgaggctgcaaaggagctacaggttatgggaccatctgtcctcaaatctgcacctttatgttcatgctaaatctgcctcttctaaggatgatgttaaaagcactcacagtgctgccagaggattgcctgttcacagtgtgacaagcagcatgcaagttaatcatgaacctgaagctgaaacccagaagacagtggtgactcataaaaaaagagattggggtcatcaaaaaagagattggggaacaattgatcgaggtcaatcagaagcagttcctcttagaagcgttgtagccaatgtttctcatgtggatgaaaaggattttcacaaatcacatgcagatgaaaaggcttttcataaatcacattctctaagacgaacccgctcgcctgacatgcataaccacagaaagaggagcagagaggcagatgtgcagtctaccaagaggtcatcccacccagttgttagtgcaccacgtcggcttcttcagtttgctgttcgtgatgctgtcagaactgtgcagccagttacttctagttctgaatcagattccaagcgtattcgttctgtagtgtcaacattggcatcagattccacacttgatatcactcatattaggttacagaaaacaaattcagatttgagagtaccaggtgccacagcagcactaagagctgcagctgaggctgctggagatgctctcaaggatagcttttctagaagtgtttttagtagattgggcagaatgcccacaataaattctactgaacaatcaccttatcacagagaacaagatctcaaaggcaaagaatatgggaatatagataatatacaagcagaaaatcaagttgaatttgacgaaagaaatcaacatggtggcagcgatgtttacatgcgcgatcagagaacagaggaagctactggttttattcccaatattgatgagtatgatcagaacagtgcagttaggtctaatggattgggttctcgccaaagcgcattgcctgctagtggaggtaaagagtcattagtactggggtatgtaagaggagcttctgaaataagaagcagaagattgatagcccaggggccacatgctggttcaggaccaagaccatctgaaaagacccaaaatgtttctggtaacactaacatgcagaagcttccaattcatgtaactggagatgccgttgcatttgatcatcaagtgccaatggagaaggttgctgatgcaaggaaatcacatgtgaagaccgcacaggctaatgatgtatccatgatgactgataagtccaaagatttgatacagccgagttcaatgctgcaggcacagaaggcttctggtgctgctggatcaaatactacaggccaacctgaaggtggccctgattctagaactgtctttgttagtaatgtacattttggttcatcaaaagatgctctttctcgtcacttcaataagtttggagcggtcttaaagacccatattgtgactgatggtgtcactggtcagtcaactggctcagcatatattgagtttttgcacaaagaatcagcagaacaggcattaaccctgaacgggacatcatttatgtcacgcattttgaaggtcgttcggaaaagctccactgaagtaacccagctgcctgtcttgccccgtgcttcttggggatcaccatttgcttcaaggctcattagaactgcatacccaaggccgaactatcccggtgcaattcgtgggcgactatcactcaggggtgctgcccggagtttacagtggaagcgtggtgttgctgattcaggagatgttggaaaacctagtccaactgcacctgggaatcagttggtcaccccggccacacgaaacttcacctacacacgcacggagccaaaaacaaatgcgggagcgatggcatgactgatcagctgtagcatgccgcagcgtcgcagaaagagatcgtgattgatgactgtttcgtagtccattcagctgcttttggtaaatatttaagtagctgcagatcttagtttgtagcaggctggtttttgtggacctcaaccttgagtaatattctgtgaggttttctgtgctgatttttcaccgtcagcacacccgttgttctgctggctgttcggagttcgtggatagagggtaaaatatataaaaagtagttttaaatgaaaatacgaacgcgataggtaggttgcaacatttgttttttttattgatggattatttaggatgtgtttgtttgcaggacagccacgtcctctcttgtcttctaattctgacgtggggacaacactataacgatcctgcttcgtcatgtcattgcaactaagcacacccttaaccttcatggtttccttgtggtgtgatctgtgatcataggtttgtgctgctatcgaaggtttgg

SEQ ID NO: 14561 - DNA, 2624 bp, Zea Mays
gcaaagcaaccaagtactactaacacgcgcgcggccgcacggccgcaccgcaccgcaccgcacaatcgaccgtccccgcgacggtccagactgcagagagaccagaccccaacgccgctcgcgttcgggcgcggcccttcccccgccgccctcaccaccctccctccccgccgcttccgccccgtaggacgcggccacgttcgccgcctcaaactgttggtgctgtggctggggcgagaggagcggcggcgctagggtttcccatggacggcggcgaggatcggacgttcaaggcgaactttaccggcgagggggtgacgatgctgcaggaccgcgtcaaggagaagctcagggagctcatgggcgactactccgacgacacccttgccgagtatgttgtagtgttgctaaggaatgggagacgcaaggatgaggctgcaaaggagctacaggtttttttaggcgatgacaatgatgcatttgtatcctggttatgggaccatctgtcctcaaatctgcacctttatgttcatgctaaatctgcctcttctaaggatgatgttaaaagcactcacagtgctgccagaggattgcctgttcacagtgtgacaagcagcatgcaagttaatcatgaacctgaagctgaaacccagaagacagtggtgactcataaaaaaagagattggggtcatcaaaaaagagattggggaacaattgatcgaggtcaatcagaagcagttcctcttagaagcgttgtagccaatgtttctcatgtggatgaaaaggattttcacaaatcacatgcagatgaaaaggcttttcataaatcacattctctaagacgaacccgctcgcctgacatgcataaccacagaaagaggagcagagaggcagatgtgcagtctaccaagaggtcatcccacccagttgttagtgcaccacgtcggcttcttcagtttgctgttcgtgatgctgtcagaactgtgcagccagttacttctagttctgaatcagattccaagcgtattcgttctgtagtgtcaacattggcatcagattccacacttgatatcactcatattaggttacagaaaacaaattcagatttgagagtaccaggtgccacagcagcactaagagctgcagctgaggctgctggagatgctctcaaggatagcttttctagaagtgtttttagtagattgggcagaatgcccacaataaattctactgaacaatcaccttatcacagagaacaagatctcaaaggcaaagaatatgggaatatagataatatacaagcagaaaatcaagttgaatttgacgaaagaaatcaacatggtggcagcgatgtttacatgcgcgatcagagaacagaggaagctactggttttattcccaatattgatgagtatgatcagaacagtgcagttaggtctaatggattgggttctcgccaaagcgcattgcctgctagtggaggtaaagagtcattagtactggggtatgtaagaggagcttctgaaataagaagcagaagattgatagcccaggggccacatgctggttcaggaccaagaccatctgaaaagacccaaaatgtttctggtaacactaacatgcagaagcttccaattcatgtaactggagatgccgttgcatttgatcatcaagtgccaatggagaaggttgctgatgcaaggaaatcacatgtgaagaccgcacaggctaatgatgtatccatgatgactgataagtccaaagatttgatacagccgagttcaatgctgcaggcacagaaggcttctggtgctgctggatcaaatactacaggccaacctgaaggtggccctgattctagaactgtctttgttagtaatgtacattttggttcatcaaaagatgctctttctcgtcacttcaataagtttggagcggtcttaaagacccatattgtgactgatggtgtcactggtcagtcaactggctcagcatatattgagtttttgcacaaagaatcagcagaacaggcattaaccctgaacgggacatcatttatgtcacgcattttgaaggtcgttcggaaaagctccactgaagtaacccagctgcctgtcttgccccgtgcttcttggggatcaccatttgcttcaaggctcattagaactgcatacccaaggccgaactatcccggtgcaattcgtgggcgactatcactcaggggtgctgcccggagtttacagtggaagcgtggtgttgctgattcaggagatgttggaaaacctagtccaactgcacctgggaatcagttggtcaccccggccacacgaaacttcacctacacacgcacggagccaaaaacaaatgcgggagcgatggcatgactgatcagctgtagcatgccgcagcgtcgcagaaagagatcgtgattgatgactgtttcgtagtccattcagctgcttttggacagccacgtcctctcttgtcttctaattctgacgtggggacaacactataacgatcctgcttcgtcatgtcattgcaactaagcacacccttaaccttcatggtttccttgtggtgtgatctgtgatcataggtttgtgctgctatcgaaggtttgg

SEQ ID NO: 14562 - DNA, 2587 bp, Zea Mays
gcgtcgcacatgccatctgtggaatgcggttctatagcggacggtgcgcggctctctggattttgcggaatcgcgtttcgaatcgcgcatttggagtatgttgtagtgttgctaaggaatgggagacgcaaggatgaggctgcaaaggagctacaggtttttttaggcgatgacaatgatgcatttgtatcctggttatgggaccatctgtcctcaaatctgcacctttatgttcatgctaaatctgcctcttctaaggatgatgttaaaagcactcacagtgctgccagaggattgcctgttcacagtgtgacaagcagcatgcaagttaatcatgaacctgaagctgaaacccagaagacagtggtgactcataaaaaaagagattggggtcatcaaaaaagagattggggaacaattgatcgaggtcaatcagaagcagttcctcttagaagcgttgtagccaatgtttctcatgtggatgaaaaggattttcacaaatcacatgcagatgaaaaggcttttcataaatcacattctctaagacgaacccgctcgcctgacatgcataaccacagaaagaggagcagagaggcagatgtgcagtctaccaagaggtcatcccacccagttgttagtgcaccacgtcggcttcttcagtttgctgttcgtgatgctgtcagaactgtgcagccagttacttctagttctgaatcagattccaagcgtattcgttctgtagtgtcaacattggcatcagattccacacttgatatcactcatattaggttacagaaaacaaattcagatttgagagtaccaggtgccacagcagcactaagagctgcagctgaggctgctggagatgctctcaaggatagcttttctagaagtgtttttagtagattgggcagaatgcccacaataaattctactgaacaatcaccttatcacagagaacaagatctcaaaggcaaagaatatgggaatatagataatatacaagcagaaaatcaagttgaatttgacgaaagaaatcaacatggtggcagcgatgtttacatgcgcgatcagagaacagaggaagctactggttttattcccaatattgatgagtatgatcagaacagtgcagttaggtctaatggattgggttctcgccaaagcgcattgcctgctagtggaggtaaagagtcattagtactggggtatgtaagaggagcttctgaaataagaagcagaagattgatagcccaggggccacatgctggttcaggaccaagaccatctgaaaagacccaaaatgtttctggtaacactaacatgcagaagcttccaattcatgtaactggagatgccgttgcatttgatcatcaagtgccaatggagaaggttgctgatgcaaggaaatcacatgtgaagaccgcacaggctaatgatgtatccatgatgactgataagtccaaagatttgatacagccgagttcaatgctgcaggcacagaaggcttctggtgctgctggatcaaatactacaggccaacctgaaggtggccctgattctagaactgtctttgttagtaatgtacattttggttcatcaaaagatgctctttctcgtcacttcaataagtttggagcggtcttaaagacccatattgtgactgatggtgtcactggtcagtcaactggctcagcatatattgagtttttgcacaaagaatcagcagaacaggcattaaccctgaacgggacatcatttatgtcacgcattttgaaggtcgttcggaaaagctccactgaagtaacccagctgcctgtcttgccccgtgcttcttggggatcaccatttgcttcaaggctcattagaactgcatacccaaggccgaactatcccggtgcaattcgtgggcgactatcactcaggggtgctgcccggagtttacagtggaagcgtggtgttgctgattcaggagatgttggaaaacctagtccaactgcacctgggaatcagttggtcaccccggccacacgaaacttcacctacacacgcacggagccaaaaacaaatgcgggagcgatggcatgactgatcagctgtagcatgccgcagcgtcgcagaaagagatcgtgattgatgactgtttcgtagtccattcagctgcttttggtaaatatttaagtagctgcagatcttagtttgtagcaggctggtttttgtggacctcaaccttgagtaatattctgtgaggttttctgtgctgatttttcaccgtcagcacacccgttgttctgctggctgttcggagttcgtggatagagggtaaaatatataaaaagtagttttaaatgaaaatacgaacgcgataggtaggttgcaacatttgttttttttattgatggattatttaggatgtgtttgtttgcaggacagccacgtcctctcttgtcttctaattctgacgtggggacaacactataacgatcctgcttcgtcatgtcattgcaactaagcacacccttaaccttcatggtttccttgtggtgtgatctgtgatcataggtttgtgctgctatcgaaggtttgg

SEQ ID NO: 14563 - DNA, 2437 bp, Zea Mays
aacacctctggtgtgtccggagtggaggttaaagtacttggagtatgttgtagtgttgctaaggaatgggagacgcaaggatgaggctgcaaaggagctacaggtttttttaggcgatgacaatgatgcatttgtatcctggttatgggaccatctgtcctcaaatctgcacctttatgttcatgctaaatctgcctcttctaaggatgatgttaaaagcactcacagtgctgccagaggattgcctgttcacagtgtgacaagcagcatgcaagttaatcatgaacctgaagctgaaacccagaagacagtggtgactcataaaaaaagagattggggtcatcaaaaaagagattggggaacaattgatcgagatgaaaaggcttttcataaatcacattctctaagacgaacccgctcgcctgacatgcataaccacagaaagaggagcagagaggcagatgtgcagtctaccaagaggtcatcccacccagttgttagtgcaccacgtcggcttcttcagtttgctgttcgtgatgctgtcagaactgtgcagccagttacttctagttctgaatcagattccaagcgtattcgttctgtagtgtcaacattggcatcagattccacacttgatatcactcatattaggttacagaaaacaaattcagatttgagagtaccaggtgccacagcagcactaagagctgcagctgaggctgctggagatgctctcaaggatagcttttctagaagtgtttttagtagattgggcagaatgcccacaataaattctactgaacaatcaccttatcacagagaacaagatctcaaaggcaaagaatatgggaatatagataatatacaagcagaaaatcaagttgaatttgacgaaagaaatcaacatggtggcagcgatgtttacatgcgcgatcagagaacagaggaagctactggttttattcccaatattgatgagtatgatcagaacagtgcagttaggtctaatggattgggttctcgccaaagcgcattgcctgctagtggaggtaaagagtcattagtactggggtatgtaagaggagcttctgaaataagaagcagaagattgatagcccaggggccacatgctggttcaggaccaagaccatctgaaaagacccaaaatgtttctggtaacactaacatgcagaagcttccaattcatgtaactggagatgccgttgcatttgatcatcaagtgccaatggagaaggttgctgatgcaaggaaatcacatgtgaagaccgcacaggctaatgatgtatccatgatgactgataagtccaaagatttgatacagccgagttcaatgctgcaggcacagaaggcttctggtgctgctggatcaaatactacaggccaacctgaaggtggccctgattctagaactgtctttgttagtaatgtacattttggttcatcaaaagatgctctttctcgtcacttcaataagtttggagcggtcttaaagacccatattgtgactgatggtgtcactgctcagcatatattgagtttttgcacaaagaatcagcagaacaggcattaaccctgaacgggacatcatttatgtcacgcattttgaaggtcgttcggaaaagctccactgaagtaacccagctgcctgtcttgccccgtgcttcttggggatcaccatttgcttcaaggctcattagaactgcatacccaaggccgaactatcccggtgcaattcgtgggcgactatcactcaggggtgctgcccggagtttacagtggaagcgtggtgttgctgattcaggagatgttggaaaacctagtccaactgcacctgggaatcagttggtcaccccggccacacgaaacttcacctacacacgcacggagccaaaaacaaatgcgggagcgatggcatgactgatcagctgtagcatgccgcagcgtcgcagaaagagatcgtgattgatgactgtttcgtagtccattcagctgcttttggtaaatatttaagtagctgcagatcttagtttgtagcaggctggtttttgtggacctcaaccttgagtaatattctgtgaggttttctgtgctgatttttcaccgtcagcacacccgttgttctgctggctgttcggagttcgtggatagagggtaaaatatataaaaagtagttttaaatgaaaatacgaacgcgataggtaggttgcaacatttgttttttttattgatggattatttaggatgtgtttgtttgcaggacagccacgtcctctcttgtcttctaattctgacgtggggacaacactataacgatcctgcttcgtcatgtcattgcaactaagcacacccttaaccttcatggtttccttgtggtgtgatctgtgatcataggtttgtgctgctatcgaaggtttgg

SEQ ID NO: 14564 - DNA, 2496 bp, Zea Mays
aacacctctggtgtgtccggagtggaggttaaagtacttggagtatgttgtagtgttgctaaggaatgggagacgcaaggatgaggctgcaaaggagctacaggttatgggaccatctgtcctcaaatctgcacctttatgttcatgctaaatctgcctcttctaaggatgatgttaaaagcactcacagtgctgccagaggattgcctgttcacagtgtgacaagcagcatgcaagttaatcatgaacctgaagctgaaacccagaagacagtggtgactcataaaaaaagagattggggtcatcaaaaaagagattggggaacaattgatcgaggtcaatcagaagcagttcctcttagaagcgttgtagccaatgtttctcatgtggatgaaaaggattttcacaaatcacatgcagatgaaaaggcttttcataaatcacattctctaagacgaacccgctcgcctgacatgcataaccacagaaagaggagcagagaggcagatgtgcagtctaccaagaggtcatcccacccagttgttagtgcaccacgtcggcttcttcagtttgctgttcgtgatgctgtcagaactgtgcagccagttacttctagttctgaatcagattccaagcgtattcgttctgtagtgtcaacattggcatcagattccacacttgatatcactcatattaggttacagaaaacaaattcagatttgagagtaccaggtgccacagcagcactaagagctgcagctgaggctgctggagatgctctcaaggatagcttttctagaagtgtttttagtagattgggcagaatgcccacaataaattctactgaacaatcaccttatcacagagaacaagatctcaaaggcaaagaatatgggaatatagataatatacaagcagaaaatcaagttgaatttgacgaaagaaatcaacatggtggcagcgatgtttacatgcgcgatcagagaacagaggaagctactggttttattcccaatattgatgagtatgatcagaacagtgcagttaggtctaatggattgggttctcgccaaagcgcattgcctgctagtggaggtaaagagtcattagtactggggtatgtaagaggagcttctgaaataagaagcagaagattgatagcccaggggccacatgctggttcaggaccaagaccatctgaaaagacccaaaatgtttctggtaacactaacatgcagaagcttccaattcatgtaactggagatgccgttgcatttgatcatcaagtgccaatggagaaggttgctgatgcaaggaaatcacatgtgaagaccgcacaggctaatgatgtatccatgatgactgataagtccaaagatttgatacagccgagttcaatgctgcaggcacagaaggcttctggtgctgctggatcaaatactacaggccaacctgaaggtggccctgattctagaactgtctttgttagtaatgtacattttggttcatcaaaagatgctctttctcgtcacttcaataagtttggagcggtcttaaagacccatattgtgactgatggtgtcactggtcagtcaactggctcagcatatattgagtttttgcacaaagaatcagcagaacaggcattaaccctgaacgggacatcatttatgtcacgcattttgaaggtcgttcggaaaagctccactgaagtaacccagctgcctgtcttgccccgtgcttcttggggatcaccatttgcttcaaggctcattagaactgcatacccaaggccgaactatcccggtgcaattcgtgggcgactatcactcaggggtgctgcccggagtttacagtggaagcgtggtgttgctgattcaggagatgttggaaaacctagtccaactgcacctgggaatcagttggtcaccccggccacacgaaacttcacctacacacgcacggagccaaaaacaaatgcgggagcgatggcatgactgatcagctgtagcatgccgcagcgtcgcagaaagagatcgtgattgatgactgtttcgtagtccattcagctgcttttggtaaatatttaagtagctgcagatcttagtttgtagcaggctggtttttgtggacctcaaccttgagtaatattctgtgaggttttctgtgctgatttttcaccgtcagcacacccgttgttctgctggctgttcggagttcgtggatagagggtaaaatatataaaaagtagttttaaatgaaaatacgaacgcgataggtaggttgcaacatttgttttttttattgatggattatttaggatgtgtttgtttgcaggacagccacgtcctctcttgtcttctaattctgacgtggggacaacactataacgatcctgcttcgtcatgtcattgcaactaagcacacccttaaccttcatggtttccttgtggtgtgatctgtgatcataggtttgtgctgctatcgaaggtttgg

SEQ ID NO: 14565 - DNA, 2483 bp, Zea Mays
aacacctctggtgtgtccggagtggaggttaaagtacttggagtatgttgtagtgttgctaaggaatgggagacgcaaggatgaggctgcaaaggagctacaggttatgggaccatctgtcctcaaatctgcacctttatgttcatgctaaatctgcctcttctaaggatgatgttaaaagcactcacagtgctgccagaggattgcctgttcacagtgtgacaagcagcatgcaagttaatcatgaacctgaagctgaaacccagaagacagtggtgactcataaaaaaagagattggggtcatcaaaaaagagattggggaacaattgatcgaggtcaatcagaagcagttcctcttagaagcgttgtagccaatgtttctcatgtggatgaaaaggattttcacaaatcacatgcagatgaaaaggcttttcataaatcacattctctaagacgaacccgctcgcctgacatgcataaccacagaaagaggagcagagaggcagatgtgcagtctaccaagaggtcatcccacccagttgttagtgcaccacgtcggcttcttcagtttgctgttcgtgatgctgtcagaactgtgcagccagttacttctagttctgaatcagattccaagcgtattcgttctgtagtgtcaacattggcatcagattccacacttgatatcactcatattaggttacagaaaacaaattcagatttgagagtaccaggtgccacagcagcactaagagctgcagctgaggctgctggagatgctctcaaggatagcttttctagaagtgtttttagtagattgggcagaatgcccacaataaattctactgaacaatcaccttatcacagagaacaagatctcaaaggcaaagaatatgggaatatagataatatacaagcagaaaatcaagttgaatttgacgaaagaaatcaacatggtggcagcgatgtttacatgcgcgatcagagaacagaggaagctactggttttattcccaatattgatgagtatgatcagaacagtgcagttaggtctaatggattgggttctcgccaaagcgcattgcctgctagtggaggtaaagagtcattagtactggggtatgtaagaggagcttctgaaataagaagcagaagattgatagcccaggggccacatgctggttcaggaccaagaccatctgaaaagacccaaaatgtttctggtaacactaacatgcagaagcttccaattcatgtaactggagatgccgttgcatttgatcatcaagtgccaatggagaaggttgctgatgcaaggaaatcacatgtgaagaccgcacaggctaatgatgtatccatgatgactgataagtccaaagatttgatacagccgagttcaatgctgcaggcacagaaggcttctggtgctgctggatcaaatactacaggccaacctgaaggtggccctgattctagaactgtctttgttagtaatgtacattttggttcatcaaaagatgctctttctcgtcacttcaataagtttggagcggtcttaaagacccatattgtgactgatggtgtcactgctcagcatatattgagtttttgcacaaagaatcagcagaacaggcattaaccctgaacgggacatcatttatgtcacgcattttgaaggtcgttcggaaaagctccactgaagtaacccagctgcctgtcttgccccgtgcttcttggggatcaccatttgcttcaaggctcattagaactgcatacccaaggccgaactatcccggtgcaattcgtgggcgactatcactcaggggtgctgcccggagtttacagtggaagcgtggtgttgctgattcaggagatgttggaaaacctagtccaactgcacctgggaatcagttggtcaccccggccacacgaaacttcacctacacacgcacggagccaaaaacaaatgcgggagcgatggcatgactgatcagctgtagcatgccgcagcgtcgcagaaagagatcgtgattgatgactgtttcgtagtccattcagctgcttttggtaaatatttaagtagctgcagatcttagtttgtagcaggctggtttttgtggacctcaaccttgagtaatattctgtgaggttttctgtgctgatttttcaccgtcagcacacccgttgttctgctggctgttcggagttcgtggatagagggtaaaatatataaaaagtagttttaaatgaaaatacgaacgcgataggtaggttgcaacatttgttttttttattgatggattatttaggatgtgtttgtttgcaggacagccacgtcctctcttgtcttctaattctgacgtggggacaacactataacgatcctgcttcgtcatgtcattgcaactaagcacacccttaaccttcatggtttccttgtggtgtgatctgtgatcataggtttgtgctgctatcgaaggtttgg

SEQ ID NO: 14566 - DNA, 3078 bp, Zea Mays
cctctctctctctcacctcctgtcccctctcctctccgtgtccggtggagcttctccacctccggccaagatctggaaccagcgagggtgcccggcggttctcatcccggaccccgactctttcctcatctctgcaacctctggatcctccatctgcccccctgcaggatctggaagctgcacccgtcggggggagaagcaagcagcacatccagcccgctcgagctcgctcatctgacctcaccactgagcttccgcaggatcttcacatccccattccattgacaacgtgaaagagaacatgtgacggggctgccaagctacatgacaacgacgccgattgccgaatgccgagacaccgcgcacgctcttgcagataaagatgatcggttgatcgacgtggtatttgtaccactttgctgtccgtgaaagcccgctatataggtggtgacatcaagtgatcaagattttatggtgcgcaagaggttgggttatagttcccgtggccatcgaattccaactatgccacgtgttccaaactcagctcgggggaaacgttctaccagaagaaagaaagatgagaatgatgatatgtgtgcaatggatttgctcgcaactgtggcaggaaagttactagcagatcaggacaattcatctagcgttcctaataccagtgcagcgaaagctaaaaaaaggaaatcagttaaggaagaacactttgatgaaattccgcctctaaaaaatgtggctatggagaaagatgtgggttctggtagcgttagtgccttccctaggcaagctaaaaactgcctggcagaaaactcatcgacaagaaatggagctgatacagtattagagtcactaacagtgaaatcaaatatgctagcaaaaattcctgagtgtggatcttatggaatacaccatgcaggctcctcaagttcagcagagcctgaacaagtgcatcaagctgaacctaaagtgagcagaagacaagcagatggacatcctgtggcttatggtatatttaactccgtggatgtggatggcaaacctccggctttggttagttctgacagtagctcgtgtgttcctctgagcagccatgacaaggaacatcaaacctcttccttgtatcggggtgtagtgcagtatactgcagatagagaagatgatgaaaattcttctgggtgcacgcatccaagcaccatagaaagtaagggttgcaaaccacaatatctaggtaaccataggataaggaaattgcttgcctcgaaggtaaggaaggcagcacgtaataagatttgtggagggattccatcaaaaaagatctgtggagggttgtcaaaaaaaggtagcaagctaaacttatgtgggaaaaagatgtccaccacacaccaaaaggtgcaaagaatgattttcaaaaagaaaaagctaacgcaccgtacatcttttgctaaggagatgctaactgaagctagtgggacatcatttgctatggaaggtcaaaataaatcatgtgaagctgagaattaccatgttaagctaagaatcaagtcattcaacatcccagaattgttcattaaggtcccagaaaatgcaaccattggatcactgaagagagctgttatggatgttgtcaatagtataatggaaggtggcctacgcgttggtgttcttcttcaaggaaaagatatccaagacgacaacaagacactttgtcaggctgggatatgccacgataaaaagctaaataacatagacttcacgctggagtgcgagcgtgagcgcgagcctccctctggagtcattatacaagaacagatggatttcctcaccacagatatggtggagccattagctaggatgaagtgtgaggaaccttttcctgaagccgacgtcggagatgacagccagcagcctagagcgccttatcgaagccgctctctctctgacctgtactctgtccattgtcctgttcagatggcttcacaggacacgacggcgagctcccaggccatcgtccctgtttcgcctgcgccttcagacgtgggcgctctagccattgtgcccctttgtaagtccaaggggtctgaagtcgggcagaggcgcatgaggaggcccttcactgtcggcgaggttgaggcgctggtgggagcggtcgagcagcttgggactggaaggtggagagctgttaaaacgcttgcattcgacagtatagatcaccggacctacgtcgacctcaagctgatccacccaaggccgaggaagctattagatggttttatccatcagcatctgcaggcaatgctcgtgctcaatacaacctaggcctttgcttgcagaacgggaagggtgtcaagcggaatcagaaggaagctctacggtgaagggcttgcacaggatccagtgcgtgctaagaggtggcttcaactagctgctgattgtggtcacaagaaagctctttatgagtgtggtattaagctttgtgcggcaggagacaaggtcaagtgtctcatgtatctagagctggcgacacggcgtggagaagctgctgctgctcacatgagggatgtaatacttgaatcgctctcggttgtgaatgcgcagcgtgccatgtcggatgctgataaatggaagcctaggacactccatcctagacctagaaggtgaggaaatgacgacgccaaagtgcagaagaaccatatcatcaagatgtccacaccctagtcatctgtggccagaattgaagcacagaaggtcgaagcaaacatgtatgcttcctcggcacccacagccacaggaatgtcagtagccatcctgtggctctctgtataaagccatccattggcagatgtaataccaggagaacttgtagtacagaaagttctgtagcaaatactacttcctcccttccaaattgctaccttaattctcgaatatttgtcaccactagttcatttttgaactaaaatgtgacaaatagaaataacggagcgagtataaaatactttggcttttctagatatgtattttttatacacttaaatacaaagtaaaaggaatgtatctataaatgca

SEQ ID NO: 14567 - DNA, 4662 bp, Zea Mays
cctctctctctctcacctcctgtcccctctcctctccgtgtccggtggagcttctccacctccggccaagatctggaaccagcgagggtgcccggcggttctcatcccggaccccgactctttcctcatctctgcaacctctggatcctccatctgcccccctgcaggatctggaagctgcacccgtcggggggagaagcaagcagcacatccagcccgctcgagctcgctcatctgacctcaccactgagcttccgcaggatcttcacatccccattccattgacaacgtgaaagagaacatgtgacggggctgccaagctacatgacaacgacgccgattgccgaatgccgagacaccgcgcacgctcttgcagataaagatgatcggttgatcgacgtggtatttgtaccactttgctgtccgtgaaagcccgctatataggtggtgacatcaagtgatcaagattttatggtgcgcaagaggttgggttatagttcccgtggccatcgaattccaactatgccacgtgttccaaactcagctcgggggaaacgttctaccagaagaaagaaagatgagaatgatgatatgtgtgcaatggatttgctcgcaactgtggcaggaaagttactagcagatcaggacaattcatctagcgttcctaataccagtgcagcgaaagctaaaaaaaggaaatcagttaaggaagaacactttgatgaaattccgcctctaaaaaatgtggctatggagaaagatgtgggttctggtagcgttagtgccttccctaggcaagctaaaaactgcctggcagaaaactcatcgacaagaaatggagctgatacagtattagagtcactaacagtgaaatcaaatatgctagcaaaaattcctgagtgtggatcttatggaatacaccatgcaggctcctcaagttcagcagagcctgaacaagtgcatcaagctgaacctaaagtgagcagaagacaagcagatggacatcctgtggcttatggtatatttaactccgtggatgtggatggcaaacctccggctttggttagttctgacagtagctcgtgtgttcctctgagcagccatgacaaggaacatcaaacctcttccttgtatcggggtgtagtgcagtatactgcagatagagaagatgatgaaaattcttctgggtgcacgcatccaagcaccatagaaagtaagggttgcaaaccacaatatctaggtaaccataggataaggaaattgcttgcctcgaaggtaaggaaggcagcacgtaataagatttgtggagggattccatcaaaaaagatctgtggagggttgtcaaaaaaaggtagcaagctaaacttatgtgggaaaaagatgtccaccacacaccaaaaggtgcaaagaatgattttcaaaaagaaaaagctaacgcaccgtacatcttttgctaaggagatgctaactgaagctagtgggacatcatttgctatggaaggtcaaaataaatcatgtgaagctgagaattaccatgttaagctaagaatcaagtcattcaacatcccagaattgttcattaaggtcccagaaaatgcaaccattggatcactgaagagagctgttatggatgttgtcaatagtataatggaaggtggcctacgcgttggtgttcttcttcaaggaaaagatatccaagacgacaacaagacactttgtcaggctgggatatgccacgataaaaagctaaataacatagacttcacgctggagtgcgagcgtgagcgcgagcctccctctggagtcattatacaagaacagatggatttcctcaccacagatatggtggagccattagctaggatgaagtgtgaggaaccttttcctgaagccgacgtcggagatgacagccagcagcctagagcgccttatcgaagccgctctctctctgacctgtactctgtccattgtcctgttcagatggcttcacaggacacgacggcgagctcccaggccatcgtccctgtttcgcctgcgccttcagacgtgggcgctctagccattgtgcccctttgtaagtccaaggggtctgaagtcgggcagaggcgcatgaggaggcccttcactgtcggcgaggttgaggcgctggtgggagcggtcgagcagcttgggactggaaggtggagagctgttaaaacgcttgcattcgacagtatagatcaccggacctacgtcgacctcaaggacaagtggaagaccctggttcacactgcgagcatatccccgcagcaacgaagagggcagccggttccacaagaacttctagaccgtgtcctcctagcgcaggcctactggtcccagcagcagcagcaggcgaggctctaggacaagccccgcggcaaggctcctctcctcttcctgagatctgttttccaagggaaagcttgtacttgtcctagattggcaacctatattgtttattttaccctatattgtttattttaccaaacaaagatgctaacatatagattggcaacctacaacacctatagaaaatggctgcaggctgctatgacaaattagtcactgtcagtgactgacatccgtataagtggaaaaacagtgacatgacatgctccggtcctgcggcttccagccaaacaacaacgaacccgcctcctcccctggcccgacgcgggctctcccgtctcctctgatggacgggaaccaaacctggccgccccctaccccctcgccgccgcccttctcctcccggccccgcgcgtcgccgtccccggcgacgcaccgccggcgccgccggcactccaaaaaacataagccccggcccgcgccggcgccgacgccgcagggcgcggacttctccgcgctcccgccggatctcgtccaccgggccctcgcggccgcgtgcgcctccgacgtcgcggcggccagccgagcgtgccgcgcgtggtgggacgcgctgcggccgttgcgcgaggccgcggcgctgcacgcgtatggccgacgcgtcaagcacgaccccgtgacaggagccagagccgtagccgcagccgctgcctcgcgcgggggaggcgaacgtgtggagacggagaggcagcgcgctctggggctgttccggcgggcggcgaggctgggctccgcggcggcgatggtggacgccgggctgatgtgctgggaggacgggcgccgggaggaagccgtcggttactaccggagcgctgcggacctgggacatcccattgggatgtgcaaccttggggtctcctacctcgaagctgatccacccaaggccgaggaagctattagatggttttatccatcagcatctgcaggcaatgctcgtgctcaatacaacctaggcctttgcttgcagaacgggaagggtgtcaagcggaatcagaaggaagctgtaagatgtgatacctctgctatgtcggtgtcacacaccacttaaaattttccttacagtagaagtatttctgttttctatacgcattcagtggttgaaaaaaaactaggataattggtacactatcctattcatacaatctatgcatttaccacacctcttactagatatattaggaatagacaactgatgttcagttgacgaactactcgttaccctctgatctgatgatgctattgagtaccagactcttttgaagctctttaactcagctaagagaaagtagcttttaatttgaaaaaaagtaatcttggttgggtttcctctatcaatgtaattatgatcatgtcacctggaccaatcaaaatacactaaccagcagatactggactaccagcaagttcccatactctttttagtacttgagttgtgctgaatatgaaagagacttattaatgcaggcaaaatggtatttgcgagctgcagagggagggaatgtacgggccatgtataacatttccctgtgttacagctacggtgaagggcttgcacaggatccagtgcgtgctaagaggtggcttcaactagctgctgattgtggtcacaagaaagctctttatgagtgtggtattaagctttgtgcggcaggagacaaggtcaagtgtctcatgtatctagagctggcgacacggcgtggagaagctgctgctgctcacatgagggatgtaatacttgaatcgctctcggttgtgaatgcgcagcgtgccatgtcggatgctgataaatggaagcctaggacactccatcctagacctagaaggtgaggaaatgacgacgccaaagtgcagaagaaccatatcatcaagatgtccacaccctagtcatctgtggccagaattgaagcacagaaggtcgaagcaaacatgtatgcttcctcggcacccacagccacaggaatgtcagtagccatcctgtggctctctgtataaagccatccattggcagatgtaataccaggagaacttgtagtacagaaagttctgtagcaaatactacttcctcccttccaaattgctaccttaattctcgaatatttgtcaccactagttcatttttgaactaaaatgtgacaaatagaaataacggagcgagtataaaatactttggcttttctagatatgtattttttatacacttaaatacaaagtaaaaggaatgtatctataaatgca

SEQ ID NO: 14568 - DNA, 4201 bp, Zea Mays
cctctctctctctcacctcctgtcccctctcctctccgtgtccggtggagcttctccacctccggccaagatctggaaccagcgagggtgcccggcggttctcatcccggaccccgactctttcctcatctctgcaacctctggatcctccatctgcccccctgcaggatctggaagctgcacccgtcggggggagaagcaagcagcacatccagcccgctcgagctcgctcatctgacctcaccactgagcttccgcaggatcttcacatccccattccattgacaacgtgaaagagaacatgtgacggggctgccaagctacatgacaacgacgccgattgccgaatgccgagacaccgcgcacgctcttgcagataaagatgatcggttgatcgacgtggtatttgtaccactttgctgtccgtgaaagcccgctatataggtggtgacatcaagtgatcaagattttatggtgcgcaagaggttgggttatagttcccgtggccatcgaattccaactatgccacgtgttccaaactcagctcgggggaaacgttctaccagaagaaagaaagatgagaatgatgatatgtgtgcaatggatttgctcgcaactgtggcaggaaagttactagcagatcaggacaattcatctagcgttcctaataccagtgcagcgaaagctaaaaaaaggaaatcagttaaggaagaacactttgatgaaattccgcctctaaaaaatgtggctatggagaaagatgtgggttctggtagcgttagtgccttccctaggcaagctaaaaactgcctggcagaaaactcatcgacaagaaatggagctgatacagtattagagtcactaacagtgaaatcaaatatgctagcaaaaattcctgagtgtggatcttatggaatacaccatgcaggctcctcaagttcagcagagcctgaacaagtgcatcaagctgaacctaaagtgagcagaagacaagcagatggacatcctgtggcttatggtatatttaactccgtggatgtggatggcaaacctccggctttggttagttctgacagtagctcgtgtgttcctctgagcagccatgacaaggaacatcaaacctcttccttgtatcggggtgtagtgcagtatactgcagatagagaagatgatgaaaattcttctgggtgcacgcatccaagcaccatagaaagtaagggttgcaaaccacaatatctaggtaaccataggataaggaaattgcttgcctcgaaggtaaggaaggcagcacgtaataagatttgtggagggattccatcaaaaaagatctgtggagggttgtcaaaaaaaggtagcaagctaaacttatgtgggaaaaagatgtccaccacacaccaaaaggtgcaaagaatgattttcaaaaagaaaaagctaacgcaccgtacatcttttgctaaggagatgctaactgaagctagtgggacatcatttgctatggaaggtcaaaataaatcatgtgaagctgagaattaccatgttaagctaagaatcaagtcattcaacatcccagaattgttcattaaggtcccagaaaatgcaaccattggatcactgaagagagctgttatggatgttgtcaatagtataatggaaggtggcctacgcgttggtgttcttcttcaaggaaaagatatccaagacgacaacaagacactttgtcaggctgggatatgccacgataaaaagctaaataacatagacttcacgctggagtgcgagcgtgagcgcgagcctccctctggagtcattatacaagaacagatggatttcctcaccacagatatggtggagccattagctaggatgaagtgtgaggaaccttttcctgaagccgacgtcggagatgacagccagcagcctagagcgccttatcgaagccgctctctctctgacctgtactctgtccattgtcctgttcagatggcttcacaggacacgacggcgagctcccaggccatcgtccctgtttcgcctgcgccttcagacgtgggcgctctagccattgtgcccctttgtaagtccaaggggtctgaagtcgggcagaggcgcatgaggaggcccttcactgtcggcgaggttgaggcgctggtgggagcggtcgagcagcttgggactggaaggtggagagctgttaaaacgcttgcattcgacagtatagatcaccggacctacgtcgacctcaaggacaagtggaagaccctggttcacactgcgagcatatccccgcagcaacgaagagggcagccggttccacaagaacttctagaccgtgtcctcctagcgcaggcctactggtcccagcagcagcagcaggcgaggctctaggacaagccccgcggcaaggctcctctcctcttcctgagatctgttttccaagggaaagcttgtacttgtcctagattggcaacctatattgtttattttaccctatattgtttattttaccaaacaaagatgctaacatatagattggcaacctacaacacctatagaaaatggctgcaggctgctatgacaaattagtcactgtcagtgactgacatccgtataagtggaaaaacagtgacatgacatgctccggtcctgcggcttccagccaaacaacaacgaacccgcctcctcccctggcccgacgcgggctctcccgtctcctctgatggacgggaaccaaacctggccgccccctaccccctcgccgccgcccttctcctcccggccccgcgcgtcgccgtccccggcgacgcaccgccggcgccgccggcactccaaaaaacataagccccggcccgcgccggcgccgacgccgcagggcgcggacttctccgcgctcccgccggatctcgtccaccgggccctcgcggccgcgtgcgcctccgacgtcgcggcggccagccgagcgtgccgcgcgtggtgggacgcgctgcggccgttgcgcgaggccgcggcgctgcacgcgtatggccgacgcgtcaagcacgaccccgtgacaggagccagagccgtagccgcagccgctgcctcgcgcgggggaggcgaacgtgtggagacggagaggcagcgcgctctggggctgttccggcgggcggcgaggctgggctccgcggcggcgatggtggacgccgggctgatgtgctgggaggacgggcgccgggaggaagccgtcggttactaccggagcgctgcggacctgggacatcccattgggatgtgcaaccttggggtctcctacctcgaagctgatccacccaaggccgaggaagctattagatggttttatccatcagcatctgcaggcaatgctcgtgctcaatacaacctaggcctttgcttgcagaacgggaagggtgtcaagcggaatcagaaggaagctgcaaaatggtatttgcgagctgcagagggagggaatgtacgggccatgtataacatttccctgtgttacagctacggtgaagggcttgcacaggatccagtgcgtgctaagaggtggcttcaactagctgctgattgtggtcacaagaaagctctttatgagtgtggtattaagctttgtgcggcaggagacaaggtcaagtgtctcatgtatctagagctggcgacacggcgtggagaagctgctgctgctcacatgagggatgtaatacttgaatcgctctcggttgtgaatgcgcagcgtgccatgtcggatgctgataaatggaagcctaggacactccatcctagacctagaaggtgaggaaatgacgacgccaaagtgcagaagaaccatatcatcaagatgtccacaccctagtcatctgtggccagaattgaagcacagaaggtcgaagcaaacatgtatgcttcctcggcacccacagccacaggaatgtcagtagccatcctgtggctctctgtataaagccatccattggcagatgtaataccaggagaacttgtagtacagaaagttctgtagcaaatactacttcctcccttccaaattgctaccttaattctcgaatatttgtcaccactagttcatttttgaactaaaatgtgacaaatagaaataacggagcgagtataaaatactttggcttttctagatatgtattttttatacacttaaatacaaagtaaaaggaatgtatctataaatgca

SEQ ID NO: 14569 - DNA, 2395 bp, Zea Mays
cctctctctctctcacctcctgtcccctctcctctccgtgtccggtggagcttctccacctccggccaagatctggaaccagcgagggtgcccggcggttctcatcccggaccccgactctttcctcatctctgcaacctctggatcctccatctgcccccctgcaggatctggaagctgcacccgtcggggggagaagcaagcagcacatccagcccgctcgagctcgctcatctgacctcaccactgagcttccgcaggatcttcacatccccattccattgacaacgtgaaagagaacatgtgacggggctgccaagctacatgacaacgacgccgattgccgaatgccgagacaccgcgcacgctcttgcagataaagatgatcggttgatcgacgtggtatttgtaccactttgctgtccgtgaaagcccgctatataggtggtgacatcaagtgatcaagattttatggtgcgcaagaggttgggttatagttcccgtggccatcgaattccaactatgccacgtgttccaaactcagctcgggggaaacgttctaccagaagaaagaaagatgagaatgatgatatgtgtgcaatggatttgctcgcaactgtggcaggaaagttactagcagatcaggacaattcatctagcgttcctaataccagtgcagcgaaagctaaaaaaaggaaatcagttaaggaagaacactttgatgaaattccgcctctaaaaaatgtggctatggagaaagatgtgggttctggtagcgttagtgccttccctaggcaagctaaaaactgcctggcagaaaactcatcgacaagaaatggagctgatacagtattagagtcactaacagtgaaatcaaatatgctagcaaaaattcctgagtgtggatcttatggaatacaccatgcaggctcctcaagttcagcagagcctgaacaagtgcatcaagctgaacctaaagtgagcagaagacaagcagatggacatcctgtggcttatggtatatttaactccgtggatgtggatggcaaacctccggctttggttagttctgacagtagctcgtgtgttcctctgagcagccatgacaaggaacatcaaacctcttccttgtatcggggtgtagtgcagtatactgcagatagagaagatgatgaaaattcttctgggtgcacgcatccaagcaccatagaaagtaagggttgcaaaccacaatatctaggtaaccataggataaggaaattgcttgcctcgaaggtaaggaaggcagcacgtaataagatttgtggagggattccatcaaaaaagatctgtggagggttgtcaaaaaaagctagtgggacatcatttgctatggaaggtcaaaataaatcatgtgaagctgagaattaccatgttaagctaagaatcaagtcattcaacatcccagaattgttcattaaggtcccagaaaatgcaaccattggatcactgaagctgatccacccaaggccgaggaagctattagatggttttatccatcagcatctgcaggcaatgctcgtgctcaatacaacctaggcctttgcttgcagaacgggaagggtgtcaagcggaatcagaaggaagctgcaaaatggtatttgcgagctgcagagggagggaatgtacgggccatgtataacatttccctgtgttacagctacggtgaagggcttgcacaggatccagtgcgtgctaagaggtggcttcaactagctgctgattgtggtcacaagaaagctctttatgagtgtggtattaagctttgtgcggagacaaggtcaagtgtctcatgtatctagagctggcgacacggcgtggagaagctgctgctgctcacatgagggatgtaatacttgaatcgctctcggttgtgaatgcgcagcgtgccatgtcggatgctgataaatggaagcctaggacactccatcctagacctagaaggtgaggaaatgacgacgccaaagtgcagaagaaccatatcatcaagatgtccacaccctagtcatctgtggccagaattgaagcacagaaggtcgaagcaaacatgtatgcttcctcggcacccacagccacaggaatgtcagtagccatcctgtggctctctgtataaagccatccattggcagatgtaataccaggagaacttgtagtacagaaagttctgtagcaaatactacttcctcccttccaaattgctaccttaattctcgaatatttgtcaccactagttcatttttgaactaaaatgtgacaaatagaaataacggagcgagtataaaatactttggcttttctagatatgtattttttatacacttaaatacaaagtaaaaggaatgtatctataaatgca

SEQ ID NO: 14570 - DNA, 4130 bp, Zea Mays
cctctctctctctcacctcctgtcccctctcctctccgtgtccggtggagcttctccacctccggccaagatctggaaccagcgagggtgcccggcggttctcatcccggaccccgactctttcctcatctctgcaacctctggatcctccatctgcccccctgcaggatctggaagctgcacccgtcggggggagaagcaagcagcacatccagcccgctcgagctcgctcatctgacctcaccactgagcttccgcaggatcttcacatccccattccattgacaacgtgaaagagaacatgtgacggggctgccaagctacatgacaacgacgccgattgccgaatgccgagacaccgcgcacgctcttgcagataaagatgatcggttgatcgacgtggtatttgtaccactttgctgtccgtgaaagcccgctatataggtggtgacatcaagtgatcaagattttatggtgcgcaagaggttgggttatagttcccgtggccatcgaattccaactatgccacgtgttccaaactcagctcgggggaaacgttctaccagaagaaagaaagatgagaatgatgatatgtgtgcaatggatttgctcgcaactgtggcaggaaagttactagcagatcaggacaattcatctagcgttcctaataccagtgcagcgaaagctaaaaaaaggaaatcagttaaggaagaacactttgatgaaattccgcctctaaaaaatgtggctatggagaaagatgtgggttctggtagcgttagtgccttccctaggcaagctaaaaactgcctggcagaaaactcatcgacaagaaatggagctgatacagtattagagtcactaacagtgaaatcaaatatgctagcaaaaattcctgagtgtggatcttatggaatacaccatgcaggctcctcaagttcagcagagcctgaacaagtgcatcaagctgaacctaaagtgagcagaagacaagcagatggacatcctgtggcttatggtatatttaactccgtggatgtggatggcaaacctccggctttggttagttctgacagtagctcgtgtgttcctctgagcagccatgacaaggaacatcaaacctcttccttgtatcggggtgtagtgcagtatactgcagatagagaagatgatgaaaattcttctgggtgcacgcatccaagcaccatagaaagtaagggttgcaaaccacaatatctaggtaaccataggataaggaaattgcttgcctcgaaggtaaggaaggcagcacgtaataagatttgtggagggattccatcaaaaaagatctgtggagggttgtcaaaaaaaggtagcaagctaaacttatgtgggaaaaagatgtccaccacacaccaaaaggtgcaaagaatgattttcaaaaagaaaaagctaacgcaccgtacatcttttgctaaggagatgctaactgaagctagtgggacatcatttgctatggaaggtcaaaataaatcatgtgaagctgagaattaccatgttaagctaagaatcaagtcattcaacatcccagaattgttcattaaggtcccagaaaatgcaaccattggatcactgaagagagctgttatggatgttgtcaatagtataatggaaggtggcctacgcgttggtgttcttcttcaaggaaaagatatccaagacgacaacaagacactttgtcaggctgggatatgccacgataaaaagctaaataacatagacttcacgctggagtgcgagcgtgagcgcgagcctccctctggagtcattatacaagaacagatggatttcctcaccacagatatggtggagccattagctaggatgaagtgtgaggaaccttttcctgaagccgacgtcggagatgacagccagcagcctagagcgccttatcgaagccgctctctctctgacctgtactctgtccattgtcctgttcagatggcttcacaggacacgacggcgagctcccaggccatcgtccctgtttcgcctgcgccttcagacgtgggcgctctagccattgtgcccctttgtaagtccaaggggtctgaagtcgggcagaggcgcatgaggaggcccttcactgtcggcgaggttgaggcgctggtgggagcggtcgagcagcttgggactggaaggtggagagctgttaaaacgcttgcattcgacagtatagatcaccggacctacgtcgacctcaaggacaagtggaagaccctggttcacactgcgagcatatccccgcagcaacgaagagggcagccggttccacaagaacttctagaccgtgtcctcctagcgcaggcctactggtcccagcagcagcagcaggcgaggctctaggacaagccccgcggcaaggctcctctcctcttcctgagatctgttttccaagggaaagcttgtacttgtcctagattggcaacctatattgtttattttaccctatattgtttattttaccaaacaaagatgctaacatatagattggcaacctacaacacctatagaaaatggctgcaggctgctatgacaaattagtcactgtcagtgactgacatccgtataagtggaaaaacagtgacatgacatgctccggtcctgcggcttccagccaaacaacaacgaacccgcctcctcccctggcccgacgcgggctctcccgtctcctctgatggacgggaaccaaacctggccgccccctaccccctcgccgccgcccttctcctcccggccccgcgcgtcgccgtccccggcgacgcaccgccggcgccgccggcactccaaaaaacataagccccggcccgcgccggcgccgacgccgcagggcgcggacttctccgcgctcccgccggatctcgtccaccgggccctcgcggccgcgtgcgcctccgacgtcgcggcggccagccgagcgtgccgcgcgtggtgggacgcgctgcggccgttgcgcgaggccgcggcgctgcacgcgtatggccgacgcgtcaagcacgaccccgtgacaggagccagagccgtagccgcagccgctgcctcgcgcgggggaggcgaacgtgtggagacggagaggcagcgcgctctggggctgttccggcgggcggcgaggctgggctccgcggcggcgatggtggacgccgggctgatgtgctgggaggacgggcgccgggaggaagccgtcggttactaccggagcgctgcggacctgggacatcccattgggatgtgcaaccttggggtctcctacctcgaagctgatccacccaaggccgaggaagctattagatggttttatccatcagcatctgcaggcaatgctcgtgctcaatacaacctaggcctttgcttgcagaacgggaagggtgtcaagcggaatcagaaggaagctctacggtgaagggcttgcacaggatccagtgcgtgctaagaggtggcttcaactagctgctgattgtggtcacaagaaagctctttatgagtgtggtattaagctttgtgcggcaggagacaaggtcaagtgtctcatgtatctagagctggcgacacggcgtggagaagctgctgctgctcacatgagggatgtaatacttgaatcgctctcggttgtgaatgcgcagcgtgccatgtcggatgctgataaatggaagcctaggacactccatcctagacctagaaggtgaggaaatgacgacgccaaagtgcagaagaaccatatcatcaagatgtccacaccctagtcatctgtggccagaattgaagcacagaaggtcgaagcaaacatgtatgcttcctcggcacccacagccacaggaatgtcagtagccatcctgtggctctctgtataaagccatccattggcagatgtaataccaggagaacttgtagtacagaaagttctgtagcaaatactacttcctcccttccaaattgctaccttaattctcgaatatttgtcaccactagttcatttttgaactaaaatgtgacaaatagaaataacggagcgagtataaaatactttggcttttctagatatgtattttttatacacttaaatacaaagtaaaaggaatgtatctataaatgca

SEQ ID NO: 14571 - DNA, 3610 bp, Zea Mays
cctctctctctctcacctcctgtcccctctcctctccgtgtccggtggagcttctccacctccggccaagatctggaaccagcgagggtgcccggcggttctcatcccggaccccgactctttcctcatctctgcaacctctggatcctccatctgcccccctgcaggatctggaagctgcacccgtcggggggagaagcaagcagcacatccagcccgctcgagctcgctcatctgacctcaccactgagcttccgcaggatcttcacatccccattccattgacaacgtgaaagagaacatgtgacggggctgccaagctacatgacaacgacgccgattgccgaatgccgagacaccgcgcacgctcttgcagataaagatgatcggttgatcgacgtggtatttgtaccactttgctgtccgtgaaagcccgctatataggtggtgacatcaagtgatcaagattttatggtgcgcaagaggttgggttatagttcccgtggccatcgaattccaactatgccacgtgttccaaactcagctcgggggaaacgttctaccagaagaaagaaagatgagaatgatgatatgtgtgcaatggatttgctcgcaactgtggcaggaaagttactagcagatcaggacaattcatctagcgttcctaataccagtgcagcgaaagctaaaaaaaggaaatcagttaaggaagaacactttgatgaaattccgcctctaaaaaatgtggctatggagaaagatgtgggttctggtagcgttagtgccttccctaggcaagctaaaaactgcctggcagaaaactcatcgacaagaaatggagctgatacagtattagagtcactaacagtgaaatcaaatatgctagcaaaaattcctgagtgtggatcttatggaatacaccatgcaggctcctcaagttcagcagagcctgaacaagtgcatcaagctgaacctaaagtgagcagaagacaagcagatggacatcctgtggcttatggtatatttaactccgtggatgtggatggcaaacctccggctttggttagttctgacagtagctcgtgtgttcctctgagcagccatgacaaggaacatcaaacctcttccttgtatcggggtgtagtgcagtatactgcagatagagaagatgatgaaaattcttctgggtgcacgcatccaagcaccatagaaagtaagggttgcaaaccacaatatctaggtaaccataggataaggaaattgcttgcctcgaaggtaaggaaggcagcacgtaataagatttgtggagggattccatcaaaaaagatctgtggagggttgtcaaaaaaaggtagcaagctaaacttatgtgggaaaaagatgtccaccacacaccaaaaggtgcaaagaatgattttcaaaaagaaaaagctaacgcaccgtacatcttttgctaaggagatgctaactgaagctagtgggacatcatttgctatggaaggtcaaaataaatcatgtgaagctgagaattaccatgttaagctaagaatcaagtcattcaacatcccagaattgttcattaaggtcccagaaaatgcaaccattggatcactgaagagagctgttatggatgttgtcaatagtataatggaaggtggcctacgcgttggtgttcttcttcaaggaaaagatatccaagacgacaacaagacactttgtcaggctgggatatgccacgataaaaagctaaataacatagacttcacgctggagtgcgagcgtgagcgcgagcctccctctggagtcattatacaagaacagatggatttcctcaccacagatatggtggagccattagctaggatgaagtgtgaggaaccttttcctgaagccgacgtcggagatgacagccagcagcctagagcgccttatcgaagccgctctctctctgacctgtactctgtccattgtcctgttcagatggcttcacaggacacgacggcgagctcccaggccatcgtccctgtttcgcctgcgccttcagacgtgggcgctctagccattgtgcccctttgtaagtccaaggggtctgaagtcgggcagaggcgcatgaggaggcccttcactgtcggcgaggttgaggcgctggtgggagcggtcgagcagcttgggactggaaggtggagagctgttaaaacgcttgcattcgacagtatagatcaccggacctacgtcgacctcaagctgatccacccaaggccgaggaagctattagatggttttatccatcagcatctgcaggcaatgctcgtgctcaatacaacctaggcctttgcttgcagaacgggaagggtgtcaagcggaatcagaaggaagctgtaagatgtgatacctctgctatgtcggtgtcacacaccacttaaaattttccttacagtagaagtatttctgttttctatacgcattcagtggttgaaaaaaaactaggataattggtacactatcctattcatacaatctatgcatttaccacacctcttactagatatattaggaatagacaactgatgttcagttgacgaactactcgttaccctctgatctgatgatgctattgagtaccagactcttttgaagctctttaactcagctaagagaaagtagcttttaatttgaaaaaaagtaatcttggttgggtttcctctatcaatgtaattatgatcatgtcacctggaccaatcaaaatacactaaccagcagatactggactaccagcaagttcccatactctttttagtacttgagttgtgctgaatatgaaagagacttattaatgcaggcaaaatggtatttgcgagctgcagagggagggaatgtacgggccatgtataacatttccctgtgttacagctacggtgaagggcttgcacaggatccagtgcgtgctaagaggtggcttcaactagctgctgattgtggtcacaagaaagctctttatgagtgtggtattaagctttgtgcggcaggagacaaggtcaagtgtctcatgtatctagagctggcgacacggcgtggagaagctgctgctgctcacatgagggatgtaatacttgaatcgctctcggttgtgaatgcgcagcgtgccatgtcggatgctgataaatggaagcctaggacactccatcctagacctagaaggtgaggaaatgacgacgccaaagtgcagaagaaccatatcatcaagatgtccacaccctagtcatctgtggccagaattgaagcacagaaggtcgaagcaaacatgtatgcttcctcggcacccacagccacaggaatgtcagtagccatcctgtggctctctgtataaagccatccattggcagatgtaataccaggagaacttgtagtacagaaagttctgtagcaaatactacttcctcccttccaaattgctaccttaattctcgaatatttgtcaccactagttcatttttgaactaaaatgtgacaaatagaaataacggagcgagtataaaatactttggcttttctagatatgtattttttatacacttaaatacaaagtaaaaggaatgtatctataaatgca

SEQ ID NO: 14572 - DNA, 3149 bp, Zea Mays
cctctctctctctcacctcctgtcccctctcctctccgtgtccggtggagcttctccacctccggccaagatctggaaccagcgagggtgcccggcggttctcatcccggaccccgactctttcctcatctctgcaacctctggatcctccatctgcccccctgcaggatctggaagctgcacccgtcggggggagaagcaagcagcacatccagcccgctcgagctcgctcatctgacctcaccactgagcttccgcaggatcttcacatccccattccattgacaacgtgaaagagaacatgtgacggggctgccaagctacatgacaacgacgccgattgccgaatgccgagacaccgcgcacgctcttgcagataaagatgatcggttgatcgacgtggtatttgtaccactttgctgtccgtgaaagcccgctatataggtggtgacatcaagtgatcaagattttatggtgcgcaagaggttgggttatagttcccgtggccatcgaattccaactatgccacgtgttccaaactcagctcgggggaaacgttctaccagaagaaagaaagatgagaatgatgatatgtgtgcaatggatttgctcgcaactgtggcaggaaagttactagcagatcaggacaattcatctagcgttcctaataccagtgcagcgaaagctaaaaaaaggaaatcagttaaggaagaacactttgatgaaattccgcctctaaaaaatgtggctatggagaaagatgtgggttctggtagcgttagtgccttccctaggcaagctaaaaactgcctggcagaaaactcatcgacaagaaatggagctgatacagtattagagtcactaacagtgaaatcaaatatgctagcaaaaattcctgagtgtggatcttatggaatacaccatgcaggctcctcaagttcagcagagcctgaacaagtgcatcaagctgaacctaaagtgagcagaagacaagcagatggacatcctgtggcttatggtatatttaactccgtggatgtggatggcaaacctccggctttggttagttctgacagtagctcgtgtgttcctctgagcagccatgacaaggaacatcaaacctcttccttgtatcggggtgtagtgcagtatactgcagatagagaagatgatgaaaattcttctgggtgcacgcatccaagcaccatagaaagtaagggttgcaaaccacaatatctaggtaaccataggataaggaaattgcttgcctcgaaggtaaggaaggcagcacgtaataagatttgtggagggattccatcaaaaaagatctgtggagggttgtcaaaaaaaggtagcaagctaaacttatgtgggaaaaagatgtccaccacacaccaaaaggtgcaaagaatgattttcaaaaagaaaaagctaacgcaccgtacatcttttgctaaggagatgctaactgaagctagtgggacatcatttgctatggaaggtcaaaataaatcatgtgaagctgagaattaccatgttaagctaagaatcaagtcattcaacatcccagaattgttcattaaggtcccagaaaatgcaaccattggatcactgaagagagctgttatggatgttgtcaatagtataatggaaggtggcctacgcgttggtgttcttcttcaaggaaaagatatccaagacgacaacaagacactttgtcaggctgggatatgccacgataaaaagctaaataacatagacttcacgctggagtgcgagcgtgagcgcgagcctccctctggagtcattatacaagaacagatggatttcctcaccacagatatggtggagccattagctaggatgaagtgtgaggaaccttttcctgaagccgacgtcggagatgacagccagcagcctagagcgccttatcgaagccgctctctctctgacctgtactctgtccattgtcctgttcagatggcttcacaggacacgacggcgagctcccaggccatcgtccctgtttcgcctgcgccttcagacgtgggcgctctagccattgtgcccctttgtaagtccaaggggtctgaagtcgggcagaggcgcatgaggaggcccttcactgtcggcgaggttgaggcgctggtgggagcggtcgagcagcttgggactggaaggtggagagctgttaaaacgcttgcattcgacagtatagatcaccggacctacgtcgacctcaagctgatccacccaaggccgaggaagctattagatggttttatccatcagcatctgcaggcaatgctcgtgctcaatacaacctaggcctttgcttgcagaacgggaagggtgtcaagcggaatcagaaggaagctgcaaaatggtatttgcgagctgcagagggagggaatgtacgggccatgtataacatttccctgtgttacagctacggtgaagggcttgcacaggatccagtgcgtgctaagaggtggcttcaactagctgctgattgtggtcacaagaaagctctttatgagtgtggtattaagctttgtgcggcaggagacaaggtcaagtgtctcatgtatctagagctggcgacacggcgtggagaagctgctgctgctcacatgagggatgtaatacttgaatcgctctcggttgtgaatgcgcagcgtgccatgtcggatgctgataaatggaagcctaggacactccatcctagacctagaaggtgaggaaatgacgacgccaaagtgcagaagaaccatatcatcaagatgtccacaccctagtcatctgtggccagaattgaagcacagaaggtcgaagcaaacatgtatgcttcctcggcacccacagccacaggaatgtcagtagccatcctgtggctctctgtataaagccatccattggcagatgtaataccaggagaacttgtagtacagaaagttctgtagcaaatactacttcctcccttccaaattgctaccttaattctcgaatatttgtcaccactagttcatttttgaactaaaatgtgacaaatagaaataacggagcgagtataaaatactttggcttttctagatatgtattttttatacacttaaatacaaagtaaaaggaatgtatctataaatgca

SEQ ID NO: 14573 - DNA, 4078 bp, Zea Mays
cctctctctctctcacctcctgtcccctctcctctccgtgtccggtggagcttctccacctccggccaagatctggaaccagcgagggtgcccggcggttctcatcccggaccccgactctttcctcatctctgcaacctctggatcctccatctgcccccctgcaggatctggaagctgcacccgtcggggggagaagcaagcagcacatccagcccgctcgagctcgctcatctgacctcaccactgagcttccgcaggatcttcacatccccattccattgacaacgtgaaagagaacatgtgacggggctgccaagctacatgacaacgacgccgattgccgaatgccgagacaccgcgcacgctcttgcagataaagatgatcggttgatcgacgtggtatttgtaccactttgctgtccgtgaaagcccgctatataggtggtgacatcaagtgatcaagattttatggtgcgcaagaggttgggttatagttcccgtggccatcgaattccaactatgccacgtgttccaaactcagctcgggggaaacgttctaccagaagaaagaaagatgagaatgatgatatgtgtgcaatggatttgctcgcaactgtggcaggaaagttactagcagatcaggacaattcatctagcgttcctaataccagtgcagcgaaagctaaaaaaaggaaatcagttaaggaagaacactttgatgaaattccgcctctaaaaaatgtggctatggagaaagatgtgggttctggtagcgttagtgccttccctaggcaagctaaaaactgcctggcagaaaactcatcgacaagaaatggagctgatacagtattagagtcactaacagtgaaatcaaatatgctagcaaaaattcctgagtgtggatcttatggaatacaccatgcaggctcctcaagttcagcagagcctgaacaagtgcatcaagctgaacctaaagtgagcagaagacaagcagatggacatcctgtggcttatggtatatttaactccgtggatgtggatggcaaacctccggctttggttagttctgacagtagctcgtgtgttcctctgagcagccatgacaaggaacatcaaacctcttccttgtatcggggtgtagtgcagtatactgcagatagagaagatgatgaaaattcttctgggtgcacgcatccaagcaccatagaaagtaagggttgcaaaccacaatatctaggtaaccataggataaggaaattgcttgcctcgaaggtaaggaaggcagcacgtaataagatttgtggagggattccatcaaaaaagatctgtggagggttgtcaaaaaaagctagtgggacatcatttgctatggaaggtcaaaataaatcatgtgaagctgagaattaccatgttaagctaagaatcaagtcattcaacatcccagaattgttcattaaggtcccagaaaatgcaaccattggatcactgaagagagctgttatggatgttgtcaatagtataatggaaggtggcctacgcgttggtgttcttcttcaaggaaaagatatccaagacgacaacaagacactttgtcaggctgggatatgccacgataaaaagctaaataacatagacttcacgctggagtgcgagcgtgagcgcgagcctccctctggagtcattatacaagaacagatggatttcctcaccacagatatggtggagccattagctaggatgaagtgtgaggaaccttttcctgaagccgacgtcggagatgacagccagcagcctagagcgccttatcgaagccgctctctctctgacctgtactctgtccattgtcctgttcagatggcttcacaggacacgacggcgagctcccaggccatcgtccctgtttcgcctgcgccttcagacgtgggcgctctagccattgtgcccctttgtaagtccaaggggtctgaagtcgggcagaggcgcatgaggaggcccttcactgtcggcgaggttgaggcgctggtgggagcggtcgagcagcttgggactggaaggtggagagctgttaaaacgcttgcattcgacagtatagatcaccggacctacgtcgacctcaaggacaagtggaagaccctggttcacactgcgagcatatccccgcagcaacgaagagggcagccggttccacaagaacttctagaccgtgtcctcctagcgcaggcctactggtcccagcagcagcagcaggcgaggctctaggacaagccccgcggcaaggctcctctcctcttcctgagatctgttttccaagggaaagcttgtacttgtcctagattggcaacctatattgtttattttaccctatattgtttattttaccaaacaaagatgctaacatatagattggcaacctacaacacctatagaaaatggctgcaggctgctatgacaaattagtcactgtcagtgactgacatccgtataagtggaaaaacagtgacatgacatgctccggtcctgcggcttccagccaaacaacaacgaacccgcctcctcccctggcccgacgcgggctctcccgtctcctctgatggacgggaaccaaacctggccgccccctaccccctcgccgccgcccttctcctcccggccccgcgcgtcgccgtccccggcgacgcaccgccggcgccgccggcactccaaaaaacataagccccggcccgcgccggcgccgacgccgcagggcgcggacttctccgcgctcccgccggatctcgtccaccgggccctcgcggccgcgtgcgcctccgacgtcgcggcggccagccgagcgtgccgcgcgtggtgggacgcgctgcggccgttgcgcgaggccgcggcgctgcacgcgtatggccgacgcgtcaagcacgaccccgtgacaggagccagagccgtagccgcagccgctgcctcgcgcgggggaggcgaacgtgtggagacggagaggcagcgcgctctggggctgttccggcgggcggcgaggctgggctccgcggcggcgatggtggacgccgggctgatgtgctgggaggacgggcgccgggaggaagccgtcggttactaccggagcgctgcggacctgggacatcccattgggatgtgcaaccttggggtctcctacctcgaagctgatccacccaaggccgaggaagctattagatggttttatccatcagcatctgcaggcaatgctcgtgctcaatacaacctaggcctttgcttgcagaacgggaagggtgtcaagcggaatcagaaggaagctgcaaaatggtatttgcgagctgcagagggagggaatgtacgggccatgtataacatttccctgtgttacagctacggtgaagggcttgcacaggatccagtgcgtgctaagaggtggcttcaactagctgctgattgtggtcacaagaaagctctttatgagtgtggtattaagctttgtgcggcaggagacaaggtcaagtgtctcatgtatctagagctggcgacacggcgtggagaagctgctgctgctcacatgagggatgtaatacttgaatcgctctcggttgtgaatgcgcagcgtgccatgtcggatgctgataaatggaagcctaggacactccatcctagacctagaaggtgaggaaatgacgacgccaaagtgcagaagaaccatatcatcaagatgtccacaccctagtcatctgtggccagaattgaagcacagaaggtcgaagcaaacatgtatgcttcctcggcacccacagccacaggaatgtcagtagccatcctgtggctctctgtataaagccatccattggcagatgtaataccaggagaacttgtagtacagaaagttctgtagcaaatactacttcctcccttccaaattgctaccttaattctcgaatatttgtcaccactagttcatttttgaactaaaatgtgacaaatagaaataacggagcgagtataaaatactttggcttttctagatatgtattttttatacacttaaatacaaagtaaaaggaatgtatctataaatgca

SEQ ID NO: 14574 - DNA, 3487 bp, Zea Mays
cctctctctctctcacctcctgtcccctctcctctccgtgtccggtggagcttctccacctccggccaagatctggaaccagcgagggtgcccggcggttctcatcccggaccccgactctttcctcatctctgcaacctctggatcctccatctgcccccctgcaggatctggaagctgcacccgtcggggggagaagcaagcagcacatccagcccgctcgagctcgctcatctgacctcaccactgagcttccgcaggatcttcacatccccattccattgacaacgtgaaagagaacatgtgacggggctgccaagctacatgacaacgacgccgattgccgaatgccgagacaccgcgcacgctcttgcagataaagatgatcggttgatcgacgtggtatttgtaccactttgctgtccgtgaaagcccgctatataggtggtgacatcaagtgatcaagattttatggtgcgcaagaggttgggttatagttcccgtggccatcgaattccaactatgccacgtgttccaaactcagctcgggggaaacgttctaccagaagaaagaaagatgagaatgatgatatgtgtgcaatggatttgctcgcaactgtggcaggaaagttactagcagatcaggacaattcatctagcgttcctaataccagtgcagcgaaagctaaaaaaaggaaatcagttaaggaagaacactttgatgaaattccgcctctaaaaaatgtggctatggagaaagatgtgggttctggtagcgttagtgccttccctaggcaagctaaaaactgcctggcagaaaactcatcgacaagaaatggagctgatacagtattagagtcactaacagtgaaatcaaatatgctagcaaaaattcctgagtgtggatcttatggaatacaccatgcaggctcctcaagttcagcagagcctgaacaagtgcatcaagctgaacctaaagtgagcagaagacaagcagatggacatcctgtggcttatggtatatttaactccgtggatgtggatggcaaacctccggctttggttagttctgacagtagctcgtgtgttcctctgagcagccatgacaaggaacatcaaacctcttccttgtatcggggtgtagtgcagtatactgcagatagagaagatgatgaaaattcttctgggtgcacgcatccaagcaccatagaaagtaagggttgcaaaccacaatatctaggtaaccataggataaggaaattgcttgcctcgaaggtaaggaaggcagcacgtaataagatttgtggagggattccatcaaaaaagatctgtggagggttgtcaaaaaaagctagtgggacatcatttgctatggaaggtcaaaataaatcatgtgaagctgagaattaccatgttaagctaagaatcaagtcattcaacatcccagaattgttcattaaggtcccagaaaatgcaaccattggatcactgaagagagctgttatggatgttgtcaatagtataatggaaggtggcctacgcgttggtgttcttcttcaaggaaaagatatccaagacgacaacaagacactttgtcaggctgggatatgccacgataaaaagctaaataacatagacttcacgctggagtgcgagcgtgagcgcgagcctccctctggagtcattatacaagaacagatggatttcctcaccacagatatggtggagccattagctaggatgaagtgtgaggaaccttttcctgaagccgacgtcggagatgacagccagcagcctagagcgccttatcgaagccgctctctctctgacctgtactctgtccattgtcctgttcagatggcttcacaggacacgacggcgagctcccaggccatcgtccctgtttcgcctgcgccttcagacgtgggcgctctagccattgtgcccctttgtaagtccaaggggtctgaagtcgggcagaggcgcatgaggaggcccttcactgtcggcgaggttgaggcgctggtgggagcggtcgagcagcttgggactggaaggtggagagctgttaaaacgcttgcattcgacagtatagatcaccggacctacgtcgacctcaagctgatccacccaaggccgaggaagctattagatggttttatccatcagcatctgcaggcaatgctcgtgctcaatacaacctaggcctttgcttgcagaacgggaagggtgtcaagcggaatcagaaggaagctgtaagatgtgatacctctgctatgtcggtgtcacacaccacttaaaattttccttacagtagaagtatttctgttttctatacgcattcagtggttgaaaaaaaactaggataattggtacactatcctattcatacaatctatgcatttaccacacctcttactagatatattaggaatagacaactgatgttcagttgacgaactactcgttaccctctgatctgatgatgctattgagtaccagactcttttgaagctctttaactcagctaagagaaagtagcttttaatttgaaaaaaagtaatcttggttgggtttcctctatcaatgtaattatgatcatgtcacctggaccaatcaaaatacactaaccagcagatactggactaccagcaagttcccatactctttttagtacttgagttgtgctgaatatgaaagagacttattaatgcaggcaaaatggtatttgcgagctgcagagggagggaatgtacgggccatgtataacatttccctgtgttacagctacggtgaagggcttgcacaggatccagtgcgtgctaagaggtggcttcaactagctgctgattgtggtcacaagaaagctctttatgagtgtggtattaagctttgtgcggcaggagacaaggtcaagtgtctcatgtatctagagctggcgacacggcgtggagaagctgctgctgctcacatgagggatgtaatacttgaatcgctctcggttgtgaatgcgcagcgtgccatgtcggatgctgataaatggaagcctaggacactccatcctagacctagaaggtgaggaaatgacgacgccaaagtgcagaagaaccatatcatcaagatgtccacaccctagtcatctgtggccagaattgaagcacagaaggtcgaagcaaacatgtatgcttcctcggcacccacagccacaggaatgtcagtagccatcctgtggctctctgtataaagccatccattggcagatgtaataccaggagaacttgtagtacagaaagttctgtagcaaatactacttcctcccttccaaattgctaccttaattctcgaatatttgtcaccactagttcatttttgaactaaaatgtgacaaatagaaataacggagcgagtataaaatactttggcttttctagatatgtattttttatacacttaaatacaaagtaaaaggaatgtatctataaatgca

SEQ ID NO: 14575 - DNA, 3074 bp, Zea Mays
cctctctctctctcacctcctgtcccctctcctctccgtgtccggtggagcttctccacctccggccaagatctggaaccagcgagggtgcccggcggttctcatcccggaccccgactctttcctcatctctgcaacctctggatcctccatctgcccccctgcaggatctggaagctgcacccgtcggggggagaagcaagcagcacatccagcccgctcgagctcgctcatctgacctcaccactgagcttccgcaggatcttcacatccccattccattgacaacgtgaaagagaacatgtgacggggctgccaagctacatgacaacgacgccgattgccgaatgccgagacaccgcgcacgctcttgcagataaagatgatcggttgatcgacgtggtatttgtaccactttgctgtccgtgaaagcccgctatataggtggtgacatcaagtgatcaagattttatggtgcgcaagaggttgggttatagttcccgtggccatcgaattccaactatgccacgtgttccaaactcagctcgggggaaacgttctaccagaagaaagaaagatgagaatgatgatatgtgtgcaatggatttgctcgcaactgtggcaggaaagttactagcagatcaggacaattcatctagcgttcctaataccagtgcagcgaaagctaaaaaaaggaaatcagttaaggaagaacactttgatgaaattccgcctctaaaaaatgtggctatggagaaagatgtgggttctggtagcgttagtgccttccctaggcaagctaaaaactgcctggcagaaaactcatcgacaagaaatggagctgatacagtattagagtcactaacagtgaaatcaaatatgctagcaaaaattcctgagtgtggatcttatggaatacaccatgcaggctcctcaagttcagcagagcctgaacaagtgcatcaagctgaacctaaagtgagcagaagacaagcagatggacatcctgtggcttatggtatatttaactccgtggatgtggatggcaaacctccggctttggttagttctgacagtagctcgtgtgttcctctgagcagccatgacaaggaacatcaaacctcttccttgtatcggggtgtagtgcagtatactgcagatagagaagatgatgaaaattcttctgggtgcacgcatccaagcaccatagaaagtaagggttgcaaaccacaatatctaggtaaccataggataaggaaattgcttgcctcgaaggtaaggaaggcagcacgtaataagatttgtggagggattccatcaaaaaagatctgtggagggttgtcaaaaaaagcaagctaaacttatgtgggaaaaagatgtccaccacacaccaaaaggtgcaaagaatgattttcaaaaagaaaaagctaacgcaccgtacatcttttgctaaggagatgctaactgaagctagtgggacatcatttgctatggaaggtcaaaataaatcatgtgaagctgagaattaccatgttaagctaagaatcaagtcattcaacatcccagaattgttcattaaggtcccagaaaatgcaaccattggatcactgaagagagctgttatggatgttgtcaatagtataatggaaggtggcctacgcgttggtgttcttcttcaaggaaaagatatccaagacgacaacaagacactttgtcaggctgggatatgccacgataaaaagctaaataacatagacttcacgctggagtgcgagcgtgagcgcgagcctccctctggagtcattatacaagaacagatggatttcctcaccacagatatggtggagccattagctaggatgaagtgtgaggaaccttttcctgaagccgacgtcggagatgacagccagcagcctagagcgccttatcgaagccgctctctctctgacctgtactctgtccattgtcctgttcagatggcttcacaggacacgacggcgagctcccaggccatcgtccctgtttcgcctgcgccttcagacgtgggcgctctagccattgtgcccctttgtaagtccaaggggtctgaagtcgggcagaggcgcatgaggaggcccttcactgtcggcgaggttgaggcgctggtgggagcggtcgagcagcttgggactggaaggtggagagctgttaaaacgcttgcattcgacagtatagatcaccggacctacgtcgacctcaagctgatccacccaaggccgaggaagctattagatggttttatccatcagcatctgcaggcaatgctcgtgctcaatacaacctaggcctttgcttgcagaacgggaagggtgtcaagcggaatcagaaggaagctctacggtgaagggcttgcacaggatccagtgcgtgctaagaggtggcttcaactagctgctgattgtggtcacaagaaagctctttatgagtgtggtattaagctttgtgcggcaggagacaaggtcaagtgtctcatgtatctagagctggcgacacggcgtggagaagctgctgctgctcacatgagggatgtaatacttgaatcgctctcggttgtgaatgcgcagcgtgccatgtcggatgctgataaatggaagcctaggacactccatcctagacctagaaggtgaggaaatgacgacgccaaagtgcagaagaaccatatcatcaagatgtccacaccctagtcatctgtggccagaattgaagcacagaaggtcgaagcaaacatgtatgcttcctcggcacccacagccacaggaatgtcagtagccatcctgtggctctctgtataaagccatccattggcagatgtaataccaggagaacttgtagtacagaaagttctgtagcaaatactacttcctcccttccaaattgctaccttaattctcgaatatttgtcaccactagttcatttttgaactaaaatgtgacaaatagaaataacggagcgagtataaaatactttggcttttctagatatgtattttttatacacttaaatacaaagtaaaaggaatgtatctataaatgca

SEQ ID NO: 14576 - DNA, 3643 bp, Zea Mays
ctttaaaaaaaaaggagagagtgtcagtatcagtatatagctgtcggcaaaccactcgctctcacagtgagacggctgtactgtactgatcactcctggcctctgcgaaggaaagaagaggtgggggaggctggtttggtggcctgtaccgatttgcagcagctgatggcggcgcctctgctcccctcttccgtctccgtgctcctctcgctccacatcgcgctgctgctggtcctctgctccagccaggtaggagattcctgctcctcagtgcgggactgcggcacgggcctctactgcggcaactgccccgccgcaggcaggaccaagctctcctgcatcagggacctagccatccagcccacctccattgtgaaggggctacctttcaacaggtactcatggctcgtcacccacaattccttttccatcctcggggagccgtcgcgcactggggttgagagggtcacgttctacaaccaggaggactccgtcaccaaccaattgaggaatggtgtcaggggattgatgcttgatatgtatgacttcaacgatgatgtatggctctgccactccctgcaagggcaatgctataacttcactgctttcgtaccagcagttgacacactaaaagaggtggaagcatttctctccgagaatcccacagagatcataacaatatttattgaggattatgttcattcaccgatgggactgagcaaggtctttactgctgctgacttgatgaagtattggtatccaatctcggaaatgccaactagtggcaaggactggccaagtgtcacagatatggttgcaaaaaaccgcaggttgctggtgtttacttctgatgcttcaaaggaggctagtgaaggaatagcttaccaatggagctacttgctagagaatgaacctggagatccagggattgtgcctggttcttgtccaaacaggaaggaatcgcagccactgaactcaaggccggcatctctatttctgcaaaattacttccccacgatccccgtgcagaacgaagcatgtaaagagaattctgggctaccacaaatggcccaggcttgttatgccgcagctgggaataggatcccgaacttcatagctgtgaatttctacatgcgaagcgacggtggtggtgttttcgatgttcaagacagaatcaatggccgcaccttatgtgggtgtgacaccattgctgcttgccaggctggagcaccaatgggtgcatgcaaggacacgggggcaccaaatcagactacatcgccctctgtaaatggaaatgtctattcaggaactatagaattcaagacgcattccactagtgctgctagcaataacaacatccggagtagatctgtttttctgctaaggctgcagttgactttgctgctctttttctctttcaggctctagttttcatatatctggacctttttcccacctactgtatagctgaaagtaacatcagcttttgttgtgagcttgctttctctattgggatgacgatatatgcatgcgtgttgcacctagaccgaaattttgttcacatcaatggaaaccgcgtcttctctgtgccctctactgacgggtgggtcaccacgggtcccggactcggttggacacagggtccagcactccagcagccagccgtccaggcaccaggctcatccagtgttcgagtcctcgtcgacttcgctttcccgattcctaaccccgcaggccgcaggctcgcatcgccaagcatcttccgcgtctcttcggagacatctagtaaaagcatcttccgctactccgccctccgcctcccccgtctgcttcgcaatccgatccggcgaccggcggccatggatcctgcgccgcagacgcacccgatcctctcttacgtgctctcccgcatccccaacctctccatgaccaagacccccaccgccgagttcgacatcgagcagccgcctgtgcacaccccgtccccgcggacgccgtcctccgcgggagagttcgagctcgtcgagcgcatgccggggctgcgccacccgtccgtgctccgcgccatgacccgcgccgtcgccgacgtctccgccgcgcgctccgcgctgcaggtgctcggcccgcgccccgaccacgagctcgtcgactcctcccgcgccatagtggccgccgccgaggccggggattcgcggatccccgcgggcgacgtcgaggcgtgccgcgcggtggtgcgcctcgatgagacccacgacgcctacgaggccctgctgcacgaggccgagtccaggctcgagagggtgtaccgctccgcgatggaggggacggacctggatgacgaggcggcggagagcgtcaaggatcaagggccggtcgcggggcctgagggcggggacgcggcggtgggggaggaggtggtggcggtgctcaagcaggccgaggagggcaagccggtggacagcgtgcgcctcgtggatcgccagcttcgccatctgcccgaggcgttcgggaggatcctggggctccgtgtgctcgacgtctcccgcaaccagcttgaggttattccagatgctataggaggacttggtcatcttgaagagctttttcttactgccaatgatttggtatctctacctgataccattggactgctatccaatctgaagattttgaatgtatcaagtaataggcttagggcactgccagatagcatctccaagtgcagttgagcttaatgtgagctataatggtcttacttatctgccaaccaacattggttatgacttggtaaatctgcgaaaactctggattcatatgaacaaattgcgttctcttccatcatctgtctgtgagatgagatcgttgtatctcctggatgcccattttaatgaactatgcggtctaccatctctcttcgggaaacttagcggccttgaaattctcaaccttagcagcaacttcagtgatttgaaagagcttcctccctcgtttggtgacttgctaaatctgcgtgagcttgacctaagcaacaaccagattcatgctctccctgacacttttggtcggctggataaactggagaagcttaacctagagcagaaccctctagtcatgccaccagaggacattgtgaacaagggcgtggatgcagtaaaagagtacatgtcaaagaggtggctggacatattgctcgaggaagaacaaaggcgcattgcggcagagaccccagaaatgtcatcgactcctaaagcttggctgactcgcagcgtctcctgggtcacggacgtttctgagagtttggcagggtacctaggtgggaacaagtcagagaaagatgcatatctggaccagcagttttgatactttatgtttcttttgcctaatgtgcattcgccccatgtatacacaaataacgtttaccaaaaatcttcattacagatgtgttcctggtgagtataccgtacggttttgcttaggaaatggatgtgttcctaatgggtctgtcgtacggttttaccgtggtccattgaataatagtatctcacagcacttgagagtacactcaagataaacattgttcagagatcgacctgtcttctggtatttggctttcgcccttcgctgtgaatttttgttccatgta

SEQ ID NO: 14577 - DNA, 3651 bp, Zea Mays
ctttaaaaaaaaaggagagagtgtcagtatcagtatatagctgtcggcaaaccactcgctctcacagtgagacggctgtactgtactgatcactcctggcctctgcgaaggaaagaagaggtgggggaggctggtttggtggcctgtaccgatttgcagcagctgatggcggcgcctctgctcccctcttccgtctccgtgctcctctcgctccacatcgcgctgctgctggtcctctgctccagccaggtaggagattcctgctcctcagtgcgggactgcggcacgggcctctactgcggcaactgccccgccgcaggcaggaccaagctctcctgcatcagggacctagccatccagcccacctccattgtgaaggggctacctttcaacaggtactcatggctcgtcacccacaattccttttccatcctcggggagccgtcgcgcactggggttgagagggtcacgttctacaaccaggaggactccgtcaccaaccaattgaggaatggtgtcaggggattgatgcttgatatgtatgacttcaacgatgatgtatggctctgccactccctgcaagggcaatgctataacttcactgctttcgtaccagcagttgacacactaaaagaggtggaagcatttctctccgagaatcccacagagatcataacaatatttattgaggattatgttcattcaccgatgggactgagcaaggtctttactgctgctgacttgatgaagtattggtatccaatctcggaaatgccaactagtggcaaggactggccaagtgtcacagatatggttgcaaaaaaccgcaggttgctggtgtttacttctgatgcttcaaaggaggctagtgaaggaatagcttaccaatggagctacttgctagagaatgaacctggagatccagggattgtgcctggttcttgtccaaacaggaaggaatcgcagccactgaactcaaggccggcatctctatttctgcaaaattacttccccacgatccccgtgcagaacgaagcatgtaaagagaattctgggctaccacaaatggcccaggcttgttatgccgcagctgggaataggatcccgaacttcatagctgtgaatttctacatgcgaagcgacggtggtggtgttttcgatgttcaagacagaatcaatggccgcaccttatgtgggtgtgacaccattgctgcttgccaggctggagcaccaatgggtgcatgcaaggacacgggggcaccaaatcagactacatcgccctctgtaaatggaaatgtctattcaggaactatagaattcaagacgcattccactagtgctgctagcaataacaacatccggagtagatctgtttttctgctaaggctgcagttgactttgctgctctttttctctttcaggctctagttttcatatatctggacctttttcccacctactgtatagctgaaagtaacatcagcttttgttgtgagcttgctttctctattgggatgacgatatatgcatgcgtgttgcacctagaccgaaattttgttcacatcaatggaaaccgcgtcttctctgtgccctctactgacgggtgggtcaccacgggtcccggactcggttggacacagggtccagcactccagcagccagccgtccaggcaccaggctcatccagtgttcgagtcctcgtcgacttcgctttcccgattcctaaccccgcaggccgcaggctcgcatcgccaagcatcttccgcgtctcttcggagacatctagtaaaagcatcttccgctactccgccctccgcctcccccgtctgcttcgcaatccgatccggcgaccggcggccatggatcctgcgccgcagacgcacccgatcctctcttacgtgctctcccgcatccccaacctctccatgaccaagacccccaccgccgagttcgacatcgagcagccgcctgtgcacaccccgtccccgcggacgccgtcctccgcgggagagttcgagctcgtcgagcgcatgccggggctgcgccacccgtccgtgctccgcgccatgacccgcgccgtcgccgacgtctccgccgcgcgctccgcgctgcaggtgctcggcccgcgccccgaccacgagctcgtcgactcctcccgcgccatagtggccgccgccgaggccggggattcgcggatccccgcgggcgacgtcgaggcgtgccgcgcggtggtgcgcctcgatgagacccacgacgcctacgaggccctgctgcacgaggccgagtccaggctcgagagggtgtaccgctccgcgatggaggggacggacctggatgacgaggcggcggagagcgtcaaggatcaagggccggtcgcggggcctgagggcggggacgcggcggtgggggaggaggtggtggcggtgctcaagcaggccgaggagggcaagccggtggacagcgtgcgcctcgtggatcgccagcttcgccatctgcccgaggcgttcgggaggatcctggggctccgtgtgctcgacgtctcccgcaaccagcttgaggttattccagatgctataggaggacttggtcatcttgaagagctttttcttactgccaatgatttggtatctctacctgataccattggactgctatccaatctgaagattttgaatgtatcaagtaataggcttagggcactgccagatagcatctccaagtgcaggtcgctagttgagcttaatgtgagctataatggtcttacttatctgccaaccaacattggttatgacttggtaaatctgcgaaaactctggattcatatgaacaaattgcgttctcttccatcatctgtctgtgagatgagatcgttgtatctcctggatgcccattttaatgaactatgcggtctaccatctctcttcgggaaacttagcggccttgaaattctcaaccttagcagcaacttcagtgatttgaaagagcttcctccctcgtttggtgacttgctaaatctgcgtgagcttgacctaagcaacaaccagattcatgctctccctgacacttttggtcggctggataaactggagaagcttaacctagagcagaaccctctagtcatgccaccagaggacattgtgaacaagggcgtggatgcagtaaaagagtacatgtcaaagaggtggctggacatattgctcgaggaagaacaaaggcgcattgcggcagagaccccagaaatgtcatcgactcctaaagcttggctgactcgcagcgtctcctgggtcacggacgtttctgagagtttggcagggtacctaggtgggaacaagtcagagaaagatgcatatctggaccagcagttttgatactttatgtttcttttgcctaatgtgcattcgccccatgtatacacaaataacgtttaccaaaaatcttcattacagatgtgttcctggtgagtataccgtacggttttgcttaggaaatggatgtgttcctaatgggtctgtcgtacggttttaccgtggtccattgaataatagtatctcacagcacttgagagtacactcaagataaacattgttcagagatcgacctgtcttctggtatttggctttcgcccttcgctgtgaatttttgttccatgta

SEQ ID NO: 14578 - DNA, 3726 bp, Zea Mays
gagacggctgtactgtactgatcactcctggcctctgcgaaggaaagaagaggtgggggaggctggtttggtggcctgtaccgatttgcagcagctgatggcggcgcctctgctcccctcttccgtctccgtgctcctctcgctccacatcgcgctgctgctggtcctctgctccagccaggtaggagattcctgctcctcagtgcgggactgcggcacgggcctctactgcggcaactgccccgccgcaggcaggaccaagctctcctgcatcagggacctagccatccagcccacctccattgtactcatggctcgtcacccacaattccttttccatcctcggggagccgtcgcgcactggggttgagagggtcacgttctacaaccaggaggactccgtcaccaaccaattgaggaatggtgtcaggggattgatgcttgatatgtatgacttcaacgatgatgtatggctctgccactccctgcaagggcaatgctataacttcactgctttcgtaccagcagttgacacactaaaagaggtggaagcatttctctccgagaatcccacagagatcataacaatatttattgaggattatgttcattcaccgatgggactgagcaaggtctttactgctgctgacttgatgaagtattggtatccaatctcggaaatgccaactagtggcaaggactggccaagtgtcacagatatggttgcaaaaaaccgcaggttgctggtgtttacttctgatgcttcaaaggaggctagtgaaggaatagcttaccaatggagctacttgctagagaatgaacctggagatccagggattgtgcctggttcttgtccaaacaggaaggaatcgcagccactgaactcaaggccggcatctctatttctgcaaaattacttccccacgatccccgtgcagaacgaagcatgtaaagagaattctgggctaccacaaatggcccaggcttgttatgccgcagctgggaataggatcccgaacttcatagctgtgaatttctacatgcgaagcgacggtggtggtgttttcgatgttcaagacagaatcaatggccgcaccttatgtgggtgtgacaccattgctgcttgccaggctggagcaccaatgggtgcatgcaaggacacgggggcaccaaatcagactacatcgccctctgtaaatggaaatgtctattcaggaactatagaattcaagacgcattccactagtgctgctagcaataacaacatccggagtagatctgtttttctgctaaggctgcagttgactttgctgctctttttctctttcaggctctagttttcatatatctggacctttttcccacctactgtatagctgaaagtaacatcagcttttgttgtgagcttgctttctctattgggatgacggttagtgccttgctagctttataatctatagttgggagggggtgtggatcaatgttaatgaaagaatgggtagagatcttcctctgttctccgaggaggagtaatacggctacaacctacaaagaaactgatgagtggaagttcatgctggttatgtgattactagatatatgcatgcgtgttgcacctagaccgaaattttgttcacatcaatggaaaccgcgtcttctctgtgccctctactgacgggtgggtcaccacgggtcccggactcggttggacacagggtccagcactccagcagccagccgtccaggcaccaggctcatccagtgttcgagtcctcgtcgacttcgctttcccgattcctaaccccgcaggccgcaggctcgcatcgccaagcatcttccgcgtctcttcggagacatctagtaaaagcatcttccgctactccgccctccgcctcccccgtctgcttcgcaatccgatccggcgaccggcggccatggatcctgcgccgcagacgcacccgatcctctcttacgtgctctcccgcatccccaacctctccatgaccaagacccccaccgccgagttcgacatcgagcagccgcctgtgcacaccccgtccccgcggacgccgtcctccgcgggagagttcgagctcgtcgagcgcatgccggggctgcgccacccgtccgtgctccgcgccatgacccgcgccgtcgccgacgtctccgccgcgcgctccgcgctgcaggtgctcggcccgcgccccgaccacgagctcgtcgactcctcccgcgccatagtggccgccgccgaggccggggattcgcggatccccgcgggcgacgtcgaggcgtgccgcgcggtggtgcgcctcgatgagacccacgacgcctacgaggccctgctgcacgaggccgagtccaggctcgagagggtgtaccgctccgcgatggaggggacggacctggatgacgaggcggcggagagcgtcaaggatcaagggccggtcgcggggcctgagggcggggacgcggcggtgggggaggaggtggtggcggtgctcaagcaggccgaggagggcaagccggtggacagcgtgcgcctcgtggatcgccagcttcgccatctgcccgaggcgttcgggaggatcctggggctccgtgtgctcgacgtctcccgcaaccagcttgaggttattccagatgctataggaggacttggtcatcttgaagagctttttcttactgccaatgatttggtatctctacctgataccattggactgctatccaatctgaagattttgaatgtatcaagtaataggcttagggcactgccagatagcatctccaagtgcaggtcgctagttgagcttaatgtgagctataatggtcttacttatctgccaaccaacattggttatgacttggtaaatctgcgaaaactctggattcatatgaacaaattgcgttctcttccatcatctgtctgtgagatgagatcgttgtatctcctggatgcccattttaatgaactatgcggtctaccatctctcttcgggaaacttagcggccttgaaattctcaaccttagcagcaacttcagtgatttgaaagagcttcctccctcgtttggtgacttgctaaatctgcgtgagcttgacctaagcaacaaccagattcatgctctccctgacacttttggtcggctggataaactggagaagcttaacctagagcagaaccctctagtcatgccaccagaggacattgtgaacaagggcgtggatgcagtaaaagagtacatgtcaaagaggtggctggacatattgctcgaggaagaacaaaggcgcattgcggcagagaccccagaaatgtcatcgactcctaaagcttggctgactcgcagcgtctcctgggtcacggacgtttctgagagtttggcagggtacctaggtgggaacaagtcagagaaagatgcatatctggaccagcagttttgatactttatgtttcttttgcctaatgtgcattcgccccatgtatacacaaataacgtttaccaaaaatcttcattacagatgtgttcctggtgagtataccgtacggttttgcttaggaaatggatgtgttcctaatgggtctgtcgtacggttttaccgtggtccattgaataatagtatctcacagcacttgagagtacactcaagataaacattgttcagagatcgacctgtcttctggtatttggctttcgcccttcgctgtgaatttttgttccatgta

SEQ ID NO: 14579 - DNA, 3383 bp, Zea Mays
gagacggctgtactgtactgatcactcctggcctctgcgaaggaaagaagaggtgggggaggctggtttggtggcctgtaccgatttgcagcagctgatggcggcgcctctgctcccctcttccgtctccgtgctcctctcgctccacatcgcgctgctgctggtcctctgctccagccaggtaggagattcctgctcctcagtgcgggactgcggcacgggcctctactgcggcaactgccccgccgcaggcaggaccaagctctcctgcatcagggacctagccatccagcccacctccattgtgaaggggctacctttcaacaggtactcatggctcgtcacccacaattccttttccatcctcggggagccgtcgcgcactggggttgagagggtcacgttctacaaccaggaggactccgtcaccaaccaattgaggaatggtgtcaggggattgatgcttgatatgtatgacttcaacgatgatgtatggctctgccactccctgcaagggcaatgctataacttcactgctttcgtaccagcagttgacacactaaaagaggtggaagcatttctctccgagaatcccacagagatcataacaatatttattgaggattatgttcattcaccgatgggactgagcaaggtctttactgctgctgacttgatgaagtattggtatccaatctcggaaatgccaactagtggcaaggactggccaagtgtcacagatatggttgcaaaaaaccgcaggttgctggtgtttacttctgatgcttcaaaggaggctagtgaaggaatagcttaccaatggagctacttgctagagaatgaacctggagatccagggattgtgcctggttcttgtccaaacaggaaggaatcgcagccactgaactcaaggccggcatctctatttctgcaaaattacttccccacgatccccgtgcagaacgaagcatgtaaagagaattctgggctaccacaaatggcccaggcttgttatgccgcagctgggaataggatcccgaacttcatagctgtgaatttctacatgcgaagcgacggtggtggtgttttcgatgttcaagacagaatcaatggccgcaccttatgtgggtgtgacaccattgctgcttgccaggctctagttttcatatatctggacctttttcccacctactgtatagctgaaagtaacatcagcttttgttgtgagcttgctttctctattgggatgacgatatatgcatgcgtgttgcacctagaccgaaattttgttcacatcaatggaaaccgcgtcttctctgtgccctctactgacgggtgggtcaccacgggtcccggactcggttggacacagggtccagcactccagcagccagccgtccaggcaccaggctcatccagtgttcgagtcctcgtcgacttcgctttcccgattcctaaccccgcaggccgcaggctcgcatcgccaagcatcttccgcgtctcttcggagacatctagtaaaagcatcttccgctactccgccctccgcctcccccgtctgcttcgcaatccgatccggcgaccggcggccatggatcctgcgccgcagacgcacccgatcctctcttacgtgctctcccgcatccccaacctctccatgaccaagacccccaccgccgagttcgacatcgagcagccgcctgtgcacaccccgtccccgcggacgccgtcctccgcgggagagttcgagctcgtcgagcgcatgccggggctgcgccacccgtccgtgctccgcgccatgacccgcgccgtcgccgacgtctccgccgcgcgctccgcgctgcaggtgctcggcccgcgccccgaccacgagctcgtcgactcctcccgcgccatagtggccgccgccgaggccggggattcgcggatccccgcgggcgacgtcgaggcgtgccgcgcggtggtgcgcctcgatgagacccacgacgcctacgaggccctgctgcacgaggccgagtccaggctcgagagggtgtaccgctccgcgatggaggggacggacctggatgacgaggcggcggagagcgtcaaggatcaagggccggtcgcggggcctgagggcggggacgcggcggtgggggaggaggtggtggcggtgctcaagcaggccgaggagggcaagccggtggacagcgtgcgcctcgtggatcgccagcttcgccatctgcccgaggcgttcgggaggatcctggggctccgtgtgctcgacgtctcccgcaaccagcttgaggttattccagatgctataggaggacttggtcatcttgaagagctttttcttactgccaatgatttggtatctctacctgataccattggactgctatccaatctgaagattttgaatgtatcaagtaataggcttagggcactgccagatagcatctccaagtgcaggtcgctagttgagcttaatgtgagctataatggtcttacttatctgccaaccaacattggttatgacttggtaaatctgcgaaaactctggattcatatgaacaaattgcgttctcttccatcatctgtctgtgagatgagatcgttgtatctcctggatgcccattttaatgaactatgcggtctaccatctctcttcgggaaacttagcggccttgaaattctcaaccttagcagcaacttcagtgatttgaaagagcttcctccctcgtttggtgacttgctaaatctgcgtgagcttgacctaagcaacaaccagattcatgctctccctgacacttttggtcggctggataaactggagaagcttaacctagagcagaaccctctagtcatgccaccagaggacattgtgaacaagggcgtggatgcagtaaaagagtacatgtcaaagaggtggctggacatattgctcgaggaagaacaaaggcgcattgcggcagagaccccagaaatgtcatcgactcctaaagcttggctgactcgcagcgtctcctgggtcacggacgtttctgagagtttggcagggtacctaggtgggaacaagtcagagaaagatgcatatctggaccagcagttttgatactttatgtttcttttgcctaatgtgcattcgccccatgtatacacaaataacgtttaccaaaaatcttcattacagatgtgttcctggtgagtataccgtacggttttgcttaggaaatggatgtgttcctaatgggtctgtcgtacggttttaccgtggtccattgaataatagtatctcacagcacttgagagtacactcaagataaacattgttcagagatcgacctgtcttctggtatttggctttcgcccttcgctgtgaatttttgttccatgta

SEQ ID NO: 14580 - DNA, 988 bp, Zea Mays
ctcaatttgaatggcacatactttggaggatatgatgacatcagacttagaagtcaaacaacatcaaacttatcatcagaagttatatccgtgatccgagcgacgagcgagactagaagatacgcctcttcgacaggtgagcgcagtgctgtgagatgcagttcgttgcgatgaagcggagagatctgttggagctctgccggcagcacggcttcgccacccgcggctccaaatttgtcctcacaggcgcgctcttggcccaacgtggtccaggaggtgttcctctagatggcaaaggaccatcttttcctagccgctgttataactatggaatggatgggcactgggttcgtgattgcaaatctggtgactggcgagataggtgctttcggtgtggagaactgggccatatagaaagaaactgcaagaacagttctaaggatctgaagtatttcctggagcgtgggaggagctacttgaggtctgcatctcctcaccatgggaaggttcgaaggagaagctactcaaggtctctatctccttaccttggaaggggccgagggagaagctactcaaggtctccatctcattatcatcggaggggcagaagctggagttacagttggtcgcagtcgccaaggaacaactctaaggcttatggtgaagaattgccatcaattagatctggttacagccgcggtcccaggaggagctccccaccgatggagcgagctgaatgcaatggtggtagccccatgagaggtgaagctcgggggaagtgacagcgacctgtaaaatcactctgggattgtgaagtgtcaaacatttgttctaaactttttggtgactatgtgctgagacatgaacttcgacaccagaagaatgtttagcggtgggttgtaaattctcagtaaagctctcctgaatgttgttggttatatgccgaggcatgtgacctgatgcctgaagagtttagcggattggtgtt

SEQ ID NO: 14581 - DNA, 2076 bp, Zea Mays
tctcaagggcgggaaactctcaaaatcatcttctccgcaccaattccgcaaaccctagaaaaatctcgctccgcaaaaccatgagcgcccctatggagatctccttctctgcgcccccaccccctccggacgcagcgtctaccgccgccgcttccccgctgctggaacctgccgccgcgcagatgctgccccctgtcgccgcggtctcctcctcgcagccgatgcagcagacagctgcggctgcggccgtggttgctccttccccggccgacgataaggtcctcgtgtcagttgaggtactgttgcacgccacgagcgtagctcgccacgaggacgtccaggtggcggtcgagaggatgctcgaagctcgaagcttaagctatgttgatgggcctgtgccaattcctgccgataattcttttcttcttgaaaatgtcaaaaggatacgaataagtgatactgatgagtgggttgagaatcacaaagttctcttattttggcaagtcaagcctgtcgtgcatgtgttccagctgagtgaagatggtccaggtgaggaaccaagcgaggatgatacactctctagctttaatgagtgggccttacctgccaaagaatttgatggtctgtgggaaagtttactatatgaagttggtctcaagcagaggttgctgagatatgctgccagtgctttgctttttactgaaagaggtgtggacacatgtctggtttcatggaaccggattgtacttttgcatggtccacctggaacaggaaagacttccttgtgtaaagcactagcacagaaactttctattcggttcaaatcaaggtattctatgtgtcaattgattgaagtcaatgctcattcattgttcagcaagtggttttctgaaagtggaaaactggttgccaaacttttccagaagatccaggagatggtggaggaagaaagcaacctagtatttgtattaatagatgaagttgaaagccttgctgctgccagacaagctgccatatctggctctgaaccttcagactccattagagttgtgaatgcactgctaacacaaatggacaaactgaagtcttggccaaatgttatcattttgacaacatcgaatattactacagcaatagatattgcatttgttgacagggcagacattaaggcatatgtcggaccccctacgcttcaagcacgatacgagatcttgaggtcatgcatacaggaactcttaagagttggtattcttacatatcctcagaaccccatggtgcgcttcatctatccaatctactctatgaagcctcaaaactgtgtgagggacttagtggccggtcattgaggaaactccctttcctggcacatgcctctgttaccaatccgtcatgctgcgatgcttctactttcttgcatacattgatacagactgcacggagagaagtcttggagtcacgtggttagttcaaccttgaaaccttggcgtcttttggaagagcaaaaggctaacagttcattccaaacaccatgtcctggagtcccctgatgtgatcaattgccgggtcgttaaaaccgtaagtaagtccatccgatcgctagagttaggttagtgtttaaatgtagagagacgagaacaaagaatgaatgaattggcttaattccattgattgatcggtatgtatatacatggcgttccttagggttgtcacacggttaatagtaagcctagtcacaaatctgtttgaagatagatccgttggatgatatcattggcttgtgattgattgatcaggttcttaacaagtttagaaagatgcaatcggtgcatatctgattgtggcttcagcacatttgatctctgtaatctttgcatggtatgataatacgtaccgtcagggatgcctcgctgttgttccttgtcagtcagattctccctctcgccctttaacaagtcaaacaattttgtaaacccttaaaacatggtttagagtgttagctagttcttggagaaataaaactagaattcattttaagtctatattttatttgtggagcatgttccctattaaataaat

SEQ ID NO: 14582 - DNA, 2353 bp, Zea Mays
gcgggaaactctcaaaatcatcttctccgcaccaattccgcaaaccctagaaaaatctcgctccgcaaaaccatgagcgcccctatggagatctccttctctgcgcccccaccccctccggacgcagcgtctaccgccgccgcttccccgctgctggaacctgccgccgcgcagatgctgccccctgtcgccgcggtctcctcctcgcagccgatgcagcagacagctgcggctgcggccgtggttgctccttccccggccgacgataaggtcctcgtgtcagttgaggtactgttgcacgccacgagcgtagctcgccacgaggacgtccaggtggcggtcgagaggatgctcgaagctcgaagcttaagctatgttgatgggcctgtgccaattcctgccgataattcttttcttcttgaaaatgtcaaaaggatacgaataagtgatactgatgagtgggttgagaatcacaaagttctcttattttggcaagtcaagcctgtcgtgcatgtgttccagctgagtgaagatggtccaggtgaggaaccaagcgaggatgatacactctctagctttaatgagtgggccttacctgccaaagaatttgatggtctgtgggaaagtttactatatgaagttggtctcaagcagaggttgctgagatatgctgccagtgctttgctttttactgaaagaggtgtggacacatgtctggtttcatggaaccggattgtacttttgcatggtccacctggaacaggaaagacttccttgtgtaaagcactagcacagaaactttctattcggttcaaatcaaggtattctatgtgtcaattgattgaagtcaatgctcattcattgttcagcaagtggttttctgaaagtggaaaactggttgccaaacttttccagaagatccaggagatggtggaggaagaaagcaacctagtatttgtattaatagatgaagttgaaagccttgctgctgccagacaagctgccatatctggctctgaaccttcagactccattagagttgtgaatgcactgctaacacaaatggacaaactgaagtcttggccaaatgttatcattttgacaacatcgaatattactacagcaatagatattgcatttgttgacagggcagacattaaggcatatgtcggaccccctacgcttcaagcacgatacgagatcttgaggtcatgcatacaggaactcttaagagttggtattcttacatatcctcaggtatgtcctgcattgccagcttcgtgctcaacgtgccaactttttcatacagtattactgtcactgtatcaacctaccagagctcacgatggttgctttgatcatgcagcactatgagcatttttttttatcgatctcagtggtagcactttgcttttcaattttatttattgcaactactgtctactggtaaccttaaaattctccaattgtagggtagtagtgtgccatgtattctgaactattcgaccctgaatgagaagaaacactgtcctgaggctgcagaaccccatggtgcgcttcatctatccaatctactctatgaagcctcaaaactgtgtgagggacttagtggccggtcattgaggaaactccctttcctggcacatgcctctgttaccaatccgtcatgctgcgatgcttctactttcttgcatacattgatacagactgcacggagagaagtcttggagtcacgtggttagttcaaccttgaaaccttggcgtcttttggaagagcaaaaggctaacagttcattccaaacaccatgtcctggagtcccctgatgtgatcaattgccgggtcgttaaaaccgtaagtaagtccatccgatcgctagagttaggttagtgtttaaatgtagagagacgagaacaaagaatgaatgaattggcttaattccattgattgatcggtatgtatatacatggcgttccttagggttgtcacacggttaatagtaagcctagtcacaaatctgtttgaagatagatccgttggatgatatcattggcttgtgattgattgatcaggttcttaacaagtttagaaagatgcaatcggtgcatatctgattgtggcttcagcacatttgatctctgtaatctttgcatggtatgataatacgtaccgtcagggatgcctcgctgttgttccttgtcagtcagattctccctctcgccctttaacaagtcaaacaattttgtaaacccttaaaacatggtttagagtgttagctagttcttggagaaataaaactagaattcattttaagtctatattttatttgtggagcatgttccctattaaataaat

SEQ ID NO: 14583 - DNA, 2133 bp, Zea Mays
gcgggaaactctcaaaatcatcttctccgcaccaattccgcaaaccctagaaaaatctcgctccgcaaaaccatgagcgcccctatggagatctccttctctgcgcccccaccccctccggacgcagcgtctaccgccgccgcttccccgctgctggaacctgccgccgcgcagatgctgccccctgtcgccgcggtctcctcctcgcagccgatgcagcagacagctgcggctgcggccgtggttgctccttccccggccgacgataaggtcctcgtgtcagttgaggtactgttgcacgccacgagcgtagctcgccacgaggacgtccaggtggcggtcgagaggatgctcgaagctcgaagcttaagctatgttgatgggcctgtgccaattcctgccgataattcttttcttcttgaaaatgtcaaaaggatacgaataagtgatactgatgagtgggttgagaatcacaaagttctcttattttggcaagtcaagcctgtcgtgcatgtgttccagctgagtgaagatggtccaggtgaggaaccaagcgaggatgatacactctctagctttaatgagtgggccttacctgccaaagaatttgatggtctgtgggaaagtttactatatgaagttggtctcaagcagaggttgctgagatatgctgccagtgctttgctttttactgaaagaggtgtggacacatgtctggtttcatggaaccggattgtacttttgcatggtccacctggaacaggaaagacttccttgtgtaaagcactagcacagaaactttctattcggttcaaatcaaggtattctatgtgtcaattgattgaagtcaatgctcattcattgttcagcaagtggttttctgaaagtggaaaactggttgccaaacttttccagaagatccaggagatggtggaggaagaaagcaacctagtatttgtattaatagatgaagttgaaagccttgctgctgccagacaagctgccatatctggctctgaaccttcagactccattagagttgtgaatgcactgctaacacaaatggacaaactgaagtcttggccaaatgttatcattttgacaacatcgaatattactacagcaatagatattgcatttgttgacagggcagacattaaggcatatgtcggaccccctacgcttcaagcacgatacgagatcttgaggtcatgcatacaggaactcttaagagttggtattcttacatatcctcagtagtgtgccatgtattctgaactattcgaccctgaatgagaagaaacactgtcctgaggctgcagaaccccatggtgcgcttcatctatccaatctactctatgaagcctcaaaactgtgtgagggacttagtggccggtcattgaggaaactccctttcctggcacatgcctctgttaccaatccgtcatgctgcgatgcttctactttcttgcatacattgatacagactgcacggagagaagtcttggagtcacgtggttagttcaaccttgaaaccttggcgtcttttggaagagcaaaaggctaacagttcattccaaacaccatgtcctggagtcccctgatgtgatcaattgccgggtcgttaaaaccgtaagtaagtccatccgatcgctagagttaggttagtgtttaaatgtagagagacgagaacaaagaatgaatgaattggcttaattccattgattgatcggtatgtatatacatggcgttccttagggttgtcacacggttaatagtaagcctagtcacaaatctgtttgaagatagatccgttggatgatatcattggcttgtgattgattgatcaggttcttaacaagtttagaaagatgcaatcggtgcatatctgattgtggcttcagcacatttgatctctgtaatctttgcatggtatgataatacgtaccgtcagggatgcctcgctgttgttccttgtcagtcagattctccctctcgccctttaacaagtcaaacaattttgtaaacccttaaaacatggtttagagtgttagctagttcttggagaaataaaactagaattcattttaagtctatattttatttgtggagcatgttccctattaaataaat

SEQ ID NO: 14584 - DNA, 2023 bp, Zea Mays
tcgcatcgcctcgattccacccacccacctccgtccgcctccgagcaccaccaaaccctagatctcgcaccggcggcagccatgtccaagccatggggcagcgtcggcgccggcgcgtgggcgctggacgccgagcgcgccgaggaggaagagcgcgagcaggccctgacctttccggcgcccgagccgcccttgcccgcgggcggcgccgccagcttcccgagcctccgggaggccgccgccgcgggcggcgggggcaagtcgaagaagaagaacaagggtaccacgctgtcgctgtccgagttcaccacctacggcgcggccgcggcccagcggcgcgcggcgcccgtcgagcccaagggcctgacccacgatgagatgctgctgttgcccacggggccccgggagcgctcggccgaggagctggaccgctcccgcgggttccgctcctacggcggcggcagcggcttcggcggccccgggggagagcgccgcggcggcttcgacgacgaggaccgccgcgggccgggaagaagctcggatcttgatatgccctcccgcgctgacgaggctgacgactggggcgccaccaagaagtttaccccggctcccacggactctggccgccgcgataggttcggcggcccttcccctctcggccgtgctgatgatattgacgactggtcgcgcggcaagaagccgctcccggcgcgctaccccagcctcgggtctggaggtggcttccgcgactctccagccttccgcgactcaccagctgcttctgattctgaccgttgggtccgtggcgccacccctttgccacacaacggcgagggggcgggggagaggccgcgcatcgtcctgaatcctcctaaacgtgatccgttagttgcctctaccccacctgctgaggtggcccgcaaccgaccaagcccgttcggggctgcaaggccccgggaggatgtgctggcggagaagggggtggactggaggaagtttgagaatgagattgagcacaagaccagccgtcctaccagttcgcactccagcaggccgaatagcgctcattcctcccgccctgggagccctgggtcgcaggtttcggcagttgggagtgaaggagcaccgagggcacggccaaaggttaacccatttggtgaggccaagccaagagaagtggtgctgcaggagaaagggaaggattggaggaagattgatattgagcttgagcatcgccagagtctgatgaagaaagaaatttgaaagaagaaatcaaccttctgaaggtggatcttaaggaaatcgagagaaacatgagtaatggttctgaccagacatcggtagatgcaaaaggtttgtctgagaagatatctcagttggaaagccagcttgagcagctttcaagggagttggatgacaagattcgatttgggcaaagaccacgttcgggtgcgggcagggttacagcacttgcaccaactagtttaggggaggaaccacatgctacagtggtggacagaccgcgctctcgtggtggtatggagccaccaccaaggcaggaagaaagatggggatttcaaggaagcagagaaaggggctcttttggtgcaagcagaaattcggacaggccaatggcaaggcagagatggtgaaactgggacaacaagcatctcttagggatatttccggttcccagtccctttttttgttctgaaaagatgggcaaaataagtcgttacttatttgtttgtcgtgtttgcttggtctagaagattgttgaggatggagataactccacatgaagttattggtttgtcaactctatgccgtaggatgttttgcatttccctttttgccatctaccatgtcaaaacgatatcttagcaacctccgatactaactgttatgcttactggattccagttcagcatatgtcactagttgattatttgtgcactgcttagtggaaaccttggatttgcacttttactgatgctatgtcacctttctgttagtgtttttt

SEQ ID NO: 14585 - DNA, 915 bp, Zea Mays
acttgtggttgaaagctacaagctcatacaaaacctcgattttgtaatggaagcacttgctaatggcacaccttttatctgttgtgtcatacaagttctctttgctaaaactgacctttacccctggccagagtctgatgaagaaagaaatttgaaagaagaaatcaaccttctgaaggtggatcttaaggaaatcgagagaaacatgagtaatggttctgaccagacatcggtagatgcaaaaggtttgtctgagaagatatctcagttggaaagccagcttgagcagctttcaagggagttggatgacaagattcgatttgggcaaagaccacgttcgggtgcgggcagggttacagcacttgcaccaactagtttaggggaggaaccacatgctacagtggtggacagaccgcgctctcgtggtggtatggagccaccaccaaggcaggaagaaagatggggatttcaaggaagcagagaaaggggctcttttggtgcaagcagaaattcggacaggccaatggcaaggcagagatggtgaaactgggacaacaagcatctcttagggatatttccggttcccagtccctttttttgttctgaaaagatgggcaaaataagtcgttacttatttgtttgtcgtgtttgcttggtctagaagattgttgaggatggagataactccacatgaagttattggtttgtcaactctatgccgtaggatgttttgcatttccctttttgccatctaccatgtcaaaacgatatcttagcaacctccgatactaactgttatgcttactggattccagttcagcatatgtcactagttgattatttgtgcactgcttagtggaaaccttggatttgcacttttactgatgctatgtcacctttctgttagtgtttttt

SEQ ID NO: 14586 - DNA, 984 bp, Zea Mays
cttttagcacatatgtgaaggactaaagactaaatcattttagtccatattttagtcctagtgtttggcaaaaaaagaactaaatgagactaaaaactagagattaatctttagtccatgtaaccaaccacccctaactcattcctcaaaccaaactctctattagcgagtccaataatgacaaacaaatgtgaaaaacacgatgttggcagtctcatttttgtaataacctttacctactggccataaccttggccttctccagcctctctcagttgcgaacaacctgatggcgaagaagaaaggctcggccgccgccgccgccgccatggcggatgagacggacgtctcgagtcctcagggctccgcccccggcagcgagggaggtggggagaaggagggcgcctttcttcttggggagccaacctgggaggacgctggcggcgggcggtggcggtgcgcggagacggggcacgagctgccggagcgggagaaggaggcctacgcgcggtcccgcgcttgccgcctcgcgctcattgaccacgccgtcgcgcagaagaagccgccgctcaacgccttcaagccccaccccgagcacaaatcgaagctggtatgcaagattacaggggatacaattaacaagttggaggatcacatatggaagcacatcaacgggaagagatttcttaacaagctagaaagggtagaagaccggatggcttctggtgagatgcctgatggagaacctgtgaagtcaaatgaagtggcaaagaagagcaagtcaagcaagaaggacaagaagaaagctaatgttgccagcacttctttgccaagagaacctaaaccagagatggctgattcagatgatccagatttctgggtgcctcctgttggaagtcgctgggatgacgatgacgggaaagacagatgggagtcattaccaggaaagcccaacttagcaaagaacgaaggtggttctgtgat

SEQ ID NO: 14587 - DNA, 6135 bp, Zea Mays
cttttagcacatatgtgaaggactaaagactaaatcattttagtccatattttagtcctagtgtttggcaaaaaaagaactaaatgagactaaaaactagagattaatctttagtccatgtaaccaaccacccctaactcattcctcaaaccaaactctctattagcgagtccaataatgacaaacaaatgtgaaaaacacgatgttggcagtctcatttttgtaataacctttacctactggccataaccttggccttctccagcctctctcagttgcgaacaacctgatggcgaagaagaaaggctcggccgccgccgccgccgccatggcggatgagacggacgtctcgagtcctcagggctccgcccccggcagcgagggaggtggggagaaggagggcgcctttcttcttggggagccaacctgggaggacctgccggagcgggagaaggaggcctacgcgcggtcccgcgcttgccgcctcgcgctcattgaccacgccgtcgcgcagaagaagccgccgctcaacgccttcaagccccaccccgagcacaaatcgaagctggtatgcaagattacaggggatacaattaacaagttggaggatcacatatggaagcacatcaacgggaagagatttcttaacaagctagaaagggtagaagaccggatggcttctggtgagatgcctgatggagaacctgtgaagtcaaatgaagtggcaaagaagagcaagtcaagcaagaaggacaagaagaaagctaatgttgccagcacttctttgccaagagaacctaaaccagagatggctgattcagatgatccagatttctgggtgcctcctgttggaagtcgctgggatgacgatgacgggaaagacagatgggagtcattaccaggaaagcccaacttagcaaagaacgaaggtggttctgatgatgatggtggtgatgacaatgatacggctgacaaggatgatgctgaatcaatggaacttgcttcaaggacaaagcgaatgtcaatagaagcagctgggccaaggaagaaaaaacccaagaaggagcagtaagacattcgcaatttgtcaagactcaaatgaagaatttggtctcgttgggaagaagaagcgttatctatttgattattgggtcgtgtttcctcagatttgggtaatcaatgactggatttgtgttagcatgcttatggttaacgcctgtcaactgtgatacatctacatttgcacgtaccttgcatttttttttttggaaaactttgagggccaactatcagttgtcttttgctagggtttaggacgtgctatgattggacaacatagacggagctagagctccaaattccaagataactcattcgaaatattaataagactgtcctgatatattaggtaggaatattttagattgccgatttttatgtacttctgttccaaaacatcggttgcactcgctacagctggagcagtatctgcagacagaaaactgctttctactgtagctaaaacctgatgaagccgcagctgaattaaaaaaaaacagaaataaagagactggaccttagcaaaaaatacaggaaactggtatcaccagtaatcattgcaggagcaagtaccatccttaaaatgatgaaatatattccggtctcgaacaacaatctccctatcgtacaccttcgaaatcaactttgtggccgagtggcagtctgcgcagacccttagattcttcgacaagcgaattgttgcaccagggtccagcttcatgaggccaaacgcaatggccagcttctcgctgtgatgggaaacggatacttccttctcacgctcttcaacctctagcctcacatcagctgtgtttgggacatacccagccaccttgatcctgccaatcatctcctcgactttctggtatatctccctcaactcggggtggtcgctgtcttcggcaaagaactcgaagacaaccccgtccagctcaatgaggctgcagcctggagttttctcgatccctctatccttcatttcctttcgaaccatcgctgcgtccttccactgtcccgccgatgcatatatgtttgacaggagcacgtaatcaccactgtgactggggttcaaggagatgatctgcttcagtgcttcttccccgatcccaacatttctgtgaactgcgcaggaagacagtagcgccctccagataacagcgtttggctcgatgggcatggtcctgataaactggtacgcctcatctaccaaaccggcccgccccaacagatccaccatacatccatagtgctcaacccttggcttaatgccatagtcccgagccatgctatcaaaatgccggcggccctcttcaaccaggcagctgtggctgcaagccatgaggacaccaatgaatgtcacgtctgtgggctcgatcccggcctcgcgcattgacgagaagagttccaacgcttccctgcccctcccattggttgccatgccctttatcaaggctgtccacgtccacgagttcttcacaggcattgactcaaacgcttcaaccgcatcgtcaatgcatccacacttcgcgtagaagtccaccagtgcagtgccgagaatagttgtcagagataggcgcttccttcttacgtaggaatgcacccacttccctgtctcaagtgcacccaggacagcacaggcagagagcacgcttaccatggtcacatcgttcggctcaactcttgcaagctgcatctcactgaaaagaccgagcgcctctcggcattgatctgcctgcgtgtagcctgagatcattgcgctccaagcaaccacatccctggactgcatcccatcgaacagcctccgtgccttaccaatctctccgcacttggcatacatgtccatcagtgcggtcaccaatttcgggttcctcgccagcccctcctcgtccacatgtccagcaacccacttgccaagcttcgcgtcacctatccttccgcatgccgtgaccacactcaccaatgtgacctcatcaaaggccacaccaacctcaagcatgcccttaaacatctccaccacctccatccaatctccgttcttcaagtacgccgcgacgatcgcgttccacatcaccacgccactctcctccgccgcgtcgaacacaagccgtgccgccgcaacgtcgccacagctcgcgtacatatgaatcaagctgctcagaacgaaccgatcggccacgagcccacgcttgacggcgtacgcctggacgccgcgccctacgtccagggcgcacatcctggagcacgacttgagggcacaggcggcggtgtgctgatcagcggggcaggccgaagccgcgtggagcatttcgatgaacaggtgcagggcgtcctccgggtggcccgcgtgaaggaaagctcgcataaggacgttgtagcacggcgtcgaaaggggcgggagtggaaggatttggccgacccggtgagctctccggacttgattagtgccgcgtggagctgtggcaagtagctaggatctgcgcggagtggagcacgtggcggcgccggcccggcgcggcccggtgtggggagagccgccgtggggacggcggtggccattcgagatgccttgcttgggtttaactgcttatcgttggttattattatccaagtggtctctgcctctgcgtgagacactgatatctgggcccacacgatagagatacctgtcctccatttaaattccggatccgcctctagtctccggcgtctccgcacaacaactaatcaccatggcggcctccacctctccactcctcctcgcccttctcctcctacccgcgctcacggcagcggcctcgctcctggcgctgccgctctcgacggcgtcgcggtggattgtaggtgtggatgggcggcgcgtgaagctggcgtgcgcgaactgggcttcgcacctggagcccgcagccgcggagggcctggcgcggcgccccgtgtcggacatcgcagcgcgcgtggcagcgatggggttcaactgcgtcaggctcacctggccgacctacctcgtcaccaacgccacgctagcttcgctgccgctgcggtggtcgctggagcgcctaggcatgctggagtccgtcgccggcgtcagagtcaacaaccccgcgctcctcgacctgcccctcatcgacgtgttccggcagaactgatggcaacggcttcttcggagatgtgtacttcgaccccaatgaatggttgaaaggcctcagtgcaatggcgactatgtttaacaacacgaaatatgttgttggcatgagcttgcggaatgagcttcgaggaccgaaacaaaatgttagtttgtggtacaggtacatgcagctgggtgctgaagctgtacatgctgcaaaccctaatgtcctggttattttgtcgggcctggattttgacaacactctcagcttcttgttcaaagaaaaagttaggctatcattttctggaaagttagtttatgagcaacattggtatggcttctcagatggtggcaattgggaaactcagaaccagaacgatgtttgtgggatggttgttgatttcatatgggctaaaggattattcctacttcaacatggctggccgttgtttttctctgagtttggatttgatatgtcaggcacacatattggtgacaatcgctatcttacctgcttcttaagtgtggcagccgaaatggatctggactgggcaatttgggctctgcaagggagttactatatcagagagggtattttagcttatgatgaatcatacggattgctgacatgggactggtgtacagctagaaatcctagcttcattaaaaggatcaattctctgcaatcagcattccaaggtcctggtcttccaaacactcaacagccatactacataatattccatccccaaagtgggctctgcgtcttggccaggtcttccaagttacttgagttgggtccatgcgacgaatcaaacgcctggaactacacctcagcgtacgagctggtagtgaaaagcacagggcaatgccttcaggcgcagtcggtaggcaagaatgcgaagctcggcaccgattgcagcaaaccaagttcgaagtggcacctgatatcggattcaaagatgcatgtctcggctgagctcgcgaaaaatggaaccagggtgtgcttggaagccagtcctgacggtgccatcagaacaaatcagtgcaagtgcctaagcgtcgatccgacctgtgaccctgagagtcagtggttcaaagtgatcttaagcagcagagacatacctggaggcgactccatcttgcagttgccgtcacttggcccctggcctccgacatcccttagttcttgagagtctgaaagctgctcatttccatgtggtgtgaccaaagaggaatacgagcgagaattacgtgaaaaatctgcagggttgctgtaggcagctgggtactgtagcgttgcatttggtttttaatgtacagtatgaataatctattgtgctttggaaggaagtaagctgcttcttacttggtgttggcgtctgtggccgtcaaggctgagtatgtagctctgtaatttggtttgtatatctagaagagaaattgttcgaaaagctgctgtttttggcagcaccaagattgtatatccaccattttcatgtatgttgcgtgtatgagatctttgagagttgaaggaaactgagatatccaccatttgcatgtacgcaagacgaatttggatgcctattctgttcttgttaataaagtgttacctagttcctcttagtttttctttttagtttttttagtttttttttgcaaattcatcgctttctagaccgagttttggcgatctgattcatcgctgtggcaagattgagttctggccatttaaaaactcttgcgcttcgcattaagttacagagccaatctcgctcatacaaatccacagattgtgtgataaaaaaaagggacaattgtgccagtgcccttactttggtatctaactgcagatttgacctccttttttagagtttgtgcaattgcccttcatttctttttacaaagctgccgtctgccctctttttttgacggcgccagttttatccatt

SEQ ID NO: 14588 - DNA, 6190 bp, Zea Mays
cttttagcacatatgtgaaggactaaagactaaatcattttagtccatattttagtcctagtgtttggcaaaaaaagaactaaatgagactaaaaactagagattaatctttagtccatgtaaccaaccacccctaactcattcctcaaaccaaactctctattagcgagtccaataatgacaaacaaatgtgaaaaacacgatgttggcagtctcatttttgtaataacctttacctactggccataaccttggccttctccagcctctctcagttgcgaacaacctgatggcgaagaagaaaggctcggccgccgccgccgccgccatggcggatgagacggacgtctcgagtcctcagggctccgcccccggcagcgagggaggtggggagaaggagggcgcctttcttcttggggagccaacctgggaggacgctggcggcgggcggtggcggtgcgcggagacggggcacgagctgccggagcgggagaaggaggcctacgcgcggtcccgcgcttgccgcctcgcgctcattgaccacgccgtcgcgcagaagaagccgccgctcaacgccttcaagccccaccccgagcacaaatcgaagctggtatgcaagattacaggggatacaattaacaagttggaggatcacatatggaagcacatcaacgggaagagatttcttaacaagctagaaagggtagaagaccggatggcttctggtgagatgcctgatggagaacctgtgaagtcaaatgaagtggcaaagaagagcaagtcaagcaagaaggacaagaagaaagctaatgttgccagcacttctttgccaagagaacctaaaccagagatggctgattcagatgatccagatttctgggtgcctcctgttggaagtcgctgggatgacgatgacgggaaagacagatgggagtcattaccaggaaagcccaacttagcaaagaacgaaggtggttctgatgatgatggtggtgatgacaatgatacggctgacaaggatgatgctgaatcaatggaacttgcttcaaggacaaagcgaatgtcaatagaagcagctgggccaaggaagaaaaaacccaagaaggagcagtaagacattcgcaatttgtcaagactcaaatgaagaatttggtctcgttgggaagaagaagcgttatctatttgattattgggtcgtgtttcctcagatttgggtaatcaatgactggatttgtgttagcatgcttatggttaacgcctgtcaactgtgatacatctacatttgcacgtaccttgcatttttttttttggaaaactttgagggccaactatcagttgtcttttgctagggtttaggacgtgctatgattggacaacatagacggagctagagctccaaattccaagataactcattcgaaatattaataagactgtcctgatatattaggtaggaatattttagattgccgatttttatgtacttctgttccaaaacatcggttgcactcgctacagctggagcagtatctgcagacagaaaactgctttctactgtagctaaaacctgatgaagccgcagctgaattaaaaaaaaacagaaataaagagactggaccttagcaaaaaatacaggaaactggtatcaccagtaatcattgcaggagcaagtaccatccttaaaatgatgaaatatattccggtctcgaacaacaatctccctatcgtacaccttcgaaatcaactttgtggccgagtggcagtctgcgcagacccttagattcttcgacaagcgaattgttgcaccagggtccagcttcatgaggccaaacgcaatggccagcttctcgctgtgatgggaaacggatacttccttctcacgctcttcaacctctagcctcacatcagctgtgtttgggacatacccagccaccttgatcctgccaatcatctcctcgactttctggtatatctccctcaactcggggtggtcgctgtcttcggcaaagaactcgaagacaaccccgtccagctcaatgaggctgcagcctggagttttctcgatccctctatccttcatttcctttcgaaccatcgctgcgtccttccactgtcccgccgatgcatatatgtttgacaggagcacgtaatcaccactgtgactggggttcaaggagatgatctgcttcagtgcttcttccccgatcccaacatttctgtgaactgcgcaggaagacagtagcgccctccagataacagcgtttggctcgatgggcatggtcctgataaactggtacgcctcatctaccaaaccggcccgccccaacagatccaccatacatccatagtgctcaacccttggcttaatgccatagtcccgagccatgctatcaaaatgccggcggccctcttcaaccaggcagctgtggctgcaagccatgaggacaccaatgaatgtcacgtctgtgggctcgatcccggcctcgcgcattgacgagaagagttccaacgcttccctgcccctcccattggttgccatgccctttatcaaggctgtccacgtccacgagttcttcacaggcattgactcaaacgcttcaaccgcatcgtcaatgcatccacacttcgcgtagaagtccaccagtgcagtgccgagaatagttgtcagagataggcgcttccttcttacgtaggaatgcacccacttccctgtctcaagtgcacccaggacagcacaggcagagagcacgcttaccatggtcacatcgttcggctcaactcttgcaagctgcatctcactgaaaagaccgagcgcctctcggcattgatctgcctgcgtgtagcctgagatcattgcgctccaagcaaccacatccctggactgcatcccatcgaacagcctccgtgccttaccaatctctccgcacttggcatacatgtccatcagtgcggtcaccaatttcgggttcctcgccagcccctcctcgtccacatgtccagcaacccacttgccaagcttcgcgtcacctatccttccgcatgccgtgaccacactcaccaatgtgacctcatcaaaggccacaccaacctcaagcatgcccttaaacatctccaccacctccatccaatctccgttcttcaagtacgccgcgacgatcgcgttccacatcaccacgccactctcctccgccgcgtcgaacacaagccgtgccgccgcaacgtcgccacagctcgcgtacatatgaatcaagctgctcagaacgaaccgatcggccacgagcccacgcttgacggcgtacgcctggacgccgcgccctacgtccagggcgcacatcctggagcacgacttgagggcacaggcggcggtgtgctgatcagcggggcaggccgaagccgcgtggagcatttcgatgaacaggtgcagggcgtcctccgggtggcccgcgtgaaggaaagctcgcataaggacgttgtagcacggcgtcgaaaggggcgggagtggaaggatttggccgacccggtgagctctccggacttgattagtgccgcgtggagctgtggcaagtagctaggatctgcgcggagtggagcacgtggcggcgccggcccggcgcggcccggtgtggggagagccgccgtggggacggcggtggccattcgagatgccttgcttgggtttaactgcttatcgttggttattattatccaagtggtctctgcctctgcgtgagacactgatatctgggcccacacgatagagatacctgtcctccatttaaattccggatccgcctctagtctccggcgtctccgcacaacaactaatcaccatggcggcctccacctctccactcctcctcgcccttctcctcctacccgcgctcacggcagcggcctcgctcctggcgctgccgctctcgacggcgtcgcggtggattgtaggtgtggatgggcggcgcgtgaagctggcgtgcgcgaactgggcttcgcacctggagcccgcagccgcggagggcctggcgcggcgccccgtgtcggacatcgcagcgcgcgtggcagcgatggggttcaactgcgtcaggctcacctggccgacctacctcgtcaccaacgccacgctagcttcgctgccgctgcggtggtcgctggagcgcctaggcatgctggagtccgtcgccggcgtcagagtcaacaaccccgcgctcctcgacctgcccctcatcgacgtgttccgggatggtgctgcagcagaactgatggcaacggcttcttcggagatgtgtacttcgaccccaatgaatggttgaaaggcctcagtgcaatggcgactatgtttaacaacacgaaatatgttgttggcatgagcttgcggaatgagcttcgaggaccgaaacaaaatgttagtttgtggtacaggtacatgcagctgggtgctgaagctgtacatgctgcaaaccctaatgtcctggttattttgtcgggcctggattttgacaacactctcagcttcttgttcaaagaaaaagttaggctatcattttctggaaagttagtttatgagcaacattggtatggcttctcagatggtggcaattgggaaactcagaaccagaacgatgtttgtgggatggttgttgatttcatatgggctaaaggattattcctacttcaacatggctggccgttgtttttctctgagtttggatttgatatgtcaggcacacatattggtgacaatcgctatcttacctgcttcttaagtgtggcagccgaaatggatctggactgggcaatttgggctctgcaagggagttactatatcagagagggtattttagcttatgatgaatcatacggattgctgacatgggactggtgtacagctagaaatcctagcttcattaaaaggatcaattctctgcaatcagcattccaaggtcctggtcttccaaacactcaacagccatactacataatattccatccccaaagtgggctctgcgtcttggccaggtcttccaagttacttgagttgggtccatgcgacgaatcaaacgcctggaactacacctcagcgtacgagctggtagtgaaaagcacagggcaatgccttcaggcgcagtcggtaggcaagaatgcgaagctcggcaccgattgcagcaaaccaagttcgaagtggcacctgatatcggattcaaagatgcatgtctcggctgagctcgcgaaaaatggaaccagggtgtgcttggaagccagtcctgacggtgccatcagaacaaatcagtgcaagtgcctaagcgtcgatccgacctgtgaccctgagagtcagtggttcaaagtgatcttaagcagcagagacatacctggaggcgactccatcttgcagttgccgtcacttggcccctggcctccgacatcccttagttcttgagagtctgaaagctgctcatttccatgtggtgtgaccaaagaggaatacgagcgagaattacgtgaaaaatctgcagggttgctgtaggcagctgggtactgtagcgttgcatttggtttttaatgtacagtatgaataatctattgtgctttggaaggaagtaagctgcttcttacttggtgttggcgtctgtggccgtcaaggctgagtatgtagctctgtaatttggtttgtatatctagaagagaaattgttcgaaaagctgctgtttttggcagcaccaagattgtatatccaccattttcatgtatgttgcgtgtatgagatctttgagagttgaaggaaactgagatatccaccatttgcatgtacgcaagacgaatttggatgcctattctgttcttgttaataaagtgttacctagttcctcttagtttttctttttagtttttttagtttttttttgcaaattcatcgctttctagaccgagttttggcgatctgattcatcgctgtggcaagattgagttctggccatttaaaaactcttgcgcttcgcattaagttacagagccaatctcgctcatacaaatccacagattgtgtgataaaaaaaagggacaattgtgccagtgcccttactttggtatctaactgcagatttgacctccttttttagagtttgtgcaattgcccttcatttctttttacaaagctgccgtctgccctctttttttgacggcgccagttttatccatt

SEQ ID NO: 14589 - DNA, 6257 bp, Zea Mays
cttttagcacatatgtgaaggactaaagactaaatcattttagtccatattttagtcctagtgtttggcaaaaaaagaactaaatgagactaaaaactagagattaatctttagtccatgtaaccaaccacccctaactcattcctcaaaccaaactctctattagcgagtccaataatgacaaacaaatgtgaaaaacacgatgttggcagtctcatttttgtaataacctttacctactggccataaccttggccttctccagcctctctcagttgcgaacaacctgatggcgaagaagaaaggctcggccgccgccgccgccgccatggcggatgagacggacgtctcgagtcctcagggctccgcccccggcagcgagggaggtggggagaaggagggcgcctttcttcttggggagccaacctgggaggacgctggcggcgggcggtggcggtgcgcggagacggggcacgagctgccggagcgggagaaggaggcctacgcgcggtcccgcgcttgccgcctcgcgctcattgaccacgccgtcgcgcagaagaagccgccgctcaacgccttcaagccccaccccgagcacaaatcgaagctggtatgcaagattacaggggatacaattaacaagttggaggatcacatatggaagcacatcaacgggaagagatttcttaacaagctagaaagggtagaagaccggatggcttctggtgagatgcctgatggagaacctgtgaagtcaaatgaagtggcaaagaagagcaagtcaagcaagaaggacaagaagaaagctaatgttgccagcacttctttgccaagagaacctaaaccagagatggctgattcagatgatccagatttctgggtgcctcctgttggaagtcgctgggatgacgatgacgggaaagacagatgggagtcattaccaggaaagcccaacttagcaaagaacgaaggtggttctgatgatgatggtggtgatgacaatgatacggctgacaaggatgatgctgaatcaatggaacttgcttcaaggacaaagcgaatgtcaatagaagcagctgggccaaggaagaaaaaacccaagaaggagcagtaagacattcgcaatttgtcaagactcaaatgaagaatttggtctcgttgggaagaagaagcgttatctatttgattattgggtcgtgtttcctcagatttgggtaatcaatgactggatttgtgttagcatgcttatggttaacgcctgtcaactgtgatacatctacatttgcacgtaccttgcatttttttttttggaaaactttgagggccaactatcagttgtcttttgctagggtttaggacgtgctatgattggacaacatagacggagctagagctccaaattccaagataactcattcgaaatattaataagactgtcctgatatattaggtaggaatattttagattgccgatttttatgtacttctgttccaaaacatcggttgcactcgctacagctggagcagtatctgcagacagaaaactgctttctactgtagctaaaacctgatgaagccgcagctgaattaaaaaaaaacagaaataaagagactggaccttagcaaaaaatacaggaaactggtatcaccagtaatcattgcaggagcaagtaccatccttaaaatgatgaaatatattccggtctcgaacaacaatctccctatcgtacaccttcgaaatcaactttgtggccgagtggcagtctgcgcagacccttagattcttcgacaagcgaattgttgcaccagggtccagcttcatgaggccaaacgcaatggccagcttctcgctgtgatgggaaacggatacttccttctcacgctcttcaacctctagcctcacatcagctgtgtttgggacatacccagccaccttgatcctgccaatcatctcctcgactttctggtatatctccctcaactcggggtggtcgctgtcttcggcaaagaactcgaagacaaccccgtccagctcaatgaggctgcagcctggagttttctcgatccctctatccttcatttcctttcgaaccatcgctgcgtccttccactgtcccgccgatgcatatatgtttgacaggagcacgtaatcaccactgtgactggggttcaaggagatgatctgcttcagtgcttcttccccgatcccaacatttctgtgaactgcgcaggaagacagtagcgccctccagataacagcgtttggctcgatgggcatggtcctgataaactggtacgcctcatctaccaaaccggcccgccccaacagatccaccatacatccatagtgctcaacccttggcttaatgccatagtcccgagccatgctatcaaaatgccggcggccctcttcaaccaggcagctgtggctgcaagccatgaggacaccaatgaatgtcacgtctgtgggctcgatcccggcctcgcgcattgacgagaagagttccaacgcttccctgcccctcccattggttgccatgccctttatcaaggctgtccacgtccacgagttcttcacaggcattgactcaaacgcttcaaccgcatcgtcaatgcatccacacttcgcgtagaagtccaccagtgcagtgccgagaatagttgtcagagataggcgcttccttcttacgtaggaatgcacccacttccctgtctcaagtgcacccaggacagcacaggcagagagcacgcttaccatggtcacatcgttcggctcaactcttgcaagctgcatctcactgaaaagaccgagcgcctctcggcattgatctgcctgcgtgtagcctgagatcattgcgctccaagcaaccacatccctggactgcatcccatcgaacagcctccgtgccttaccaatctctccgcacttggcatacatgtccatcagtgcggtcaccaatttcgggttcctcgccagcccctcctcgtccacatgtccagcaacccacttgccaagcttcgcgtcacctatccttccgcatgccgtgaccacactcaccaatgtgacctcatcaaaggccacaccaacctcaagcatgcccttaaacatctccaccacctccatccaatctccgttcttcaagtacgccgcgacgatcgcgttccacatcaccacgccactctcctccgccgcgtcgaacacaagccgtgccgccgcaacgtcgccacagctcgcgtacatatgaatcaagctgctcagaacgaaccgatcggccacgagcccacgcttgacggcgtacgcctggacgccgcgccctacgtccagggcgcacatcctggagcacgacttgagggcacaggcggcggtgtgctgatcagcggggcaggccgaagccgcgtggagcatttcgatgaacaggtgcagggcgtcctccgggtggcccgcgtgaaggaaagctcgcataaggacgttgtagcacggcgtcgaaaggggcgggagtggaaggatttggccgacccggtgagctctccggacttgattagtgccgcgtggagctgtggcaagtagctaggatctgcgcggagtggagcacgtggcggcgccggcccggcgcggcccggtgtggggagagccgccgtggggacggcggtggccattcgagatgccttgcttgggtttaactgcttatcgttggttattattatccaagtggtctctgcctctgcgtgagacactgatatctgggcccacacgatagagatacctgtcctccatttaaattccggatccgcctctagtctccggcgtctccgcacaacaactaatcaccatggcggcctccacctctccactcctcctcgcccttctcctcctacccgcgctcacggcagcggcctcgctcctggcgctgccgctctcgacggcgtcgcggtggattgtaggtgtggatgggcggcgcgtgaagctggcgtgcgcgaactgggcttcgcacctggagcccgcagccgcggagggcctggcgcggcgccccgtgtcggacatcgcagcgcgcgtggcagcgatggggttcaactgcgtcaggctcacctggccgacctacctcgtcaccaacgccacgctagcttcgctgccgctgcggtggtcgctggagcgcctaggcatgctggagtccgtcgccggcgtcagagtcaacaaccccgcgctcctcgacctgcccctcatcgacgtgttccgggaagtggtgtcatcattagccagaaagggtattatggtcatacttgacaaccaaatgaccactccaggatggtgctgcagcagaactgatggcaacggcttcttcggagatgtgtacttcgaccccaatgaatggttgaaaggcctcagtgcaatggcgactatgtttaacaacacgaaatatgttgttggcatgagcttgcggaatgagcttcgaggaccgaaacaaaatgttagtttgtggtacaggtacatgcagctgggtgctgaagctgtacatgctgcaaaccctaatgtcctggttattttgtcgggcctggattttgacaacactctcagcttcttgttcaaagaaaaagttaggctatcattttctggaaagttagtttatgagcaacattggtatggcttctcagatggtggcaattgggaaactcagaaccagaacgatgtttgtgggatggttgttgatttcatatgggctaaaggattattcctacttcaacatggctggccgttgtttttctctgagtttggatttgatatgtcaggcacacatattggtgacaatcgctatcttacctgcttcttaagtgtggcagccgaaatggatctggactgggcaatttgggctctgcaagggagttactatatcagagagggtattttagcttatgatgaatcatacggattgctgacatgggactggtgtacagctagaaatcctagcttcattaaaaggatcaattctctgcaatcagcattccaaggtcctggtcttccaaacactcaacagccatactacataatattccatccccaaagtgggctctgcgtcttggccaggtcttccaagttacttgagttgggtccatgcgacgaatcaaacgcctggaactacacctcagcgtacgagctggtagtgaaaagcacagggcaatgccttcaggcgcagtcggtaggcaagaatgcgaagctcggcaccgattgcagcaaaccaagttcgaagtggcacctgatatcggattcaaagatgcatgtctcggctgagctcgcgaaaaatggaaccagggtgtgcttggaagccagtcctgacggtgccatcagaacaaatcagtgcaagtgcctaagcgtcgatccgacctgtgaccctgagagtcagtggttcaaagtgatcttaagcagcagagacatacctggaggcgactccatcttgcagttgccgtcacttggcccctggcctccgacatcccttagttcttgagagtctgaaagctgctcatttccatgtggtgtgaccaaagaggaatacgagcgagaattacgtgaaaaatctgcagggttgctgtaggcagctgggtactgtagcgttgcatttggtttttaatgtacagtatgaataatctattgtgctttggaaggaagtaagctgcttcttacttggtgttggcgtctgtggccgtcaaggctgagtatgtagctctgtaatttggtttgtatatctagaagagaaattgttcgaaaagctgctgtttttggcagcaccaagattgtatatccaccattttcatgtatgttgcgtgtatgagatctttgagagttgaaggaaactgagatatccaccatttgcatgtacgcaagacgaatttggatgcctattctgttcttgttaataaagtgttacctagttcctcttagtttttctttttagtttttttagtttttttttgcaaattcatcgctttctagaccgagttttggcgatctgattcatcgctgtggcaagattgagttctggccatttaaaaactcttgcgcttcgcattaagttacagagccaatctcgctcatacaaatccacagattgtgtgataaaaaaaagggacaattgtgccagtgcccttactttggtatctaactgcagatttgacctccttttttagagtttgtgcaattgcccttcatttctttttacaaagctgccgtctgccctctttttttgacggcgccagttttatccatt

SEQ ID NO: 14590 - DNA, 1201 bp, Zea Mays
cgatgagcatctcagggcacacccagatgggagacgtgttgattctaagcctgcagtgtgggaacctgtctgtgacgatatgcgtccgtgtttctcggttttgggacttttctgatcctcaggatgctgcaaggctgctacactgtgatatggtgttgctcgatgaagagggaaatagcatacatgctacgatatacccacccttcatagagaaattcaggccactcataaaagaaggcagcgtgtacaacatgacatactttcgagttcgagcgtcgaacaacttgtataagccagttccaaatgatatcatgattaccttcacgaattggacaaagttagagcaggttattgagattcctcctgcatttcctacacttacctactccctcactcacatagagcagatccattcacgcatcgaccataaagactactatacagatgccattgggatagttaattcagtctcggatgtttcgccacatcgctccaaaggacaacaagcttctagcttgaagaggaacatttccatatgcagtgcaagaggtgcttcggtcaatgtcgtgttgtggggtgcccaagccaccctattcccaggagagcgcatatacgaagatgggcagaattccccacagattgtgctatttgttggcacactcgtcaaaaaatatgcagatgtgctttgtctgactggaagctcaccatgtaagtggtacatcaatccatccattcctgaggtagaaacccttacgtccagcgcacgcggtgatcataaaccagtgaagtggaatgcaactgttacttcgagccagcttatatctcctgttgctgaggagcaaaaggtgtcgtacatcaagtatctccatccctttgaaaacaagggaaaggaattcttggttacagtcactataaggaaaattgacagcaagtggtggtataactcgtgccgaaaatgcgcctgcacagctgtcactcacggagactcttacaaatgcacaaaccatgattgtgctaacattgttatgcccgtccaaaggtataaaatacttgtcactgcaggagacgagacagctgatacagacttcattctctttgggcacatggctcaaagaattgtcaaaaggccttgcgatatgctcatagcgaacactccatcaggctttattccagacgcaatcacaaagctgcttgaaaggac

SEQ ID NO: 14591 - DNA, 1808 bp, Zea Mays
atcttaattttgtttcccacataacttattaatataatatcattatgcatatacttatagttaagttttaggggtctacaataaccctcaatactattgatgtaaaatggccgttcacactccagagaaggcaattcccagtacgagtatgctacgcaatgacaattaataagagccaaggacaaaccctatccagggttgggctttacctcaagaaaccggtcttcactcatggacaactttatgtggccgtatctaggactacatccagaggtggccttagaatcctgattgagaatgaggacggttcgtgcggggtacagacttgaaatgtggtgtaccacgaagtcctcactgtcgctgaagcggctgccatactagccacctaatttttcatccatcttttgtgttgtacatagcaatgatatgtaaatactctagcgctgctgctactcagacgattgtgtctcttttcatgcttgttatcttcgttttttcttgctgcgtgtacattatcttttgctttgaggtaaaattgttctactgatgtgcaatacgtatactagccttatctatttccctgctgctgtattctctaatgtttatgccatttttgggtcaacactgcagatgggagacgtgttgattctaagcctgcagtgtgggaacctgtctgtgacgatatgcgtccgtgtttctcggttttgggacttttctgatcctcaggatgctgcaaggctgctacactgtgatatggtgttgctcgatgaagagggaaatagcatacatgctacgatatacccacccttcatagagaaattcaggccactcataaaagaaggcagcgtgtacaacatgacatactttcgagttcgagcgtcgaacaacttgtataagccagttccaaatgatatcatgattaccttcacgaattggacaaagttagagcaggttattgagattcctcctgcatttcctacacttacctactccctcactcacatagagcagatccattcacgcatcgaccataaagactactatacagatgccattgggatagttaattcagtctcggatgtttcgccacatcgctccaaaggacaacaagcttctagcttgaagaggaacatttccatatgcagtgcaagcagaggtgcttcggtcaatgtcgtgttgtggggtgcccaagccaccctattcccaggagagcgcatatacgaagatgggcagaattccccacagattgtgctatttgttggcacactcgtcaaaaaatatgcagatgtgctttgtctgactggaagctcaccatgtaagtggtacatcaatccatccattcctgaggtagaaacccttacgtccagcgcacgcggtgatcataaaccagtgaagtggaatgcaactgttacttcgagccagcttatatctcctgttgctgaggagcaaaaggtgtcgtacatcaagtatctccatccctttgaaaacaagggaaaggaattcttggttacagtcactataaggaaaattgacagcaagtggtggtataactcgtgccgaaaatgcgcctgcacagctgtcactcacggagactcttacaaatgcacaaaccatgattgtgctaacattgttatgcccgtccaaaggtataaaatacttgtcactgcaggagacgagacagctgatacagacttcattctctttgggcacatggctcaaagaattgtcaaaaggccttgcgatatgctcatagcgaacactccatcaggctttattccagacgcaatcacaaagctgcttgaaaggac

SEQ ID NO: 14592 - DNA, 2648 bp, Zea Mays
atcttaattttgtttcccacataacttattaatataatatcattatgcatatacttatagttaagttttaggggtctacaataaccctcaatactattgatgtaaaatggccgttcacactccagagaaggcaattcccagtacgagtatgctacgcaatgacaattaataagagccaaggacaaaccctatccagggttgggctttacctcaagaaaccggtcttcactcatggacaactttatgtggccgtatctaggactacatccagaggtggccttagaatcctgattgagaatgaggacggttcgtgcggggtacagacttgaaatgtggtgtaccacgaagtcctcactgtcgctgaagcggctgccatactagccacctaatttttcatccatcttttgtgttgtacatagcaatgatatgtaaatactctagcgctgctgctactcagacgattgtgtctcttttcatgcttgttatcttcgttttttcttgctgcgtgtacattatcttttgctttgaggtaaaattgttctactgatgtgcaatacgtatactagccttatctatttccctgctgctgtattctctaatgtttatgccatttttgggtcaacactgcagatgggagacgtgttgattctaagcctgcagtgtgggaacctgtctgtgacgatatgcgtccgtgtttctcggttttgggacttttctgatcctcaggatgctgcaaggctgctacactgtgatatggtgttgctcgatgaagagggaaatagcatacatgctacgatatacccacccttcatagagaaattcaggccactcataaaagaaggcagcgtgtacaacatgacatactttcgagttcgagcgtcgaacaacttgtataagccagttccaaatgatatcatgattaccttcacgaattggacaaagttagagcaggttattgagattcctcctgcatttcctacacttacctactccctcactcacatagagcagatccattcacgcatcgaccataaagactactatacagttaattcagtctcggatgtttcgccacatcgctccaaaggacaacaagcttctagcttgaagaggaacatttccatatgcagtgcaagaggtgcttcggtcaatgtcgtgttgtggggtgcccaagccaccctattcccaggagagcgcatatacgaagatgggcagaattccccacagattgtgctatttgttggcacactcgtcaaaaaatatgcagatgtgctttgtctgactggaagctcaccatgtaagtggtacatcaatccatccattcctgaggtagaaacccttacgtccagcgcacgcggtgatcataaaccagtgaagtggaatgcaactgttacttcgagccagcttatatctcctgttgctgaggagcaaaaggtgtcgtacatcaagtatctccatccctttgaaaacaagggaaaggaattcttggttacagtcactataaggaaaattgacagcaagtggtggtataactcgtgccgaaaatgcgcctgcacagctgtcactcacggagactcttacaaatgcacaaaccatgattgtgctaacattgttatgcccgtccaaaggtataaaatacttgtcactgcaggagacgagacagctgatacagacttcattctctttgggcacatggctcaaagaattgtcaaaaggccttgcgatatgctcatagcgaacactccatcaggctttattccagacgcaatcacaaagctgcttgaaaggacgttcatttggaacggacacaccagtcttcgcttatgttctcacaaggtgcaagcagcagcatggaagacactcctcacaagacagacaccttgccttcacctctgacacctttgacgccccagggtagcgtcgccactacaaagtatttggaaaccgttgacgctggagatgctgagcgtgtgactactcagtcctcgacaactaggaagagatcatgctctttgcctggcaaatcaatagcaaaaaaactattcattgctgacgatgaggaaggaagcatcagtcagtccagtggaggtggtgttggtggatccaggtcagtgatgacaaagataattaggtgctggtgtaggaatgtggaacttttgccttcacagttgcagccatgtgtaattcagggttatcatctatttctacttttctcaagttattgtatatgttagttggatgggggagatgtggtacatacttttgtccgcaacatcgctaacggtttgcctacacaaatctaccaaggttaactttgatcaggatgctacgtctatcacacttttgatatgctgacggccaacgtgaatccatctcacttacaatcgtgcttgttacctttcctcccctgatgttcatcctcagtgacttgtactatgtagtggcagaagaaaaacctactcttttgtatatatcaactgcttgttgttaaaccttttgctacattgcacggctgcaaattgtgctctacttatttgtgtggctaaagtcttttggcaacccacaaatgcattttattccatgactcacttatatgctaccaatgtcgtattttttgttttgtactatggaacttataacatgcgtct

SEQ ID NO: 14593 - DNA, 839 bp, Zea Mays
cttttcatgcttgttatcttcgttttttcttgctgcgtgtacattatcttttgctttgaggtaaaattgttctactgatgtgcaatacgtatactagccttatctatttccctgctgctgtattctctaatgtttatgccatttttgggtcaacactgcagatgggagacgtgttgattctaagcctgcagtgtgggaacctgtctgtgacgatatgcgtccgtgtttctcggttttgggacttttctgatcctcaggatgctgcaaggctgctacactgtgatatggtgttgctcgatgaagagggaaatagcatacatgctacgatatacccacccttcatagagaaattcaggccactcataaaagaaggcagcgtgtacaacatgacatactttcgagttcgagcgtcgaacaacttgtataagccagttccaaatgatatcatgattaccttcacgaattggacaaagttagagcaggttattgagattcctcctgcatttcctacacttacctactccctcactcacatagagcagatccattcacgcatcgaccataaagactactatacagatgccattgggatagttaattcagtctcggatgtttcgccacatcgctccaaaggacaacaagcttctagcttgaagaggaacatttccatatgcagtgcaagaggtgcttcggtcaatgtcgtgttgtggggtgcccaagccaccctattcccaggagagcgcatatacgaagatgggcagaattccccacagattgtgctatttgttggcacactcgtcaaaaaatatgcaggtcaatgctactgtaaaggaactagg

SEQ ID NO: 14594 - DNA, 1173 bp, Zea Mays
gtttatgccatttttgggtcaacactgcagatgggagacgtgttgattctaagcctgcagtgtgggaacctgtctgtgacgatatgcgtccgtgtttctcggttttgggacttttctgatcctcaggatgctgcaaggctgctacactgtgatatggtgttgctcgatgaagagggaaatagcatacatgctacgatatacccacccttcatagagaaattcaggccactcataaaagaaggcagcgtgtacaacatgacatactttcgagttcgagcgtcgaacaacttgtataagccagttccaaatgatatcatgattaccttcacgaattggacaaagttagagcaggttattgagattcctcctgcatttcctacacttacctactccctcactcacatagagcagatccattcacgcatcgaccataaagactactatacagttaattcagtctcggatgtttcgccacatcgctccaaaggacaacaagcttctagcttgaagaggaacatttccatatgcagtgcaagcagaggtgcttcggtcaatgtcgtgttgtggggtgcccaagccaccctattcccaggagagcgcatatacgaagatgggcagaattccccacagattgtgctatttgttggcacactcgtcaaaaaatatgcagatgtgctttgtctgactggaagctcaccatgtaagtggtacatcaatccatccattcctgagcgcacgcggtgatcataaaccagtgaagtggaatgcaactgttacttcgagccagcttatatctcctgttgctgaggagcaaaaggtgtcgtacatcaagtatctccatccctttgaaaacaagggaaaggaattcttggttacagtcactataaggaaaattgacagcaagtggtggtataactcgtgccgaaaatgcgcctgcacagctgtcactcacggagactcttacaaatgcacaaaccatgattgtgctaacattgttatgcccgtccaaaggtataaaatacttgtcactgcaggagacgagacagctgatacagacttcattctctttgggcacatggctcaaagaattgtcaaaaggccttgcgatatgctcatagcgaacactccatcaggctttattccagacgcaatcacaaagctgcttgaaaggac

SEQ ID NO: 14595 - DNA, 687 bp, Zea Mays
gttgttcttaccttgtgttctgctagatgtatgaggtgcttcggtcaatgtcgtgttgtggggtgcccaagccaccctattcccaggagagcgcatatacgaagatgggcagaattccccacagattgtgctatttgttggcacactcgtcaaaaaatatgcagatgtgctttgtctgactggaagctcaccatgtaagtggtacatcaatccatccattcctgaggtagaaacccttacgtccagcgcacgcggtgatcataaaccagtgaagtggaatgcaactgttacttcgagccagcttatatctcctgttgctgaggagcaaaaggtgtcgtacatcaagtatctccatccctttgaaaacaagggaaaggaattcttggttacagtcactataaggaaaattgacagcaagtggtggtataactcgtgccgaaaatgcgcctgcacagctgtcactcacggagactcttacaaatgcacaaaccatgattgtgctaacattgttatgcccgtccaaaggtataaaatacttgtcactgcaggagacgagacagctgatacagacttcattctctttgggcacatggctcaaagaattgtcaaaaggccttgcgatatgctcatagcgaacactccatcaggctttattccagacgcaatcacaaagctgcttgaaaggac

SEQ ID NO: 14596 - DNA, 3720 bp, Zea Mays
cttttccgtgccgttctggcactgagcacatggccacacccacgctgccgctggcctgctcagcacactagctcacacacactccccggcctcgcccaggccgccgtcctctccatcctcggaagctccagccgccgctaccattaccagtgagttgaggtgctctggtgctgggctgactgtacccgccgctaccattaccacgcgctgcaccgtagcagagcggttccaaccccgtcgaggcaaaaagccctggccgttccctggccccgtgccgccgccgccgcctccgtgcgcccaggcttctttctgtgacttcgctaaaatgggtcatgtcctcatcatcaggaccacactttcaagtcaaaattgaagataccatcttccactattccactttcatgtcaaaactcaagatgacggacatgaggcgtcactctgtggatgtcccgctgtcaagaaccttggtgcagctcaagcgattgagatcgctgcgggatccagcgacaaactcaatgggcaagttcgcatctcctgccgaccacatggtgtgggagactgcttctagcaatggggtggctctggagctcggcaggtcggcacataatcaccaggttgaagaagacgaggacgtgggagccgagcctacaatggggtcggagcggagttttcggggaccaaacgcaaggactgcgtcctacaggagatcttctgctgtcaggatcagaggcttgaacccaccaagaaacaagcaggttcatcgtgtccgccgagacggtcaccgcaagtcagtggactctagccactcgaatcatagttctatccgtcaattggcgaacaatttggtcaacaatgtggatgcagaggaggaagtgaattcttatgaaaggccaaaatttgcaatgccaggtaaatctgacgaagacgaagtgaaaatgccaggccactccaaattcaggagcaagccttcggctgcaatgagccgtgtcgggagcccctgcatgtcagctagcgaggcaagatcagggcatggaaccgaggatacacgactgaggtcaaacgatgtcgtggggtcaaattttagtggctgtggtataagctactgctggtcaggagcgtcaaagtgccgagagctttattctgacagtgatggtccagatcagcctctcttatctacagatgggactgaggcagcgttccaaggcaacgtaccatacactgagacgcccaggtgtctaagccagaaatttcgccctcgttccttcagcgaattggttggactaaacgttgttgcccagtccctcttatattcctgctgcaaaggaaaagttgccccaatgtacctgtttcatggcccccggggcacaggcaagacatccacggcaaggattttcgccgcggctctaaattgcgtgtcccttgaagagcaaaggccatgtgggttctgcaaagagtgtgtcatccttttctctgggaagggtagagatgtgaaagagcttgacgtggcgaaaatgggtcgtttaggtcgagtgaaggcgcttctcaagagcgcatccctcgtaccctactcttcgcgcttcaaggttttcataatagatgaatgccatctcttgcaagaagacgcatggtcagcaatactgaagagccttgacgagccataccggcatacggtatacattatgatcacttctgacatagaaagcctgcctcgcgcttccatcacacgttgccagaagttccattttccgaagataaaggtggcagatattgtatacaggctggagaagatctgtataggagaaggattggaattcgaccatgatgggttgtacttcattgctgcaaagtctagtggttctcttagagattctgaagtaatgcttgaccagctcagtttgcttgggaagaagatcacaatttctcttgtgcatgaacttgtaggatcagtgtctgatgacgagttgattgagttgcttgatctagcattgtcatctgacacaaccaatactgtaagacgagcccgagaacttatggggtcagcaattgatcctctgcagcttgtttctcagctggccaaccttattatggacattctctcaggacgatgtcaatctgctgtcagtgaagtcagcaaaagtttcttgggtagatatgcattatcagaggttggaataaagaaattaagacatgcactgaagatactatcagaaactgaaaaacaattgaggacatcaaggaatcaggctacttgggttacagttgcgcttttgcagtttggcaccaatgaacctaaccttattgctgaaccgaatgatatgcattcacattcagtaactggatatacagatgactgggtttccaaggtgcactcaaacaccaatttttgtcaggcatgtaacagcagcaagtccaactgttctgagagacactgtagacggcttaagcttgagaacatatggaggagagccattggaaagtgtcgatcaagatcagccaaaagtttcctcaggaaagaaggcttcttatcatcggttcatgttaccgaagagctggctatagcagaagttggcttcggacacccagatcacctatcaagagcagagaaaatgcaaagcctaatagagtgctctttacagcacgttcttgggtgcaatgtggagatcagattcaaacttgtaccttgtccagtgagaaaagatgctaggttgaagagacactcgttcagttttctcagttgctctggccggaagcaagagctgtcagattcagtagtgactgatgaagacgaagctgtgaggcctggggcaagggagacaccgcttaaaggctacacctctagccagcaggagtcaccatataccatgcaacgtgtcgattcgaaaccaacagcctatggttgcgaggatgatggtcggagcaccttgacgtcgaacagatccatgacagatgacatgacaaggacgtgcaggtccgagactaactactcaaaggggggtgtgagtgatcagggccgctttggtagcatccaggagcctgacctacagccaagctgcttctcgcgaacactgaggcttcagaagaagctgttgtcttctggcgcagcgcacaccatctgtctgaggatccagccgcataacaagatggaattcctacctaagaaggaatttgatacgtacttctgcgcgtatgagccttacgagcagtgtccaagatcagtttcaagggctacttacagttcaagagatgatgacttgtggagcaagaattcacggttcggttcaaatctactctgctggaaagccccaaaacaacccatgtaacggagagcactttcacaccagcaagctgctttcttacaagcgtaactgcgacaaccagcaccagcattgctgccggggaaaagtgaaccatggtagcagaacattggcatgctgaaaaacagtgtcaaatcattcagtttttgctaggacatttaccaatttctcccgaagctggaggcatgggcaccacctgtggggacaattttcaaaggaaatcccaggaggggtctttgtttttattgttcttggcaggcagctgaggaactattcatcagtgatgtttcttggatgtgctggtccttcaaaatgctaatgggcagttgtacatgttacgttatatgctactgaactcagaggctataatacactttttttatgtcaacacatagaaattaagatc

SEQ ID NO: 14597 - DNA, 3736 bp, Zea Mays
cttttccgtgccgttctggcactgagcacatggccacacccacgctgccgctggcctgctcagcacactagctcacacacactccccggcctcgcccaggccgccgtcctctccatcctcggaagctccagccgccgctaccattaccagtgagttgaggtgctctggtgctgggctgactgtacccgccgctaccattaccacgcgctgcaccgtagcagagcggttccaaccccgtcgaggcaaaaagccctggccgttccctggccccgtgccgccgccgccgcctccgtgcgcccaggcttctttctgtgacttcgctaaaatgggtcatgtcctcatcatcaggaccacactttcaagtcaaaattgaagataccatcttccactattccactttcatgtcaaaactcaagatgacggacatgaggcgtcactctgtggatgtcccgctgtcaagaaccttggtgcagctcaagcgattgagatcgctgcgggatccagcgacaaactcaatgggcaagttcgcatctcctgccgaccacatggtgtgggagactgcttctagcaatggggtggctctggagctcggcaggtcggcacataatcaccaggttgaagaagacgaggacgtgggagccgagcctacaatggggtcggagcggagttttcggggaccaaacgcaaggactgcgtcctacaggagatcttctgctgtcaggatcagaggcttgaacccaccaagaaacaagcaggttcatcgtgtccgccgagacggtcaccgcaagtcagtggactctagccactcgaatcatagttctatccgtcaattggcgaacaatttggtcaacaatgtggatgcagaggaggaagtgaattcttatgaaaggccaaaatttgcaatgccaggtaaatctgacgaagacgaagtgaaaatgccaggccactccaaattcaggagcaagccttcggctgcaatgagccgtgtcgggagcccctgcatgtcagctagcgaggcaagatcagggcatggaaccgaggatacacgactgaggtcaaacgatgtcgtggggtcaaattttagtggctgtggtataagctactgctggtcaggagcgtcaaagtgccgagagctttattctgacagtgatggtccagatcagcctctcttatctacagatgggactgaggcagcgttccaaggcaacgtaccatacactgagacgcccaggtgtctaagccagaaatttcgccctcgttccttcagcgaattggttggactaaacgttgttgcccagtccctcttatattcctgctgcaaaggaaaagttgccccaatgtacctgtttcatggcccccggggcacaggcaagacatccacggcaaggattttcgccgcggctctaaattgcgtgtcccttgaagagcaaaggccatgtgggttctgcaaagagtgtgtcatccttttctctgggaagggtagagatgtgaaagagcttgacgtggcgaaaatgggtcgtttaggtcgagtgaaggcgcttctcaagagcgcatccctcgtaccctactcttcgcgcttcaaggttttcataatagatgaatgccatctcttgcaagaagacgcatggtcagcaatactgaagagccttgacgagccataccggcatacggtatacattatgatcacttctgacatagaaagcctgcctcgcgcttccatcacacgttgccagaagttccattttccgaagataaaggtggcagatattgtatacaggctggagaagatctgtataggagaaggattggaattcgaccatgatgggttgtacttcattgctgcaaagtctagtggttctcttagagattctgaagtaatgcttgaccagctcagtttgcttgggaagaagatcacaatttctcttgtgcatgaacttgtaggatcagtgtctgatgacgagttgattgagttgcttgatctagcattgtcatctgacacaaccaatactgtaagacgagcccgagaacttatggggtcagcaattgatcctctgcagcttgtttctcagctggccaaccttattatggacattctctcaggacgatgtcaatctgctgtcagtgaagtcagcaaaagtttcttgggtagatatgcattatcagaggttggaataaagaaattaagacatgcactgaagatactatcagaaactgaaaaacaattgaggacatcaaggaatcaggctacttgggttacagttgcgcttttgcagtttggcaccaatgaacctaaccttattgctgaaccgaatgatatgcattcacattcagtaactggatatacagatgactgggtttccaaggtgcactcaaacaccaatttttgtcaggcatgtaacagcagcaagtccaactgttctgagagacactgtagacggcttaagcttgagaacatatggaggagagccattggaaagtgtcgatcaagatcagccaaaagtttcctcaggaaagaaggcttcttatcatcggttcatgttaccgaagagctggctatagcagaagttggcttcggacacccagatcacctatcaagagcagagaaaatgcaaagcctaatagagtgctctttacagcacgttcttgggtgcaatgtggagatcagattcaaacttgtaccttgtccagtgagaaaagatgctaggttgaagagacactcgttcagttttctcagttgctctggccggaagcaagagctgtcagattcagtagtgactgatgaagacgaagctgtgaggcctggggcaagggagacaccgcttaaaggctacacctctagccagcaggagtcaccatataccatgcaacgtgtcgattcgaaaccaacagcctatggttgcgaggatgatggtcggagcaccttgacgtcgaacagatccatgacagatgacatgacaaggacgtgcaggtccgagactaactactcaaaggggggtgtgagtgatcagggccgctttggtagcatccaggagcctgacctacagccaagctgcttctcgcgaacactgaggcttcagaagaagctgttgtcttctggcgcagcgcacaccatctgtctgaggatccagccgcataacaagatggaattcctacctaagaaggaatttgatacgtacttctgcgcgtatgagccttacgagcagtgtccaagatcagtttcaagggctacttacagttcaagagatgatgacttgtggagcaagaattcacggttcggttcaaatctactctgctggaaagccccaaaacaacccatgtaacggagttctgccagagcccagagcactttcacaccagcaagctgctttcttacaagcgtaactgcgacaaccagcaccagcattgctgccggggaaaagtgaaccatggtagcagaacattggcatgctgaaaaacagtgtcaaatcattcagtttttgctaggacatttaccaatttctcccgaagctggaggcatgggcaccacctgtggggacaattttcaaaggaaatcccaggaggggtctttgtttttattgttcttggcaggcagctgaggaactattcatcagtgatgtttcttggatgtgctggtccttcaaaatgctaatgggcagttgtacatgttacgttatatgctactgaactcagaggctataatacactttttttatgtcaacacatagaaattaagatc

SEQ ID NO: 14598 - DNA, 3865 bp, Zea Mays
cttttccgtgccgttctggcactgagcacatggccacacccacgctgccgctggcctgctcagcacactagctcacacacactccccggcctcgcccaggccgccgtcctctccatcctcggaagctccagccgccgctaccattaccagtgagttgaggtgctctggtgctgggctgactgtacccgccgctaccattaccacgcgctgcaccgtagcagagcggttccaaccccgtcgaggcaaaaagccctggccgttccctggccccgtgccgccgccgccgcctccgtgcgcccaggcttctttctgtgacttcgctaaaatgggtcatgtcctcatcatcaggaccacactttcaagtcaaaattgaagataccatcttccactattccactttcatgtcaaaactcaagatgacggacatgaggcgtcactctgtggatgtcccgctgtcaagaaccttggtgcagctcaagcgattgagatcgctgcgggatccagcgacaaactcaatgggcaagttcgcatctcctgccgaccacatggtgtgggagactgcttctagcaatggggtggctctggagctcggcaggtcggcacataatcaccaggttgaagaagacgaggacgtgggagccgagcctacaatggggtcggagcggagttttcggggaccaaacgcaaggactgcgtcctacaggagatcttctgctgtcaggatcagaggcttgaacccaccaagaaacaagcaggttcatcgtgtccgccgagacggtcaccgcaagtcagtggactctagccactcgaatcatagttctatccgtcaattggcgaacaatttggtcaacaatgtggatgcagaggaggaagtgaattcttatgaaaggccaaaatttgcaatgccaggtaaatctgacgaagacgaagtgaaaatgccaggccactccaaattcaggagcaagccttcggctgcaatgagccgtgtcgggagcccctgcatgtcagctagcgaggcaagatcagggcatggaaccgaggatacacgactgaggtcaaacgatgtcgtggggtcaaattttagtggctgtggtataagctactgctggtcaggagcgtcaaagtgccgagagctttattctgacagtgatggtccagatcagcctctcttatctacagatgggactgaggcagcgttccaaggcaacgtaccatacactgagacgcccaggtgtctaagccagaaatttcgccctcgttccttcagcgaattggttggactaaacgttgttgcccagtccctcttatattcctgctgcaaaggaaaagttgccccaatgtacctgtttcatggcccccggggcacaggcaagacatccacggcaaggattttcgccgcggctctaaattgcgtgtcccttgaagagcaaaggccatgtgggttctgcaaagagtgtgtcatccttttctctgggaagggtagagatgtgaaagagcttgacgtggcgaaaatgggtcgtttaggtcgagtgaaggcgcttctcaagagcgcatccctcgtaccctactcttcgcgcttcaaggttttcataatagatgaatgccatctcttgcaagaagacgcatggtcagcaatactgaagagccttgacgagccataccggcatacggtatacattatgatcacttctgacatagaaagcctgcctcgcgcttccatcacacgttgccagaagttccattttccgaagataaaggtggcagatattgtatacaggctggagaagatctgtataggagaaggattggaattcgaccatgatgggttgtacttcattgctgcaaagtctagtggttctcttagagattctgaagtaatgcttgaccagctcagtttgcttgggaagaagatcacaatttctcttgtgcatgaacttgtaggatcagtgtctgatgacgagttgattgagttgcttgatctagcattgtcatctgacacaaccaatactgtaagacgagcccgagaacttatggggtcagcaattgatcctctgcagcttgtttctcagctggccaaccttattatggacattctctcaggacgatgtcaatctgctgtcagtgaagtcagcaaaagtttcttgggtagatatgcattatcagaggttggaataaagaaattaagacatgcactgaagatactatcagaaactgaaaaacaattgaggacatcaaggaatcaggctacttgggttacagttgcgcttttgcagtttggcaccaatgaacctaaccttattgctgaaccgaatgatatgcattcacattcagtaactggatatacaggtacatgtacgaattatgactgggtttccaaggtgcactcaaacaccaatttttgtcaggcatgtaacagcagcaagtccaactgttctgagagacactgtagacggcttaagcttgagaacatatggaggagagccattggaaagtgtcgatcaagatcagccaaaagtttcctcaggaaagaaggcttcttatcatcggttcatgttaccgaagagctggctatagcagaagttggcttcggacacccagatcacctatcaagagcagagaaaatgcaaagcctaatagagtgctctttacagcacgttcttgggtgcaatgtggagatcagattcaaacttgtaccttgtccagtgagaaaagatgctaggttgaagagacactcgttcagttttctcagttgctctggccggaagcaagagctgtcagattcagtagtgactgatgaagacgaagctgtgaggcctggggcaagggagacaccgcttaaaggctacacctctagccagcaggagtcaccatataccatgcaacgtgtcgattcgaaaccaacagcctatggttgcgaggatgatggtcggagcaccttgacgtcgaacagatccatgacagatgacatgacaaggacgtgcaggtccgagactaactactcaaaggggggtgtgagtgatcagggccgctttggtagcatccaggagcctgacctacagccaagctgcttctcgcgaacactgaggcttcagaagaagctgttgtcttctggcgcagcgcacaccatctgtctgaggatccagccgcataacaagatggaattcctacctaagaaggaatttgatacgtacttctgcgcgtatgagccttacgagcagtgtccaagatcagtttcaagggctacttacagttcaagagatgatgacttgtggagcaagaattcacggttcggttcaaatctactctgctggaaagccccaaaacaacccatgtaacggaggtacattactctgtattttcacatcacttggtccgtcggaatagccatgtgaattcagcgtcttggctcgctcggttgctgtttgctagtgttcatattacatgttgaccccagttctgccagagcccagagcactttcacaccagcaagctgctttcttacaagcgtaactgcgacaaccagcaccagcattgctgccggggaaaagtgaaccatggtagcagaacattggcatgctgaaaaacagtgtcaaatcattcagtttttgctaggacatttaccaatttctcccgaagctggaggcatgggcaccacctgtggggacaattttcaaaggaaatcccaggaggggtctttgtttttattgttcttggcaggcagctgaggaactattcatcagtgatgtttcttggatgtgctggtccttcaaaatgctaatgggcagttgtacatgttacgttatatgctactgaactcagaggctataatacactttttttatgtcaacacatagaaattaagatc

SEQ ID NO: 14599 - DNA, 3625 bp, Zea Mays
gcggggtccgttctgcttctgatccgtgctcttgcgatgcgaggagctgaacgacaaggattgcggccggtgctgcatctatacgagtgacttcgctaaaatgggtcatgtcctcatcatcaggaccacactttcaagtcaaaattgaagataccatcttccactattccactttcatgtcaaaactcaagatgacggacatgaggcgtcactctgtggatgtcccgctgtcaagaaccttggtgcagctcaagcgattgagatcgctgcgggatccagcgacaaactcaatgggcaagttcgcatctcctgccgaccacatggtgtgggagactgcttctagcaatggggtggctctggagctcggcaggtcggcacataatcaccaggttgaagaagacgaggacgtgggagccgagcctacaatggggtcggagcggagttttcggggaccaaacgcaaggactgcgtcctacaggagatcttctgctgtcaggatcagaggcttgaacccaccaagaaacaagcaggttcatcgtgtccgccgagacggtcaccgcaagtcagtggactctagccactcgaatcatagttctatccgtcaattggcgaacaatttggtcaacaatgtggatgcagaggaggaagtgaattcttatgaaaggccaaaatttgcaatgccaggtaaatctgacgaagacgaagtgaaaatgccaggccactccaaattcaggagcaagccttcggctgcaatgagccgtgtcgggagcccctgcatgtcagctagcgaggcaagatcagggcatggaaccgaggatacacgactgaggtcaaacgatgtcgtggggtcaaattttagtggctgtggtataagctactgctggtcaggagcgtcaaagtgccgagagctttattctgacagtgatggtccagatcagcctctcttatctacagatgggactgaggcagcgttccaaggcaacgtaccatacactgagacgcccaggtgtctaagccagaaatttcgccctcgttccttcagcgaattggttggactaaacgttgttgcccagtccctcttatattcctgctgcaaaggaaaagttgccccaatgtacctgtttcatggcccccggggcacaggcaagacatccacggcaaggattttcgccgcggctctaaattgcgtgtcccttgaagagcaaaggccatgtgggttctgcaaagagtgtgtcatccttttctctgggaagggtagagatgtgaaagagcttgacgtggcgaaaatgggtcgtttaggtcgagtgaaggcgcttctcaagagcgcatccctcgtaccctactcttcgcgcttcaaggttttcataatagatgaatgccatctcttgcaagaagacgcatggtcagcaatactgaagagccttgacgagccataccggcatacggtatacattatgatcacttctgacatagaaagcctgcctcgcgcttccatcacacgttgccagaagttccattttccgaagataaaggtggcagatattgtatacaggctggagaagatctgtataggagaaggattggaattcgaccatgatgggttgtacttcattgctgcaaagtctagtggttctcttagagattctgaagtaatgcttgaccagctcagtttgcttgggaagaagatcacaatttctcttgtgcatgaacttgtaggatcagtgtctgatgacgagttgattgagttgcttgatctagcattgtcatctgacacaaccaatactgtaagacgagcccgagaacttatggggtcagcaattgatcctctgcagcttgtttctcagctggccaaccttattatggacattctctcaggacgatgtcaatctgctgtcagtgaagtcagcaaaagtttcttgggtagatatgcattatcagaggttggaataaagaaattaagacatgcactgaagatactatcagaaactgaaaaacaattgaggacatcaaggaatcaggctacttgggttacagttgcgcttttgcagtttggcaccaatgaacctaaccttattgctgaaccgaatgatatgcattcacattcagtaactggatatacagatgactgggtttccaaggtgcactcaaacaccaatttttgtcaggcatgtaacagcagcaagtccaactgttctgagagacactgtagacggcttaagcttgagaacatatggaggagagccattggaaagtgtcgatcaagatcagccaaaagtttcctcaggaaagaaggcttcttatcatcggttcatgttaccgaagagctggctatagcagaagttggcttcggacacccagatcacctatcaagagcagagaaaatgcaaagcctaatagagtgctctttacagcacgttcttgggtgcaatgtggagatcagattcaaacttgtaccttgtccagtgagaaaagatgctaggttgaagagacactcgttcagttttctcagttgctctggccggaagcaagagctgtcagattcagtagtgactgatgaagacgaagctgtgaggcctggggcaagggagacaccgcttaaaggctacacctctagccagcaggagtcaccatataccatgcaacgtgtcgattcgaaaccaacagcctatggttgcgaggatgatggtcggagcaccttgacgtcgaacagatccatgacagatgacatgacaaggacgtgcaggtccgagactaactactcaaaggggggtgtgagtgatcagggccgctttggtagcatccaggagcctgacctacagccaagctgcttctcgcgaacactgaggcttcagaagaagctgttgtcttctggcgcagcgcacaccatctgtctgaggatccagccgcataacaagatggaattcctacctaagaaggaatttgatacgtacttctgcgcgtatgagccttacgagcagtgtccaagatcagtttcaagggctacttacagttcaagagatgatgacttgtggagcaagaattcacggttcggttcaaatctactctgctggaaagccccaaaacaacccatgtaacggaggtacattactctgtattttcacatcacttggtccgtcggaatagccatgtgaattcagcgtcttggctcgctcggttgctgtttgctagtgttcatattacatgttgaccccagttctgccagagcccagagcactttcacaccagcaagctgctttcttacaagcgtaactgcgacaaccagcaccagcattgctgccggggaaaagtgaaccatggtagcagaacattggcatgctgaaaaacagtgtcaaatcattcagtttttgctaggacatttaccaatttctcccgaagctggaggcatgggcaccacctgtggggacaattttcaaaggaaatcccaggaggggtctttgtttttattgttcttggcaggcagctgaggaactattcatcagtgatgtttcttggatgtgctggtccttcaaaatgctaatgggcagttgtacatgttacgttatatgctactgaactcagaggctataatacactttttttatgtcaacacatagaaattaagatc

SEQ ID NO: 14600 - DNA, 2642 bp, Zea Mays
gtccccgttccttgtccagcactagcgcatcgatgaaaggttctctcctctgcccagaacccagataccaaaatgggaccgagagaggctaaacagaagtgacagcagcagctatccagctcacccgagaacagtttgtttactgtgaagaactgaagacacatcacattccggctgccgtcccttcccttgcatctggctctccttgcagtcgcagcctcgtacaccgcttgtgcgagcttttactcctaccccaatctccctttgctacttttggggacctccagacctctcaaatcgagagaaccaaaaacgatagagaaagagagcctgtcagcccaagaaaaggttcctcccctccttccccacctcgccctcagccctcatcatcctctaacatccgattgtgccctgtgctctgcggttctcggatccaagatttcgccggccggccgccggcggtggctccggcctccgggagcgggagaaagactggatttttcgggccatggagatgtggcctgatccgttcaggcccgggcggtggggtggcttcctgagcaggtctgattcgtatcggttcaaatgatctcggcggcttgattggtcggttccgcttccgccgggggatcggagctagggcggtggtttcttggccggccggtggattcatcggctcgggtctggtgggatcttggtggttgctggttcagcacacgagccgcaggtctgcgtagatcccctcttcgcttccgtggcggatttgtactgctagggttttggttgggtctggtggaagatgattaagcagatccttggcaggctgccgaggaagccggggaaggctggggatagccgggaagctgctgctgcggggaatggaactgagccgtcgaattcctacagtgttgcgaggagcatggacccaggtaacaaaagggctggaaatggagattacccagttccatctggtgtaattccgaatccagtgatgaatggggctgtggtgtatcactccaatgaacccttaccggcattcaaggacgtgcccatgtcagagaagcagaatttgtttgtcaagaaggtgagcctatgttgcgctgtgtatgactttgtggatccaactaagaacctcaaggagaaggaggtgaagcgccagacacttatggagcttgttgattacgtcgcttccgctaatggcaagttctctgaggttgtcatgctggagatcacaaagatggtgtcaattaatttgttccggagctccagccccacacctcgtgagaacaaagccattgaaggggtcgatctggaggaggatgagcctctcatggatcctgcatggtctcacctacagatcgtgtacgaggttttcttgagatttgtagcttcacaggagacagatgcaaagttggccaagagatatatagaccattcctttatccttaggctgctagacctttttgactctgaggaccccagggaaagggactatctaaagacgatacttcatcgaatatatggtaaattcatggtccatcgaccattcatcaggaaagcaattaacaacatattctacaggtttatattcgaaacagagaaacataatggtgttgcagagttgttggagatcctgggcagtattatcaatgggtttgcccttccacttaaggaagagcacaaattgttccttgttcgtgcactgatccctcttcacaagccgaaatgtgtatctatgtaccatcagcagctatcgtattgcatcacacagtttgttgagaaggactgcaaacttgctgacacagttattaggggtttacttaaatattggcctgtgacgaacagttcaaaggaggtgatgttcttgggtgagttagaggaggttttagaggcaacacagcttgcagagttccaaagatgcatggttccactcttccgtcagattagccgtagcatgaacagctttcatttccagagcgggctctgtttctctggaacaatgaccatattgaaaccctaattaagcaaaactacaaggtgctgttaccgatcatctatccagcactcgagagaaactccagagatcactggaaccaagctgtccgtagcctgacactgaacgtacgcaagatcttctcagaccatgattccacattcttcggggagtgcgtccagaggttcagtgacgaggagctcaagcaggcggaatctgattcaaaacgagacgccatgtggaagcgcctggaggaaatgggtgcctcaaaacctggcgggaaccatcccttaggtgcacccaatggcaaacccagtcacgctgctggctagaatacaatagcccaccgtaccagccgcatccgtgtaactcttcggctctcgtgccaagatctcctggaacctgggttgtgattttagctttgggattctttttgcgttggtttgcccctgttgtaggtgggtccgatgtgtttggttttgtaagaactgtatgttcaaaatgtacacacggaggaatttgacagatttggcatgtgtagcaacattaatcagaattactatcatatagtccaataaacaacgtcgattttgattgcagatacgcggtttgggtggcttatatatataccgaaatgacagtgagcgtt

SEQ ID NO: 14601 - DNA, 2249 bp, Zea Mays
ctgtgaagaactgaagacacatcacattccggctgccgtcccttcccttgcatctggctctccttgcagtcgcagcctcgtacaccgcttgtgcgagcttttactcctaccccaatctccctttgctacttttggggacctccagacctctcaaatcgagagaaccaaaaacgatagagaaagagagcctgtcagcccaagaaaaggttcctcccctccttccccacctcgccctcagccctcatcatcctctaacatccgattgtgccctgtgctctgcggttctcggatccaagatttcgccggccggccgccggcggtggctccggcctccgggagcgggagaaagactggatttttcgggccatggagatgtggcctgatccgttcaggcccgggcggtggggtggcttcctgagcaggctgccgaggaagccggggaaggctggggatagccgggaagctgctgctgcggggaatggaactgagccgtcgaattcctacagtgttgcgaggagcatggacccaggtaacaaaagggctggaaatggagattacccagttccatctggtgtaattccgaatccagtgatgaatggggctgtggtgtatcactccaatgaacccttaccggcattcaaggacgtgcccatgtcagagaagcagaatttgtttgtcaagaaggtgagcctatgttgcgctgtgtatgactttgtggatccaactaagaacctcaaggagaaggaggtgaagcgccagacacttatggagcttgttgattacgtcgcttccgctaatggcaagttctctgaggttgtcatgctggagatcacaaagatggtgtcaattaatttgttccggagctccagccccacacctcgtgagaacaaagccattgaaggggtcgatctggaggaggatgagcctctcatggatcctgcatggtctcacctacagatcgtgtacgaggttttcttgagatttgtagcttcacaggagacagatgcaaagttggccaagagatatatagaccattcctttatccttaggctgctagacctttttgactctgaggaccccagggaaagggactatctaaagacgatacttcatcgaatatatggtaaattcatggtccatcgaccattcatcaggaaagcaattaacaacatattctacaggtttatattcgaaacagagaaacataatggtgttgcagagttgttggagatcctgggcagtattatcaatgggtttgcccttccacttaaggaagagcacaaattgttccttgttcgtgcactgatccctcttcacaagccgaaatgtgtatctatgtaccatcagcagctatcgtattgcatcacacagtttgttgagaaggactgcaaacttgctgacacagttattaggggtttacttaaatattggcctgtgacgaacagttcaaaggaggtgatgttcttgggtgagttagaggaggttttagaggcaacacagcttgcagagttccaaagatgcatggttccactcttccgtcagattagccgtagcatgaacagctttcatttccaggtggcagagcgggctctgtttctctggaacaatgaccatattgaaaccctaattaagcaaaactacaaggtgctgttaccgatcatctatccagcactcgagagaaactccagagatcactggaaccaagctgtccgtagcctgacactgaacgtacgcaagatcttctcagaccatgattccacattcttcggggagtgcgtccagaggttcagtgacgaggagctcaagcaggcggaatctgattcaaaacgagacgccatgtggaagcgcctggaggaaatgggtgcctcaaaacctggcgggaaccatcccttaggtgcacccaatggcaaacccagtcacgctgctggctagaatacaatagcccaccgtaccagccgcatccgtgtaactcttcggctctcgtgccaagatctcctggaacctgggttgtgattttagctttgggattctttttgcgttggtttgcccctgttgtaggtgggtccgatgtgtttggttttgtaagaactgtatgttcaaaatgtacacacggaggaatttgacagatttggcatgtgtagcaacattaatcagaattactatcatatagtccaataaacaacgtcgattttgattgcagatacgcggtttgggtggcttatatatataccgaaatgacagtgagcgtt

SEQ ID NO: 14602 - DNA, 2937 bp, Zea Mays
atggcgaggacgcgctccggaataccagatgagcgaagccactcgacggggataccacaatcccaaaaggctcgccaaaaccccctcggcggttacccttctctcccgatggcaaccgccgccgccgccgccgtggcggcacccgagcagccgcgtcgccggaagccggcgccggggcgtgggggcgtggccctccctgcgggactctcggaagaggaggccagggtgcgggccatcgccgagatcgtctcggcgatgggggagctctcgcggcgcggggaggatgtggaccttaactcgctcaagtctgccgcgtgccggagatacggtctggcgcgggcgcccaagctagtggagatgatcgccgccgtgcccgaggccgaccgtgccacgctgcttccgcggttgcgcgctaagcccgtgcgcacggcgtcgggtatcgccgtcgtcgccgtcatgtcgaagccgcaccgttgcccacacatcgccaccaccgggaacatctgtgtctactgccccggcggtcccgattccgacttcgagtacagcacgcaatcctacacgggatacgagcccaccagcatgcgtgccattcgggcaaggtataatccatatgtgcaagccaggagcaggatagatcagctcaagaggctagggcatagcgtggataaggtcgaattcatcttgatgggtgggactttcatgtccttaccagctgaatatcgtgattatttcatcagaaatcttcatgatgctttatcgggtcacacttctgcaaatgttgaggaggctatttgttattcggaacatagtgctgtcaaatgtattggtatgacgattgagacgagacctgattattgcttggggcctcatctgcgccagatgctatcttatggttgtacccgcttggaaattggtgtccagagtacatatgaggatgttgcccgtgacacaaacagaggacacacagtggctgctgttgctgattgcttctgtttggcaaaagatgctgggtttaaggtggttgcccacatgatgccagatttacctaatgttggagttgaaagagatttggaaagtttcagagaattttttggaagtccagcgttccgggctgatggtctgaagatttatccaacacttgtgattcgtggaactggtctttatgagctctggaaaactggcaggtactcctctaatctagtgtcctgctaaatcttacttacgttcttggggttatttttaaatcttaaggtaagaacttatatactaatgacaagtcaggttgggcaattggtttaaaccgattgttcgggtcggtttgttcgttgttgaaaaacttcagtttgcccaaaacaacaactgatgaaacttaatacctgtgtgggtgtcgcatgccaccgtcgtagtttaaagtgggttggtgcctgatttgatgacaaacggtgcttgctcaccatctacgctgcacttgcagcttgccgcactgcctcccagggcgctcacttcacgctgtcaccacacttgaccgcctactgctcgcctgttgtagctcaacccactcgtcaatcgtctcctcacagcatgcaggcgtcacacgtcccgcttgtcgctgctcgcctgatgccatgacgaccacgccaccgctgcagctgcagctagggatatatgagtgggctactgaggatagggagaggtgagagctgagtgggctatgcacagtctgatacggctgtatccttgggctaaggtgggccaacgagagtgaagggctagaggccatgcgtgcttgatgtattgatgagttacactcgtgaggaatgtgagggagcacttcagtttatatacagttgcttgccccccccccccccctcctctttctgtcaccgaacagcgatcttgccaggaactgaaactgtaaccgaataaaccaacagttcagtttggtttccggttaaaaaatgttcaaccgtaatgacaagggctcacaagtccaggatttacccagtaagatttctgctgcagatatagaaattatccacctgagctgttggtggatattgtggcaagaattctgtctttggtaccaccttggacacgagtgtatcgggtccagagagatattcctatgcctcttgttacttctggtgtcgagaaaggtaaccttcgcgagcttgctttggctcgaatggaagatctgggcttaaaatgccgggacgtcagaacccgtgaggcagggattcaggatatccatcacaagatccggccagatgaagtagagcttgtcagacgtgactatgctgcaaatgagggttgggaaacattcctctcttatgaggatacacgacaggatatcctgatcgggctgttgcgcttgcgtaaatgtggccgtaatgttacatgccctgaacttgtagggaggtgttcaattgtgcgtgagcttcatgtctatggaactgcagtccctgtgcatggccgtgatgtggacaaactgcagcaccagggatacggaactctattaatggaagaagcagaaaggattgctcgaaaggagcaccgatcgaagaaattagctgtcatttcgggggttggtactcgccactactaccgcaagttgggttatgagctagaagggccttacatggttaaatgtttggcgtaatgctatttcattttccgtatcatatagagcagactagtgtttgtaatgtaatatgggtagtcttttttaaaaaaaatgatcgttataccattgttttctaatattgagtagtccagaactccagatgaaaatggagacaactttctatgtatactgaacgatagctaatttgtcgcttatcctcaactttgtgccgtgcagcaactgtgatatgtagtcaggttactccttatttggtgttcaaaacccgttatccatgaatgaaggaaacaatc

SEQ ID NO: 14603 - DNA, 2071 bp, Zea Mays
aaaaatgttgccgcgtgctcgctctctccatctcaggtctcagctcagcgcatcgaatctggagtccaagcccgacccgcagcccgcagcccgtctcgcctcgcgctcgcgaaggcttcctttcctccccctttccgtccaaagtctccaagatggagtacccccaccagcaggcgggcccttcctccacgaccatcaccctcatctgtccgtacgcgactcgccgcaggaagagggccgcgggcgacgacctctcgtcggcggtggacatggatgtcgacgccgacgcgcagcgcgccacggacaagctgaaagcagtgtcagaggcacttgggcatgagatccgggttttttcaagtgagaactttgcttcacaaaccagcaagttgcctagtgcagatcatgaggaagatgacgacttttatgagcttcagcctgctgattactacaacttgatttcaaacaggatgggagagcactttaaaatgctgaagactcgcaagatgcgggaagcagaacttgctgctcagcgagcaaagagaacaaaaacagtaatgagggtgcgtttcccggatggctacatccttgaggctgactttattccatcagagaggatacatagtctagtggacctgctcttgaaagtacttgctagaccagatctgccattctatctttatacagtacctccaaagaagcgaatactggacacatcacaggacttctatacagctggttttgtccctggggctaatgttcatttttcttatgatctccctgaaggtatgcatcatcataatgactcatgccaagttaagaaataaacaacaattacctctcagctgtatgtttcaaatatatggtgtaatttaacagaggtcaattccagtgccatgcttttctcctcaccccatccgcacacgcagaaatacatgcaaatacatgaaataatttgtcactggtggtgcctatgtcaaattatttatttcgcccctgttagtctgatactatacaagagtatcatggttgtcactttgttagacatttagatactcatgagttcttgacttcttgcaatgagttgtatcaaatgttttggacctgcagtttcgttgttaaatgcagatgatctaaaagcaggaccctttctccgcgaagaaattctaagtttggatggattgtcacttctgctgaaacctgctagtcaacctgatgattctagaatgaactcttcttctcttcaatctgatgcatctcaatctgttcctgtaccaacaacaacaaataagaagcctggcagaccaaagtggctgaaaaggtgataccactccaggtgtcaagtgtgtgccatcaacacagaatcactctgttaggcttctaaacactattaatggccgaacaagctcaaatctgaacaggctacactgctgtagtacaagaattggatcctctgcttacagaagctgcaggggcattagaaatagaatcccaccttttttttctaggtgggagccaagtagcatgtaaatttgaatgtgtcgcgactcatcaagtcatcagaacagtgctccgctgtggctaagcactttgtcatcttacatttcgtgtgaaccccataggaagctagaaacggcggagataatagtccagtgctgttaacgcttcacggtgcaatgccatgcctgtcttcactattcagtcttgacaacaatatatttcagaaaactgaaagtgcccgaggtagctggaatataccaagtgagtgtggcttccaccatggcaactttattcgggtctcatacccatctctctcgatgcgattactatcacattacgtggtagtcccttggtaaaaggatctgccatatttttatctgttgaaatataagtcacacttataactccggagtttctcaactttctgacagacttcaatcgtcttttgacatgtcttgatgactttccattatccttagaactcgtcactttagcgatcactgtctgattgtcacagttcataaggatagctggtattggtttctcaaccaccggcaagtccatcaagagttca

SEQ ID NO: 14604 - DNA, 2025 bp, Zea Mays
gctcagcgcatcgaatctggagtccaagcccgacccgcagcccgcagcccgtctcgcctcgcgctcgcgaaggcttcctttcctccccctttccgtccaaagtctccaagatggagtacccccaccagcaggcgggcccttcctccacgaccatcaccctcatctgtccgtacgcgactcgccgcaggaagagggccgcgggcgacgacctctcgtcggcggtggacatggatgtcgacgccgacgcgcagcgcgccacggacaagctgaaagcagtgtcagaggcacttgggcatgagatccgggttttttcaagtgagaactttgcttcacaaaccagcaagttgcctagtgcagatcatgaggaagatgacgacttttatgagcttcagcctgctgattactacaacttgatttcaaacaggatgggagagcactttaaaatgctgaagactcgcaagatgcgggaagcagaacttgctgctcagcgagcaaagagaacaaaataatgagggtgcgtttcccggatggctacatccttgaggctgactttattccatcagagaggatacatagtctagtggacctgctcttgaaagtacttgctagaccagatctgccattctatctttatacagtacctccaaagaagcgaatactggacacatcacaggacttctatacagctggttttgtccctggggctaatgttcatttttcttatgatctccctgaaggtatgcatcatcataatgactcatgccaagttaagaaataaacaacaattacctctcagctgtatgtttcaaatatatggtgtaatttaacagaggtcaattccagtgccatgcttttctcctcaccccatccgcacacgcagaaatacatgcaaatacatgaaataatttgtcactggtggtgcctatgtcaaattatttatttcgcccctgttagtctgatactatacaagagtatcatggttgtcactttgttagacatttagatactcatgagttcttgacttcttgcaatgagttgtatcaaatgttttggacctgcagtttcgttgttaaatgcagatgatctaaaagcaggaccctttctccgcgaagaaattctaagtttggatggattgtcacttctgctgaaacctgctagtcaacctgatgattctagaatgaactcttcttctcttcaatctgatgcatctcaatctgttcctgtaccaacaacaacaaataagaagcctggcagaccaaagtggctgaaaaggtgataccactccaggtgtcaagtgtgtgccatcaacacagaatcactctgttaggcttctaaacactattaatggccgaacaagctcaaatctgaacaggctacactgctgtagtacaagaattggatcctctgcttacagaagctgcaggggcattagaaatagaatcccaccttttttttctaggtgggagccaagtagcatgtaaatttgaatgtgtcgcgactcatcaagtcatcagaacagtgctccgctgtggctaagcactttgtcatcttacatttcgtgtgaaccccataggaagctagaaacggcggagataatagtccagtgctgttaacgcttcacggtgcaatgccatgcctgtcttcactattcagtcttgacaacaatatatttcagaaaactgaaagtgcccgaggtagctggaatataccaagtgagtgtggcttccaccatggcaactttattcgggtctcatacccatctctctcgatgcgattactatcacattacgtggtagtcccttggtaaaaggatctgccatatttttatctgttgaaatataagtcacacttataactccggagtttctcaactttctgacagacttcaatcgtcttttgacatgtcttgatgactttccattatccttagaactcgtcactttagcgatcactgtctgattgtcacagttcataaggatagctggtattggtttctcaaccaccggcaagtccatcaagagttca

SEQ ID NO: 14605 - DNA, 1672 bp, Zea Mays
gctcagcgcatcgaatctggagtccaagcccgacccgcagcccgcagcccgtctcgcctcgcgctcgcgaaggcttcctttcctccccctttccgtccaaagtctccaagatggagtacccccaccagcaggcgggcccttcctccacgaccatcaccctcatctgtccgtacgcgactcgccgcaggaagagggccgcgggcgacgacctctcgtcggcggtggacatggatgtcgacgccgacgcgcagcgcgccacggacaagctgaaagcagtgtcagaggcacttgggcatgagatccgggttttttcaagtgagaactttgcttcacaaaccagcaagttgcctagtgcagatcatgaggaagatgacgacttttatgagcttcagcctgctgattactacaacttgatttcaaacaggatgggagagcactttaaaatgctgaagactcgcaagatgcgggaagcagaacttgctgctcagcgagcaaagagaacaaaaacagtaatgagggtgcgtttcccggatggctacatccttgaggctgactttattccatcagagaggatacatagtctagtggacctgctcttgaaagtacttgctagaccagatctgccattctatctttatacagtacctccaaagaagcgaatactggacacatcacaggacttctatacagctggttttgtccctggggctaatgttcatttttcttatgatctccctgaaggaccctttctccgcgaagaaattctaagtttggatggattgtcacttctgctgaaacctgctagtcaacctgatgattctagaatgaactcttcttctcttcaatctgatgcatctcaatctgttcctgtaccaacaacaacaaataagaagcctggcagaccaaagtggctgaaaaggtgataccactccaggtgtcaagtgtgtgccatcaacacagaatcactctgttaggcttctaaacactattaatggccgaacaagctcaaatctgaacaggctacactgctgtagtacaagaattggatcctctgcttacagaagctgcaggggcattagaaatagaatcccaccttttttttctaggtgggagccaagtagcatgtaaatttgaatgtgtcgcgactcatcaagtcatcagaacagtgctccgctgtggctaagcactttgtcatcttacatttcgtgtgaaccccataggaagctagaaacggcggagataatagtccagtgctgttaacgcttcacggtgcaatgccatgcctgtcttcactattcagtcttgacaacaatatatttcagaaaactgaaagtgcccgaggtagctggaatataccaagtgagtgtggcttccaccatggcaactttattcgggtctcatacccatctctctcgatgcgattactatcacattacgtggtagtcccttggtaaaaggatctgccatatttttatctgttgaaatataagtcacacttataactccggagtttctcaactttctgacagacttcaatcgtcttttgacatgtcttgatgactttccattatccttagaactcgtcactttagcgatcactgtctgattgtcacagttcataaggatagctggtattggtttctcaaccaccggcaagtccatcaagagttca

SEQ ID NO: 14606 - DNA, 1515 bp, Zea Mays
cttgggcagggttcttggataatttcgggttcgcgccggccctagggtccggagttccgaatttgtgtgtgacaagctgaaagcagtgtcagaggcacttgggcatgagatccgggttttttcaagtgagaactttgcttcacaaaccagcaagttgcctagtgcagatcatgaggaagatgacgacttttatgagcttcagcctgctgattactacaacttgatttcaaacaggatgggagagcactttaaaatgctgaagactcgcaagatgcgggaagcagaacttgctgctcagcgagcaaagagaacaaaaacagtaatgagggtgcgtttcccggatggctacatccttgaggctgactttattccatcagagaggatacatagtctagtggacctgctcttgaaagtacttgctagaccagatctgccattctatctttatacagtacctccaaagaagcgaatactggacacatcacaggacttctatacagctggttttgtccctggggctaatgttcatttttcttatgatctccctgaagtttcgttgttaaatgcagatgatctaaaagcaggaccctttctccgcgaagaaattctaagtttggatggattgtcacttctgctgaaacctgctagtcaacctgatgattctagaatgaactcttcttctcttcaatctgatgcatctcaatctgttcctgtaccaacaacaacaaataagaagcctggcagaccaaagtggctgaaaaggtgataccactccaggtgtcaagtgtgtgccatcaacacagaatcactctgttaggcttctaaacactattaatggccgaacaagctcaaatctgaacaggctacactgctgtagtacaagaattggatcctctgcttacagaagctgcaggggcattagaaatagaatcccaccttttttttctaggtgggagccaagtagcatgtaaatttgaatgtgtcgcgactcatcaagtcatcagaacagtgctccgctgtggctaagcactttgtcatcttacatttcgtgtgaaccccataggaagctagaaacggcggagataatagtccagtgctgttaacgcttcacggtgcaatgccatgcctgtcttcactattcagtcttgacaacaatatatttcagaaaactgaaagtgcccgaggtagctggaatataccaagtgagtgtggcttccaccatggcaactttattcgggtctcatacccatctctctcgatgcgattactatcacattacgtggtagtcccttggtaaaaggatctgccatatttttatctgttgaaatataagtcacacttataactccggagtttctcaactttctgacagacttcaatcgtcttttgacatgtcttgatgactttccattatccttagaactcgtcactttagcgatcactgtctgattgtcacagttcataaggatagctggtattggtttctcaaccaccggcaagtccatcaagagttca

SEQ ID NO: 14607 - DNA, 1627 bp, Zea Mays
gaaactttttgtttcattgtcatctgtattgcatcaaaatagattgggaaaaatagcatatatgatggttgacctcgaattgaaacttgactaattttcctgacaagcaacaagctttgaactcggaaaatgcttagatacgcatacagaaattttgaggcgggaaaaatagttcgtcgttattgatttgttcttatctgtttggaacatcatagcatttacatgcttgttgggaggttgtagaggtttgcatgcttttgttgacttcctagagtttgcttctctgtagtggacatcattgcttgagaggtgggatctctttagctagttctctttgcccaaatattttcttgtcccaagcaatgtcttcttgctgaaatggggtaaggtataaacccttgctggcaatattctacccctgcttcgttcaagaagtgaagcaagttcttcatataaatgaagcatactatttgtgatgcactgcgcattctgggggcattgctgcagattccaacggcctattcttcaatttctcgcgtgcgtttagccccggctgcattcttgccagcaagatacaactttgaaggctatatcccccgtagctgctccagttcgcttcagatctatagccggtcatcgatgttaaatctaccaccatcttcagctctcacggtgtcctcccagctcacctcctctgacgtagcccagcgttcagaggaatggttcgctcttcgcaaggacaagctcaccacaagcaccttcagtaccgccttgggtttctgggctggcaacagaagggcagagctgtggaacgagaaagtttttggcgcgacagagaccaagctggcggacaccgctaggtctgccatggactggggcacgcatcatgagagcgtagccatagagcagtacacgaacatcacaggaagacacgtgggcaccttcggcttcgcggtgcacgccgaggccagctccggatggctcggagcctcgcccgatggagtcctcgggtgcgggctggacggcgggatcctggaagtcaagtgccccttcaacaagggcaagcccgagctcgcgctgccctggcgcgccatgccctactactacatgccgcaggtgcagggcctgatggagatcatgggcagggactgggcggagctctactgctggacgcccagcgggagcagcctgttccgcgtgccgcgggaccgcgcgtactgggagctcctgcacgaggcgctgcgcgacttctggtggggcgacgtggtgcccgcgcgggagctggcgctcctggggaagcacgacgaggcgaggtccttcgagcctcggcccaagcaccggctcacgaacctggtgctgtacaggagcaggaagctggcctccgaggccaagctgctgtggatggatgttggcggccgtgtagagttctttcagtgagacgttctgccggtggttgtactgtgcactgtgttgtgactattctttgaattaactcattgccttccgagtgtcctgttcttttttttgttctgttttttacgagcgtatgatcttccactcacgtcttgtgatcgttttgtgtgtgcatcggatttgatgtatttccattcgctgaaactgtgaaatc

SEQ ID NO: 14608 - DNA, 2124 bp, Zea Mays
gcctgttccaacttccaagtcccctcaacgcagacgcagaacatgaccacaccacagttcgcctccctctcacaggtcacaggctcacagcacactgccactccgaaaccccaagcgccaccaggaccaggcagcctcctccgtcctatctcctccccgcgccgccgcggccatgctcctctccgggcctccgccggtgcccaccccgccgctcctcctcccggagagcagtggcgaggacggcggccacgattcctcctcccgcgccgcggcagcggtgggatcggcgccaaagaggcgcgcagagacatgggtccgtgaggagaccctttgcctcatcgcgctgcgccgggaaatggacgcccacttcaacacctccaagtccaacaagcacctatgggaggccatctccgcccggatgcgggaccaagggttcgaccgctccccgaccatgtgcaccgacaagtggcgcaacctgctcaaggagttcaagaaggcgcgcagccactctcggaacagcggcggcggctctggctctggagggaacggcaacgccaagatggcgtactacaaggagatcgacgacctgctcaagcgccgcggaaaggctacgggaagcggcaccgccggctgcgttggcagtagtgccgggaagagccccaaatcaaattgcaagattgattcctacctgcagttcaccacagataacggctttgaggacgctaacattccctttggtcctgtggaaggcatcagcttcccttgacggctgctgatgcagttgcaaccaatggtgtgaacccgtggaattggagagacacctctactgatggtggagataaccgtggcaattttggtgggagagtcattttagtgaagtggggtgattacactaaaaggattggaattgatggtactcctgaagcaattaaggaagccatcaaatcggcatttggactaagaacaaggcgcgctttctggcttgaagatgaagatgaggttgttcgaaccttggacagagacatgccagttggaacatacacacttaatcttgatgatgggatgacaatcaaactctgtgatgcaagccgcatgcagacgccagaagacaagacattttacactgaagaggactttcgagatttcctgtctcggcgtggctggacatttctcagggagtatggaggctatagaaacgttgatagccttgatgatctccggcctggtgtgatgtatcaggggctgcggtcgcttggtgactgattttgcaacatctactttggccagacatgtcgaagtggaattgctagcagtgccatttagtgtaaatttaagtaaggccatccagattccagatatatgagcggtcctctcgcatttgtggagcaaaacttgcctccacttatcttttcttcagttcacactcatgtcggagccgcctctgtgactagtatgcaggttcaggcttatgtaaaatgtagccgcgtgcaattggagtgtgcagctaatgatcctccagataactagcttgttctaccattccttgtaaaaatgtggaatgatcctccagctaatgtaaaatgtggcaagtgaagcaaatgtaccctgcaatattgtacttgtaaaaatgtgcaattggagcttgttctaccattccttgcagtaaatctgaatgtggcaagtgaagcaaatgtactcttgcaacactgtacttgtttactcaatttccactttgtgtccagggcattgacattcaagtcggcaagatagttgttatcagctgcagctgttcgaactgctgcagctgcaatctactgcaatatataatctactgcaatatatagagacaaaatactgtagcattcgcagccagatcttaaaggcgctgactcatgttatattaaaaccggcatttcaatctcgaaattctaaatggtaggagcgtctcacacttttcttccccccaaagtagcagtatactattagtgcagtacacgatagacgtgaatgaacgattcacacagccttcacgccaagctctagcagcagcagggtaacttttggtgcaaactctactcctcctcgtcccactcgtccttcttgtacgacaccagcgtgtccacc

SEQ ID NO: 14609 - DNA, 4276 bp, Zea Mays
atggggaatctttgctggagcacaaatagagaaagatggcgacgtacggccccgtccccctccgtccccgcctgcagcgacctcccggctgccgtatcctccttcgccgacgcgttcgtggactttgccgtgtccgacatcttcttcccgaccttcccctcctcctcctcgctccctcctcgcccgaagactccaaccaccttcctcccttccccatcccggctcgtcgccatcggagacctccacggggacctgcccaagtccctctccgtgctccgcctcgccggccttgtgcccccgtcttgcaccccgactccccctccgcctccggcctcctcatggcccgcggggcccaccctcgccgtccagctcggcgacatcctcaaccgcagcgacgacgagctccgcctcctatacctactccaccgcctctccctctctgccgagacacgcggaggcgcgttcctccccatcctcggcaaccacgaggtcatgaacgtctccggcgacttccgcttcgccacgccgcagggtttccacgacagggcggtgtgtgggggggtgctggcgtgcgcgggattcgcggcgtgggctgctgaggcgggcgtcgcgggagcggcgggttgctggcgcacgggcgttgcaggagcgggagcagtctacactgcctccttaatagttagtagagattgtttaaaattaaactctacgctaggactgtggacgtgtttttgccccatccgatctaaacctaatccattgccatcctatattgatataggatcatgggcaggtttagttaatccacggcgaagaaaaaaatacatgctgccaagtgccaactggcaagaaatgaagaaactgtcctctggcaagaaaagcgggaaaggcgatgggctgggccggccaggagagtcgctcgattcgcaggccaggcagatcgcggtcagatccccactgccttggcgggaagcctatcaatcctcaccccaaatcccccgctactccccgctccggctccgttcacgactacggcgacgagcaccaccctcacccccagccccacaccgcgccacgccgatgtactcccaactcgtcgacggggactccgactccgagggatccctgatctccgacatctccgcctccccgccccgcggccgttcgccctcgcccccgcccccgcccccgccgccgcccgaacaccgtcccaaccccaagcacaccgccaccgtgaaacctaagcctcccaagtccaaggcgaagcccaagcttgcagcatccgcctgcaccgccgctgtttcgccgcctcccctcccctccgccgcgctctccgacccgcacggtctcgtctcgcgcatcgccgctgctcccgcgcttgtcaccgccaccagcaccgtctcttcctcctccttccgccgtctcgtccagtcgcgcaacccctccttcgatcccgccgccgctttcagcgctccgacacccgcacccactctggcgcccaccgagatagcaaccgcagcgacagcgcagtgccctgcgccggacgcgccgccgcagaccaggcccaagcgggtgcatcccaactcggtgtcggaggtggtcccgcccgcggcggaggcagagcaaccgaagcggccgagagggggtgccgaaggaaactttgtgcggctcaacatcaatggctacggtcggaggaggacgttcaggaacgcgcaggccaggcgccctacgaaataccgctcctggcggcggcagcgacatggcggcgcaaagcctcaaggccgtggtgacgaagaaggggattttgtggctgaagctatgatagagcgggagaagaagagggcaggaggagatggtggtgtcctcgaggccgtcgaagcagcgcgagaggacccgtctgagcagaatcttgagaatttgctcagaattatctatgggtacaactctttccgcgaggggcagcttgaggcaattcagaaggttgttgcaggagagtcaactatgcttgtgctccctactggtgcgggcaagtcactatgctatcaggtacctgctatgattttgcctggactaacactggtggtaagcccgctactctccttaatggtggatcaactgatgaagctacctgcatttttgccaggtggctttcttgcaagcaatcagacaagcgatgagtttcatgagacattacaaaggttgcgtggaggggaaataaaggtgctttttgtttcccctgaaagattcttgaatgaagaatttctgctaatatttagggacgggctacaaatatccctagttgctattgatgaagctcactgcatttctgaatggtctcataattttagaccttcatatctaaggctccgtgcatcactacttcgaagaaaacttaatgttcaatctattcttgcaatgactgcaactgcgacaactcaaaccttggaggagatagtgactgtcttagaaataccatctgataacctcattaaaacatctcaaataagggacaatctgcagctgtttatcagcatgagcaataacagactgaaggatctattgctgttgttgaaggcttcaccttttgttgacatgaagagtataattgtctattgcaagtttcagggagaaactgactatgtttcaaagtacttatgtgataacaacattactgctaagagctaccacagtggacttcttatgaagaacaggaatcgtgtacaggagcttttctgctctaacaaaataagagtggttgttgcaacagtggcattcggaatgggtcttgataagagtgacgttgaaggggtgattcactatagcttgccagaaagcttagaagaatacatacaggaaactggccgtgctggaagggatggacgactgtcatattgtcatctatttcttgattcaacaacattctataaaagtcgtagtcttttgcacagtgacggtgttgacgaatatgctatgagcaaatttcttttccaggtattttcatgtgaaaattcagtggggtgcatttgctccttggttaaagagtcgacttcgcgcaagttcgatataaaagaggaggtgctcttcacagtcctaacacagctagaaattggtggtcagcaatatctccgtttacttcctcagttcagtgttacctgcaccctgtactttcacaagacgtcaccacagctgcttgcagacaaggatgtactagttagatcagttctggataagtaaacattatctgcttttgcaccccccccccccctgatgcagtactgagattctgattctccattttttgaattacaggtcagagactaagggtggacattttgtcttcgacatgacaaaggtagctaatgatctgagcatcacagtgaatgaagtatttgaccatttgcaacagctaaagatatcacaagatggctttctgaagtagaaaactcgaagatcagtaaattggatgcgatgtttgatctagcaaactttgctgtcaagggttgccaaaggactgatggctgttctggctcccagcacactccgtgcattcaaaagaagatcatacagtactttagtaagaactactccacctcagacagtggccaatgtactcagccacaaaggggcagcccattcttgcaagctgacataaaggtgttccttaaaagcaattcgtttgcgaaattcacgccaagggccgttgctaggattatgcatggcatatcaagcccggcttttccatctgccacctggtccaagaaccacttctggggccgctatttggaggttgatttcccagtggtcatggaagctgccaaggccgagctggtcaaactcgtgggaaaaggagagtagcagtgtagtacttaccggcacggcaataggaacagttgctttcactcggtacgtgtcctgtgccgagtagaatgcttgcaagccgcaaccgcaatcgatgatagagagctgctacatgttcgtgccttcttcccagcttgtccgcagttggtccaccacaagcattctaaatggttacacatctgcttggcatcacctcctcacttcatacagatggcggtatttattcaagcgatgctgatgcggccagccaagctggtgttagcacctagaagggaatatcggagagaagagaggtagaagaagggttgaagaagaagataacagcgaggaagacgatctgatttgatatctgatagccaaaatggttcatgaccccttacagccagggtttgggtgttacttgtaaccacacgaccac

SEQ ID NO: 14610 - DNA, 4192 bp, Zea Mays
atggggaatctttgctggagcacaaatagagaaagatggcgacgtacggccccgtccccctccgtccccgcctgcagcgacctcccggctgccgtatcctccttcgccgacgcgttcgtggactttgccgtgtccgacatcttcttcccgaccttcccctcctcctcctcgctccctcctcgcccgaagactccaaccaccttcctcccttccccatcccggctcgtcgccatcggagacctccacggggacctgcccaagtccctctccgtgctccgcctcgccggccttgtgcccccgtcttgcaccccgactccccctccgcctccggcctcctcatggcccgcggggcccaccctcgccgtccagctcggcgacatcctcaaccgcagcgacgacgagctccgcctcctatacctactccaccgcctctccctctctgccgagacacgcggaggcgcgttcctccccatcctcggcaaccacgaggtcatgaacgtctccggcgacttccgcttcgccacgccgcagggtttccacgacagggcggtgtgtgggggggtgctggcgtgcgcgggattcgcggcgtgggctgctgaggcgggcgtcgcgggagcggcgggttgctggcgcacgggcgttgcaggagcgggagcagtctacactgcctccttaatagttagtagagattgtttaaaattaaactctacgctaggactgtggacgtgtttttgccccatccgatctaaacctaatccattgccatcctatattgatataggatcatgggcaggtttagttaatccacggcgaagaaaaaaatacatgctgccaagtgccaactggcaagaaatgaagaaactgtcctctggcaagaaaagcgggaaaggcgatgggctgggccggccaggagagtcgctcgattcgcaggccaggcagatcgcggtcagatccccactgccttggcgggaagcctatcaatcctcaccccaaatcccccgctactccccgctccggctccgttcacgactacggcgacgagcaccaccctcacccccagccccacaccgcgccacgccgatgtactcccaactcgtcgacggggactccgactccgagggatccctgatctccgacatctccgcctccccgccccgcggccgttcgccctcgcccccgcccccgcccccgccgccgcccgaacaccgtcccaaccccaagcacaccgccaccgtgaaacctaagcctcccaagtccaaggcgaagcccaagcttgcagcatccgcctgcaccgccgctgtttcgccgcctcccctcccctccgccgcgctctccgacccgcacggtctcgtctcgcgcatcgccgctgctcccgcgcttgtcaccgccaccagcaccgtctcttcctcctccttccgccgtctcgtccagtcgcgcaacccctccttcgatcccgccgccgctttcagcgctccgacacccgcacccactctggcgcccaccgagatagcaaccgcagcgacagcgcagtgccctgcgccggacgcgccgccgcagaccaggcccaagcgggtgcatcccaactcggtgtcggaggtggtcccgcccgcggcggaggcagagcaaccgaagcggccgagagggggtgccgaaggaaactttgtgcggctcaacatcaatggctacggtcggaggaggacgttcaggaacgcgcaggccaggcgccctacgaaataccgctcctggcggcggcagcgacatggcggcgcaaagcctcaaggccgtggtgacgaagaaggggattttgtggctgaagctatgatagagcgggagaagaagagggcaggaggagatggtggtgtcctcgaggccgtcgaagcagcgcgagaggacccgtctgagcagaatcttgagaatttgctcagaattatctatgggtacaactctttccgcgaggggcagcttgaggcaattcagaaggttgttgcaggagagtcaactatgcttgtgctccctactggtgcgggcaagtcactatgctatcaggtacctgctatgattttgcctggactaacactggtggtaagcccgctactctccttaatggtggatcaactgatgaagctacctgcatttttgccaggtggctttcttgcaagcaatcagacaagcgatgagtttcatgagacattacaaaggttgcgtggaggggaaataaaggtgctttttgtttcccctgaaagattcttgaatgaagaatttctgctaatatttagggacgggctacaaatatccctagttgctattgatgaagctcactgcatttctgaatggtctcataattttagaccttcatatctaaggctccgtgcatcactacttcgaagaaaacttaatgttcaatctattcttgcaatgactgcaactgcgacaactcaaaccttggaggagatagtgactgtcttagaaataccatctgataacctcattaaaacatctcaaataagggacaatctgcagctgtttatcagcatgagcaataacagactgaaggatctattgctgttgttgaaggcttcaccttttgttgacatgaagagtataattgtctattgcaagtttcagggagaaactgactatgtttcaaagtacttatgtgataacaacattactgctaagagctaccacagtggacttcttatgaagaacaggaatcgtgtacaggagcttttctgctctaacaaaataagagtggttgttgcaacagtggcattcggaatgggtcttgataagagtgacgttgaaggggtgattcactatagcttgccagaaagcttagaagaatacatacaggaaactggccgtgctggaagggatggacgactgtcatattgtcatctatttcttgattcaacaacattctataaaagtcgtagtcttttgcacagtgacggtgttgacgaatatgctatgagcaaatttcttttccaggtattttcatgtgaaaattcagtggggtgcatttgctccttggttaaagagtcgacttcgcgcaagttcgatataaaagaggaggtgctcttcacagtcctaacacagctagaaattggtggtcagcaatatctccgtttacttcctcagttcagtgttacctgcaccctgtactttcacaagacgtcaccacagctgcttgcagacaaggatgtactagttagatcagttctggataagtcagagactaagggtggacattttgtcttcgacatgacaaaggtagctaatgatctgagcatcacagtgaatgaagtatttgaccatttgcaacagctaaagttctctggagaaatttcatttgaattaaaagatccagcctgcatttacgtgatcttaaagaagccagatgacttgaatgcgctttcagcagatatcacaagatggctttctgaagtagaaaactcgaagatcagtaaattggatgcgatgtttgatctagcaaactttgctgtcaagggttgccaaaggactgatggctgttctggctcccagcacactccgtgcattcaaaagaagatcatacagtactttagtaagaactactccacctcagacagtggccaatgtactcagccacaaaggggcagcccattcttgcaagctgacataaaggtgttccttaaaagcaattcgtttgcgaaattcacgccaagggccgttgctaggattatgcatggcatatcaagcccggcttttccatctgccacctggtccaagaaccacttctggggccgctatttggaggttgatttcccagtggtcatggaagctgccaaggccgagctggtcaaactcgtgggaaaaggagagtagcagtgtagtacttaccggcacggcaataggaacagttgctttcactcggtacgtgtcctgtgccgagtagaatgcttgcaagccgcaaccgcaatcgatgatagagagctgctacatatggcggtatttattcaagcgatgctgatgcggccagccaagctggtgttagcacctagaagggaatatcggagagaagagaggtagaagaagggttgaagaagaagataacagcgaggaagacgatctgatttgatatctgatagccaaaatggttcatgaccccttacagccagggtttgggtgttacttgtaaccacacgaccac

SEQ ID NO: 14611 - DNA, 1009 bp, Zea Mays
gggcaatcgaaattactctattcttccttggttttatttttttagcatttaccttgatattattggaagattatatcactgtattattagttattggtcttcctgtaatctgagaacatatttgtgctgtccgaattaggtatgaagtgcattggaaccagagttgttctcactccttagggctgtactatctaagacctatattctgcttctattgggaatgctaaaacaaatatcccagcatgtcagagcctcagagggttgcaccagcttggttgtgtcaattggtacaaagatggccggtgggatgccagacagtttatagcttctggagggatgccatcatcccactcagctacagtgacagcactcgcagtggctgtggcgatacaagaaggctttcatagtgcaacctttgcaactgcactagtctttgcatgcgtggttatgcatgatgcttttggagttcggttacatgccggaaagcaggcagaggtgctgaatcaaattgtctatgagctaccagaagaacacccattatcagagacaaagccattgcgtgaaatccttggacatactgttcctcaggttgtggccggttgcatccttggagttctcatggctgccgttatgcacctgtctctcgggagttcttagtcaactgttgttcatggatgtcatgacagatgatcacctaatgtctcgctggtgatggctataaagcatgaagcatgatctccgcatggatctggttgtccaagtgtttggtagtacgaagttctaaccgatttagttctggacagtaggatataggttgtgtagcttgaatcggttactgtaaatctgaaaggttttgctttcaactccaactaccaatcacggtgtaatggaagctttgttatacaatcaacagcagtaaattcattctgaggtaacgatcggtatagttgatatatcatgccatcacatttgcttcccgttccaaattgtaagtggttctgactttttt

SEQ ID NO: 14612 - DNA, 630 bp, Zea Mays
gtttgtattgcttgtatttggtcacattctgtttttgttagttacaaagaatagctataggtatggttatgcatgatgcttttggagttcggttacatgccggaaagcaggcagaggtgctgaatcaaattgtctatgagctaccagaagaacacccattatcagagacaaagccattgcgtgaaatccttggacatactgttcctcaggttgtggccggttgcatccttggagttctcatggctgccgttatgcacctgtctctcgggagttcttagtcaactgttgttcatggatgtcatgacagatgatcacctaatgtctcgctggtgatggctataaagcatgaagcatgatctccgcatggatctggttgtccaagtgtttggtagtacgaagttctaaccgatttagttctggacagtaggatataggttgtgtagcttgaatcggttactgtaaatctgaaaggttttgctttcaactccaactaccaatcacggtgtaatggaagctttgttatacaatcaacagcagtaaattcattctgaggtaacgatcggtatagttgatatatcatgccatcacatttgcttcccgttccaaattgtaagtggttctgactttttt

SEQ ID NO: 14613 - DNA, 739 bp, Zea Mays
ttggtcacattctgtttttgttagttacaaagaatagctataggtatggttatgcatgatgcttttggagttcggttacatgccggaaagcaggcagaggtgctgaatcaaattgtctatgagctaccagaagaacacccattatcagagacaaagccattgcgtgaaatccttggacatactgttcctcaggttgaattaaatgctttgaattacctcccttgatgttttaactattctgtggccttgccggttaggaaagacagtcaatattcaaataagatgaagtcattgggatatagggccgttccttttcaggttgtggccggttgcatccttggagttctcatggctgccgttatgcacctgtctctcgggagttcttagtcaactgttgttcatggatgtcatgacagatgatcacctaatgtctcgctggtgatggctataaagcatgaagcatgatctccgcatggatctggttgtccaagtgtttggtagtacgaagttctaaccgatttagttctggacagtaggatataggttgtgtagcttgaatcggttactgtaaatctgaaaggttttgctttcaactccaactaccaatcacggtgtaatggaagctttgttatacaatcaacagcagtaaattcattctgaggtaacgatcggtatagttgatatatcatgccatcacatttgcttcccgttccaaattgtaagtggttctgactttttt

SEQ ID NO: 14614 - DNA, 474 bp, Zea Mays
tggttatgcatgatgcttttggagttcggttacatgccggaaagcaggcagaggttgtggccggttgcatccttggagttctcatggctgccgttatgcacctgtctctcgggagttcttagtcaactgttgttcatggatgtcatgacagatgatcacctaatgtctcgctggtgatggctataaagcatgaagcatgatctccgcatggatctggttgtccaagtgtttggtagtacgaagttctaaccgatttagttctggacagtaggatataggttgtgtagcttgaatcggttactgtaaatctgaaaggttttgctttcaactccaactaccaatcacggtgtaatggaagctttgttatacaatcaacagcagtaaattcattctgaggtaacgatcggtatagttgatatatcatgccatcacatttgcttcccgttccaaattgtaagtggttctgactttttt

SEQ ID NO: 14615 - DNA, 951 bp, Zea Mays
ctgtaacaattttctcctcgtagctgtgccaccgtcacttcgattcgctactactcgccgcgccgttccgccgtcaatgccaccgacgcgcttcactccagtctcgctctgcgtccaccttctccagtcctagtcgcccgccgatggtgcggccggcggcgaagcacttggtggcgctcgccgtcgtcgccattctcggcatcggcctcgtcgctgactacctctgggcttcgtccttctccgcatcgtacgccagctccgccgctctgacgccgcccgtcgcgaagaagggcttgtgttgctgcaaatgataaacttcttgttatcggtggtcaagaaggtgatttcatggcgaagcctgggtctcctatatttaaatgtgtcagaagaagtgaggttgtgtatagtaatgtttatatgcttgatgatggaacgacttggaaggaacttccacctatgccaaaaccagattcacatataaaaagaactgatatgactaagccgttctttgtgtttttttttttgcgtacaactgtttcaatccccccgtgagttctttcttggttaggctatctctagcagctctcctatcgcaccatttcgtgtagagaatcgatggctgtcctgggggatgtgactgtcgcaatcttgtaagctgtagcctcttctttattgagctctttcactcgtctgtagtgggtagtgaatcgattagatacattctaaaatgaacttcaacttgagccattcttatgcatggttgacttgggctctcttcactttcgtatcacatgctttctgtgagtgatgaaagtatctcccctgattcctagtactttatgcccgtgttaatatatcataaagtagctggatgattggcttgtcatgcgaccagatgtgctggaaagggttgcggtgcttgcgttctgacgtgagatgctgggcctggtg

SEQ ID NO: 14616 - DNA, 1400 bp, Zea Mays
attttctcctcgtagctgtgccaccgtcacttcgattcgctactactcgccgcgccgttccgccgtcaatgccaccgacgcgcttcactccagtctcgctctgcgtccaccttctccagtcctagtcgcccgccgatggtgcggccggcggcgaagcacttggtggcgctcgccgtcgtcgccattctcggcatcggcctcgtcgctgactacctctgggcttcgtccttctccgcatcgtacgccagctccgccgctctgacgccgcccgtcgcgaagaagggcttgtgttgctgcaaatgataaacttcttgttatcggtggtcaagaaggtgatttcatggcgaagcctgggtctcctatatttaaatgtgtcagaagaagtgaggtatgttgacatgcacctcattcttatagctaattgatgcacattatgtggtccctatgttttaagatcaactgagatcaattccccgcattaaagacaacttagccatatgttgtgcatgattaagtctagtaaataagcatctaagcaccacacacgctgcgcctactttcttcaataaataatggcggacctaatttcaccagaaagtggattgggcactgtatttttcaaagaaaacaaacaactgataaagacatttagttttatttaactatgaagctatcatatatcacatatattcaaacattggcataattgatgtttttgagttgagaccagaatcaatccgaaagtactagtagtttcactattttcttagtaaccttactatttgcactatttatttatctttgttattaccctcttttttaaaaattacactctgcttgtgaaggttgtgtatagtaatgtttatatgcttgatgatggaacgacttggaaggaacttccacctatgccaaaaccagattcacatataaaaagaactgatatgactaagccgttctttgtgtttttttttttgcgtacaactgtttcaatccccccgtgagttctttcttggttaggctatctctagcagctctcctatcgcaccatttcgtgtagagaatcgatggctgtcctgggggatgtgactgtcgcaatcttgtaagctgtagcctcttctttattgagctctttcactcgtctgtagtgggtagtgaatcgattagatacattctaaaatgaacttcaacttgagccattcttatgcatggttgacttgggctctcttcactttcgtatcacatgctttctgtgagtgatgaaagtatctcccctgattcctagtactttatgcccgtgttaatatatcataaagtagctggatgattggcttgtcatgcgaccagatgtgctggaaagggttgcggtgcttgcgttctgacgtgagatgctgggcctggtg

SEQ ID NO: 14617 - DNA, 1620 bp, Zea Mays
cgctacgcaatgcttccagacccctccggacttcggccgctagcgccctcttcgttgcgcgatggagctccgaggctccaccccccaccaatgatgcgtccagacgcctagatgagcaccatccccttcccctccacccatcctcagaagatgtcatgctgacggcttcgacgtggtctccagtagatccgagcggagcgccttcccgtctacccctcaaacattgtcgcagtgcctgggccgtcgcgaggagcccccaaacacaatctcctccttagacgtcgccggtctcctcgctccctcctcaaacgtcgtcgtgctaccgacactgtctgtggcggctccaaccggagcaccatcccacctcctccgtcaaacgacgctgcggtgtttgggccaccgtcgggagtctgaatctgccccctcagacatcgccacctcgaaacgcacaggttggcgcggtagggggcactggtggttcggcgcggtcacctggcgaacgacgacgaagaggaggaggtggccgagtctatcatgaagagacgctgtgaagagcagtcgccatggccgatggatcagttgccggttgcattcatcgaagatttggccctctccaccaccatgtcgctaccccatacccgtcttccctgcatatctgaatgatgcaccttcaatccaccgctgcccaaagagcgaatggggaaggaccgacctgagcattctgtccggtagctgggtagcaagaagcaccagcccttccccctcccaaggtggttgtttgcaagattgaagagtcgtagcagccaccggtgctagcaaaatatgcagtattactaaaatcagaccaatcgtcaggtggttgtcatattatactttttattatattaaaatcggaacagggcttcatttaatcccagatttaacactgctaccatttattactaatgttccgtgcgcgcgcaagacgcgcctaagttactagtatatattatagtcaagcaaatataccttctcttaaaaaataagcaaataacaacaataataagctatgaagtattagaattatacatgtgaatatgtgatgtatatgtggtgcacagtctgttatttggtcactttacttttaattcatggatccaaacagactttaattttaaaaaaatacacttcacgatatgctagtcgtcagtcgaccccctagtttcggacctagaaaacgaggaagcaactgatgtacgaaattaacaaaagaagaaatatagagcacaatcgatttttatatcatatatatagaacaatgctatatagaagtgggttatatatcagccacctgtttatgaaatttagaactgttccaaaaccaacattttgctctagcactaaataaagcacctgacaaaaactacagtgatttaacaccaaagcctcaacaatttcctcgtgtttgatcgattcttgcttacttggtggatgtctgcatctagtttggattctacagaccgtatctatccagaaataactgaatctataccatatggagattgtttatttgagagatatgcacaagatcccgaccaaatgattatgggggttataagggttataatcataaacttttct

SEQ ID NO: 14618 - DNA, 1927 bp, Zea Mays
cgctacgcaatgcttccagacccctccggacttcggccgctagcgccctcttcgttgcgcgatggagctccgaggctccaccccccaccaatgatgcgtccagacgcctagatgagcaccatccccttcccctccacccatcctcagaagatgtcatgctgacggcttcgacgtggtctccagtagatccgagcggagcgccttcccgtctacccctcaaacattgtcgcagtgcctgggccgtcgcgaggagcccccaaacacaatctcctccttagacgtcgccggtctcctcgctccctcctcaaacgtcgtcgtgctaccgacactgtctgtggcggctccaaccggagcaccatcccacctcctccgtcaaacgacgctgcggtgtttgggccaccgtcgggagtctgaatctgccccctcagacatcgccacctcgaaacgcacaggttggcgcggtagggggcactggtggttcggcgcggtcacctggcgaacgacgacgaagaggaggaggtggccgagtctatcatgaagagacgctgtgaagagcagtcgccatggccgatggatcagttgccggttgcattcatcgaagatttggccctctccaccaccatgtcgctaccccatacccgtcttccctgcatatctgaatgatgcaccttcaatccaccgctgcccaaagagcgaatggggaaggaccgacctgagcattctgtccggtagctgggtagcaagaagcaccagcccttccccctcccaaggacacaactgctgagattgctaaaaaaccagagcaaggaaaaagcttctttgggaccctctagctattcagcccagcaccctcttcgtgagcatttcctcagcacactcgaatgacaaagaaattagtaatcaatatgcagtattacttcagaaccatagtccatgtttgctttcatactgagctttcatagtgagcgcggtccagcacttaattaaatctatcaaatcttacgattttactactgatacggacatcatattgctaccatacttcatcccgagctcactatgaaagcttcctgtcaggtggttgtttgcaagattgaagagtcgtagcagccaccggtgctagcaaaatatgcagtattactaaaatcagaccaatcgtcaggtggttgtcatattatactttttattatattaaaatcggaacagggcttcatttaatcccagatttaacactgctaccatttattactaatgttccgtgcgcgcgcaagacgcgcctaagttactagtatatattatagtcaagcaaatataccttctcttaaaaaataagcaaataacaacaataataagctatgaagtattagaattatacatgtgaatatgtgatgtatatgtggtgcacagtctgttatttggtcactttacttttaattcatggatccaaacagactttaattttaaaaaaatacacttcacgatatgctagtcgtcagtcgaccccctagtttcggacctagaaaacgaggaagcaactgatgtacgaaattaacaaaagaagaaatatagagcacaatcgatttttatatcatatatatagaacaatgctatatagaagtgggttatatatcagccacctgtttatgaaatttagaactgttccaaaaccaacattttgctctagcactaaataaagcacctgacaaaaactacagtgatttaacaccaaagcctcaacaatttcctcgtgtttgatcgattcttgcttacttggtggatgtctgcatctagtttggattctacagaccgtatctatccagaaataactgaatctataccatatggagattgtttatttgagagatatgcacaagatcccgaccaaatgattatgggggttataagggttataatcataaacttttct

SEQ ID NO: 14619 - DNA, 1798 bp, Zea Mays
cgctacgcaatgcttccagacccctccggacttcggccgctagcgccctcttcgttgcgcgatggagctccgaggctccaccccccaccaatgatgcgtccagacgcctagatgagcaccatccccttcccctccacccatcctcagaagatgtcatgctgacggcttcgacgtggtctccagtagatccgagcggagcgccttcccgtctacccctcaaacattgtcgcagtgcctgggccgtcgcgaggagcccccaaacacaatctcctccttagacgtcgccggtctcctcgctccctcctcaaacgtcgtcgtgctaccgacactgtctgtggcggctccaaccggagcaccatcccacctcctccgtcaaacgacgctgcggtgtttgggccaccgtcgggagtctgaatctgccccctcagacatcgccacctcgaaacgcacaggttggcgcggtagggggcactggtggttcggcgcggtcacctggcgaacgacgacgaagaggaggaggtggccgagtctatcatgaagagacgctgtgaagagcagtcgccatggccgatggatcagttgccggttgcattcatcgaagatttggccctctccaccaccatgtcgctaccccatacccgtcttccctgcatatctgaatgatgcaccttcaatccaccgctgcccaaagagcgaatggggaaggaccgacctgagcattctgtccggtagctgggtagcaagaagcaccagcccttccccctcccaaggacacaactgctgagattgctaaaaaaccagagcaaggaaaaagcttctttgggaccctctagctattcagcccagcaccctcttcccttgctatggacggaccagaggcacaatattgaggcgccaaagctcgcgtcgggtgctgggtggccaattctatcgtcgcatcaacagggatgcgatgaccatgcatgtaagctgtaagatcagtttacgattctgtatgtctctctctctctctctcttttttgttcagttactgctagtgcttgtagtatctgtaattcttgatgtgtctatctaaatcctgatatcaccttccaactcgtggtttcgttacctttcttgaaaacgtagcgggttaacgttagcagcgtgtcctgggtagttaaaaaaaatgttatactgtctcttaagcttgcttgtactgttcataaggtgcatattgatgggtattgtctgggtctgttgctaggaatgtggtgtttaaatggttaagcttttcagaaagaagctaaccgtgtgctatatacacatccgatgtgcggggatggaagtttcaacatcacctttcttttctgtagtaatggttctttcaggtattttattttctttctaagctggtgcagtaccggtggagtctcttatctaagccgtccgcgttggtttatttttggcactctgctatggtttagcgtttgatttgatgagagtcagctctctccgtgacagaacaaagaataatcagtccctgcgcacatgacaatccacgtataaattgtcagcatcagccacagccaaaacctaaagtgacagcgagggccactccactcggtgggggtggtgccttgacttgtctgttgctatctacccgcccgcgtagttaaaccacgacaagctttgaaatgtgactcaagtgacaccacaatattttggactttttagtttttagatttttaccgctcgcgttagtttattaacgtaccttggtggggacggacggactaacgggaaatgaaggagatag

SEQ ID NO: 14620 - DNA, 1712 bp, Zea Mays
cgctacgcaatgcttccagacccctccggacttcggccgctagcgccctcttcgttgcgcgatggagctccgaggctccaccccccaccaatgatgcgtccagacgcctagatgagcaccatccccttcccctccacccatcctcagaagatgtcatgctgacggcttcgacgtggtctccagtagatccgagcggagcgccttcccgtctacccctcaaacattgtcgcagtgcctgggccgtcgcgaggagcccccaaacacaatctcctccttagacgtcgccggtctcctcgctccctcctcaaacgtcgtcgtgctaccgacactgtctgtggcggctccaaccggagcaccatcccacctcctccgtcaaacgacgctgcggtgtttgggccaccgtcgggagtctgaatctgccccctcagacatcgccacctcgaaacgcacaggttggcgcggtagggggcactggtggttcggcgcggtcacctggcgaacgacgacgaagaggaggaggtggccgagtctatcatgaagagacgctgtgaagagcagtcgccatggccgatggatcagttgccggttgcattcatcgaagatttggccctctccaccaccatgtcgctaccccatacccgtcttccctgcatatctgaatgatgcaccttcaatccaccgctgcccaaagagcgaatggggaaggaccgacctgagcattctgtccggtagctgggtagcaagaagcaccagcccttccccctcccaagccttgctatggacggaccagaggcacaatattgaggcgccaaagctcgcgtcgggtgctgggtggccaattctatcgtcgcatcaacagggatgcgatgaccatgcatgtaagctgtaagatcagtttacgattctgtatgtctctctctctctctctcttttttgttcagttactgctagtgcttgtagtatctgtaattcttgatgtgtctatctaaatcctgatatcaccttccaactcgtggtttcgttacctttcttgaaaacgtagcgggttaacgttagcagcgtgtcctgggtagttaaaaaaaatgttatactgtctcttaagcttgcttgtactgttcataaggtgcatattgatgggtattgtctgggtctgttgctaggaatgtggtgtttaaatggttaagcttttcagaaagaagctaaccgtgtgctatatacacatccgatgtgcggggatggaagtttcaacatcacctttcttttctgtagtaatggttctttcaggtattttattttctttctaagctggtgcagtaccggtggagtctcttatctaagccgtccgcgttggtttatttttggcactctgctatggtttagcgtttgatttgatgagagtcagctctctccgtgacagaacaaagaataatcagtccctgcgcacatgacaatccacgtataaattgtcagcatcagccacagccaaaacctaaagtgacagcgagggccactccactcggtgggggtggtgccttgacttgtctgttgctatctacccgcccgcgtagttaaaccacgacaagctttgaaatgtgactcaagtgacaccacaatattttggactttttagtttttagatttttaccgctcgcgttagtttattaacgtaccttggtggggacggacggactaacgggaaatgaaggagatag

SEQ ID NO: 14621 - DNA, 2834 bp, Zea Mays
gccaatcagcagaacagcacaacctcggaaacgtccgtactccgtagtgcgaggaccctccccgtcctcccgtgtctatttccgtccccgtccccaaccacccgcgttccccgctttccgtgcgcatggccgccgcgcgggcgcaaccaccaccgccgtggccggatgtctagaaagcccctcctccccacctgcgggtcctccacccctcccccgctcctcctcctccgccgcttcctccctcgccgccgcgcgacctcctctcccccgccgccctccacccggcggaggaccgccgccatgccaccccgcgccggcgactccgccgcggcggcggctgcggcggcatccttccgtctcgggatggtgcgggtggtctctttccttgtaggcgggctcaacctcgcggtgctgctgctcggactctacattatcgacgccgtgctcccgtcggggtgcggcggggggctcgctttcgcctcggcgcccgctctggctggggtccgcgtgctctccatgatcggcgccgcgcgcgcgcagcacgccacggcggacgccatagctaagcgccacctccacgagagcgacgcatctgtcgcagctgatgccgtagctcgccacgagattagggtgaggtacaaacgctggttgtggtggaccagatttggtatggcagttggtgcattgcagttggttgcagcaatttatctcatgtttgtcattgtaagagatctctcaaatgaaagaagatccacttcctgcttctttggacaggataaagctgatcgggtgtcagtacgagcacttattgctttatttcttatcctttcatgggttgtgatcattgtccaatgcttcacgggttctgatatattgaggtggcgatcattttatgcaacacatgatatggcatggaaagctcattacagggaagtgttcgaccatggaatccgagaagctttgtgctgcctaggacgtgcaaaatatctaactgtattggaagaagatgaggtttattctgttgcaagactccttggtgatttggttgcatatcgtgcttctgggacaggacatttggagctcttagcagggcttgctctattgcagaagcacgggaatttatctgaattgcagactgaccttgtggaggcatcccatgagcttatgcaagaagctgctttcctccatccatttgcggaagcatgttatacgggaccacttcttgattttggacgaaatcctatcctgtttccctgtgcatgggtttatagacaaggtgtgttaactccatgggcacgcagaagacgccctgcacttgatggtgataattggtggcgaggccatgctgcagctttccttagatttgttaatataccacctaaagcacttctgaaaggacgtgtttgccagagcaagcgtgaagctgcttattttgttgtggttctccatgacaaaagaactgttgtcattggggttcgtggaacagagacaccagaggatctcataactgatggattatgcagagaatgtgcttttactatggaagatttggatggactagtaaatagtgaacaattacctgcaactacaagagagagagttatttcaacatttccacactatggtcatggtggaattgtagagtctgccagggagcttttcatgcaactaaatggagaaaacacatcttctggaagacttgggttcctttccacactgctgggggagggcagtgagtgtcatggatataaagttcgtcttgttgggcattctttaggaggcgctgttgctacagtcctaggaatgatgctatatggcaaatacccaagcgtgcatgtatatgcatatggaccacttccttgtgtggactttgtaatagcggaagcatgttcgcattttgtcacaaccattatttgcaatgatgaattttcctctcgcctttcaatcaattcgattcttaggctacgatctgctgcaataagtgctctttcagataactctccagctgatacagcaatgatacaaaagctcgctcgaagaattttgcatgtgaacaggtatcatgataatggtcctgacgatggcataatccagggctatgctgatcatacaagaacagcagatacaacagtaccgaatgaaagacaaatttctcatcagattccattatgcaatactgaactagacctccacaatacgcaaaatggcttttttaggtataatgggtccagtgcatcaatagatgagcatctgagctatgaaggcataagcagtggccatgatatgcaaataattccacttgatggggctgattctggttttgaagggcaccagacatcttacagagaaataccagtggagcctcctgagatgtttcttgcaggcttaattgttcacatagtgcggcaaagaagaagtctctttcctctttggaaatgctggagcatccaggaaactgaaccaccatacaaagctgttttagcgaaaagggagaacttcagggatatagtggttactccttacatgtttacagatcacttaccatggaggtgccactttgctatgcagaagattgttgaagctcaaacgcctatgagacgtgcgcattccgatccacccgtacaacaacatttggctggaccgctggaggcatatttcagtccttcaggcagccagaatatgtccgtgacagacccaaaatcgtgacgagcttattgacagtcagaggccaccgagacatgatcactggttactgtacaccaaacagtatctaatcagtctactcaccctggcaacctgcgcgtcaattaattaattcatcgattgttctcttc

SEQ ID NO: 14622 - DNA, 3218 bp, Zea Mays
caatcagcagaacagcacaacctcggaaacgtccgtactccgtagtgcgaggaccctccccgtcctcccgtgtctatttccgtccccgtccccaaccacccgcgttccccgctttccgtgcgcatggccgccgcgcgggcgcaaccaccaccgccgtggccggatgtctagaaagcccctcctccccacctgcgggtcctccacccctcccccgctcctcctcctccgccgcttcctccctcgccgccgcgcgacctcctctcccccgccgccctccacccggcggaggaccgccgccatgccaccccgcgccggcgactccgccgcggcggcggctgcggcggcatccttccgtctcgggatggtgcgggtggtctctttccttgtaggcgggctcaacctcgcggtgctgctgctcggactctacattatcgacgccgtgctcccgtcggggtgcggcggggggctcgctttcgcctcggcgcccgctctggctggggtccgcgtgctctccatgatcggcgccgcgcgcgcgcagcacgccacggcggacgccatagctaagcgccacctccacgagagcgacgcatctgtcgcagctgatgccgtagctcgccacgagattagggtgaggtacaaacgctggttgtggtggaccagatttggtatggcagttggtgcattgcagttggttgcagcaatttatctcatgtttgtcattgtaagagatctctcaaatgaaagaagatccacttcctgcttctttggtatgttggtcgccattctgagctatttatttcctaactttgtacataattttttacaagttcttgtttgctggtagtttacaatcacatgaacttcatacatatacaacgacacacataaagtgggaaaaactttcgagcacccttttcttgaagttccatatgaaatttttttagtgaatgtaccacaaacatgctaactactctcactttgagcagattttgcttcaataaatgcactgaaacatagttaattaacacaatctagtaacaactcttaagagtatacacatttcattatactatcctaaggttttattttctgctgtgctaatccactcatctacttgggattgaataagtcgtttggatggtttataatctaggacaggataaagctgatcgggtgtcagtacgagcacttattgctttatttcttatcctttcatgggttgtgatcattgtccaatgcttcacgggttctgatatattgaggtggcgatcattttatgcaacacatgatatggcatggaaagctcattacagggaagtgttcgaccatggaatccgagaagctttgtgctgcctaggacgtgcaaaatatctaactgtattggaagaagatgaggtttattctgttgcaagactccttggtgatttggttgcatatcgtgcttctgggacaggacatttggagctcttagcagggcttgctctattgcagaagcacgggaatttatctgaattgcagactgaccttgtggaggcatcccatgagcttatgcaagaagctgctttcctccatccatttgcggaagcatgttatacgggaccacttcttgattttggacgaaatcctatcctgtttccctgtgcatgggtttatagacaaggtgtgttaactccatgggcacgcagaagacgccctgcacttgatggtgataattggtggcgaggccatgctgcagctttccttagatttgttaatataccacctaaagcacttctgaaaggacgtgtttgccagagcaagcgtgaagctgcttattttgttgtggttctccatgacaaaagaactgttgtcattggggttcgtggaacagagacaccagaggatctcataactgatggattatgcagagaatgtgcttttactatggaagatttggatggactagtaaatagtgaacaattacctgcaactacaagagagagagttatttcaacatttccacactatggtcatggtggaattgtagagtctgccagggagcttttcatgcaactaaatggagaaaacacatcttctggaagacttgggttcctttccacactgctgggggagggcagtgagtgtcatggatataaagttcgtcttgttgggcattctttaggaggcgctgttgctacagtcctaggaatgatgctatatggcaaatacccaagcgtgcatgtatatgcatatggaccacttccttgtgtggactttgtaatagcggaagcatgttcgcattttgtcacaaccattatttgcaatgatgaattttcctctcgcctttcaatcaattcgattcttaggctacgatctgctgcaataagtgctctttcagataactctccagctgatacagcaatgatacaaaagctcgctcgaagaattttgcatgtgaacaggtatcatgataatggtcctgacgatggcataatccagggctatgctgatcatacaagaacagcagatacaacagtaccgaatgaaagacaaatttctcatcagattccattatgcaatactgaactagacctccacaatacgcaaaatggcttttttaggtataatgggtccagtgcatcaatagatgagcatctgagctatgaaggcataagcagtggccatgatatgcaaataattccacttgatggggctgattctggttttgaagggcaccagacatcttacagagaaataccagtggagcctcctgagatgtttcttgcaggcttaattgttcacatagtgcggcaaagaagaagtctctttcctctttggaaatgctggagcatccaggaaactgaaccaccatacaaagctgttttagcgaaaagggagaacttcagggatatagtggttactccttacatgtttacagatcacttaccatggaggtgccactttgctatgcagaagattgttgaagctcaaacgcctatgagacgtgcgcattccgatccacccgtacaacaacatttggctggaccgctggaggcatatttcagtccttcaggcagccagaatatgtccgtgacagacccaaaatcgtgacgagcttattgacagtcagaggccaccgagacatgatcactggttactgtacaccaaacagtatctaatcagtctactcaccctggcaacctgcgcgtcaattaattaattcatcgattgttctcttc

SEQ ID NO: 14623 - DNA, 2997 bp, Zea Mays
gcagaacagcacaacctcggaaacgtccgtactccgtagtgcgaggaccctccccgtcctcccgtgtctatttccgtccccgtccccaaccacccgcgttccccgctttccgtgcgcatggccgccgcgcgggcgcaaccaccaccgccgtggccggatgtctagaaagcccctcctccccacctgcgggtcctccacccctcccccgctcctcctcctccgccgcttcctccctcgccgccgcgcgacctcctctcccccgccgccctccacccggcggaggaccgccgccatgccaccccgcgccggcgactccgccgcggcggcggctgcggcggcatccttccgtctcgggatggtgcgggtggtctctttccttgtaggcgggctcaacctcgcggtgctgctgctcggactctacattatcgacgccgtgctcccgtcggggtgcggcggggggctcgctttcgcctcggcgcccgctctggctggggtccgcgtgctctccatgatcggcgccgcgcgcgcgcagcacgccacggcggacgccatagctaagcgccacctccacgagagcgacgcatctgtcgcagctgatgccgtagctcgccacgagattagggtgaggtacaaacgctggttgtggtggaccagatttggtatggcagttggtgcattgcagttggttgcagcaatttatctcatgtttgtcattgtaagagatctctcaaatgaaagaagatccacttcctgcttctttggacaggataaagctgatcgggtgtcagtacgagcacttattgctttatttcttatcctttcatgggttgtgatcattgtccaatgcttcacgggttctgatatattgaggtggcgatcattttatgcaacacatgatatggcatggaaagctcattacagggaagtgttcgaccatggaatccgagaagctttgtgctgcctaggacgtgcaaaatatctaactgtattggaagaagatgaggtttattctgttgcaagactccttggtgatttggttgcatatcgtgcttctgggacaggacatttggagctcttagcagggcttgctctattgcagaagcacgggaatttatctgaattgcagactgaccttgtggaggcatcccatgagcttatgcaagaagctgctttcctccatccatttgcggaagcatgttatacgggaccacttcttgattttggacgaaatcctatcctgtttccctgtgcatgggtttatagacaaggtgtgttaactccatgggcacgcagaagacgccctgcacttgatggtgataattggtggcgaggccatgctgcagctttccttagatttgttaatataccacctaaagcacttctgaaaggacgtgtttgccagagcaagcgtgaagctgcttattttgttgtggttctccatgacaaaagaactgttgtcattggggttcgtggaacagagacaccagaggatctcataactgatggattatgcagagaatgtgcttttactatggaagatttggatggactagtaaatagtgaacaattacctgcaactacaagagagagagttatttcaacatttccacactatggtcatggtggaattgtagagtctgccagggagcttttcatgcaactaaatggagaaaacacatcttctggaagacttgggttcctttccacactgctgggggagggcagtgagtgtcatggatataaagttcgtcttgttgggcattctttaggaggcgctgttgctacagtcctaggaatgatgctatatggcaaatacccaagcgtgcatgtatatgcatatggaccacttccttgtgtggactttgtaatagcggaagcatgttcgcattttgtcacaacgtacgaataaactgagatcttcctgtggctactattttcaatggaacttcagttttggtgtgctgttctcttataaggttcattaacttctgactaccgagataactctccagctgatacagcaatgatacaaaagctcgctcgaagaattttgcatgtgaacaggtatcatgataatggtcctgacgatggcataatccagggctatgctgatcatacaagaacagcagatacaacagtaccgaatgaaagacaaatttctcatcagattccattatgcaatactgaactagacctccacaatacgcaaaatggcttttttaggtataatgggtccagtgcatcaatagatgagcatctgagctatgaaggcataagcagtggccatgatatgcaaataattccacttgatggggctgattctggttttgaagggcaccagacatcttacagagaaataccagtggagcctcctgagatgtttcttgcaggcttaattgttcacatagtgcggcaaagaagaagtctctttcctctttggaaatgctggagcatccaggaaactgaaccaccatacaaagctgttttagcgaaaagggagaacttcagggatatagtggttactccttacatgtttacagatcacttaccatggagatgttcgtgcttctactatacctgcctcacgattagaacagtccttgatggagtccttatcttcttcaattgtgccttcttcagtggtacctcccttcccttggtgtcttctttagagtctccttccttggtttctgactagactaggaagcctccggtgacacatgtctactctcaacgggtcgtaaattcttctggtatgccgtcttcctctgctgagctaccctcttttgttgtgccatcttctactattgagtcatctttctctaatgattcaccttcatttgatgagaatatgctgagccaacttcttctggtagttcttcactgcgacagtttctcgcttttatcaatcacttgaccggaatggcagcatgcaatggacgaggagattgttgctcttgagtgtatcgatatgtgggaacttgttactaagcatat

SEQ ID NO: 14624 - DNA, 2915 bp, Zea Mays
gcagaacagcacaacctcggaaacgtccgtactccgtagtgcgaggaccctccccgtcctcccgtgtctatttccgtccccgtccccaaccacccgcgttccccgctttccgtgcgcatggccgccgcgcgggcgcaaccaccaccgccgtggccggatgtctagaaagcccctcctccccacctgcgggtcctccacccctcccccgctcctcctcctccgccgcttcctccctcgccgccgcgcgacctcctctcccccgccgccctccacccggcggaggaccgccgccatgccaccccgcgccggcgactccgccgcggcggcggctgcggcggcatccttccgtctcgggatggtgcgggtggtctctttccttgtaggcgggctcaacctcgcggtgctgctgctcggactctacattatcgacgccgtgctcccgtcggggtgcggcggggggctcgctttcgcctcggcgcccgctctggctggggtccgcgtgctctccatgatcggcgccgcgcgcgcgcagcacgccacggcggacgccatagctaagcgccacctccacgagagcgacgcatctgtcgcagctgatgccgtagctcgccacgagattagggtgaggtacaaacgctggttgtggtggaccagatttggtatggcagttggtgcattgcagttggttgcagcaatttatctcatgtttgtcattgtaagagatctctcaaatgaaagaagatccacttcctgcttctttggacaggataaagctgatcgggtgtcagtacgagcacttattgctttatttcttatcctttcatgggttgtgatcattgtccaatgcttcacgggttctgatatattgaggtggcgatcattttatgcaacacatgatatggcatggaaagctcattacagggaagtgttcgaccatggaatccgagaagctttgtgctgcctaggacgtgcaaaatatctaactgtattggaagaagatgaggtttattctgttgcaagactccttggtgatttggttgcatatcgtgcttctgggacaggacatttggagctcttagcagggcttgctctattgcagaagcacgggaatttatctgaattgcagactgaccttgtggaggcatcccatgagcttatgcaagaagctgctttcctccatccatttgcggaagcatgttatacgggaccacttcttgattttggacgaaatcctatcctgtttccctgtgcatgggtttatagacaaggtgtgttaactccatgggcacgcagaagacgccctgcacttgatggtgataattggtggcgaggccatgctgcagctttccttagatttgttaatataccacctaaagcacttctgaaaggacgtgtttgccagagcaagcgtgaagctgcttattttgttgtggttctccatgacaaaagaactgttgtcattggggttcgtggaacagagacaccagaggatctcataactgatggattatgcagagaatgtgcttttactatggaagatttggatggactagtaaatgaacaattacctgcaactacaagagagagagttatttcaacatttccacactatggtcatggtggaattgtagagtctgccagggagcttttcatgcaactaaatggagaaaacacatcttctggaagacttgggttcctttccacactgctgggggagggcagtgagtgtcatggatataaagttcgtcttgttgggcattctttaggaggcgctgttgctacagtcctaggaatgatgctatatggcaaatacccaagcgtgcatgtatatgcatatggaccacttccttgtgtggactttgtaatagcggaagcatgttcgcattttgtcacaaccattatttgcaatgatgaattttcctctcgcctttcaatcaattcgattcttaggctacgatctgctgcaataagtgctctttcagataactctccagctgatacagcaatgatacaaaagctcgctcgaagaattttgcatgtgaacaggtatcatgataatggtcctgacgatggcataatccagggctatgctgatcatacaagaacagcagatacaacagtaccgaatgaaagacaaatttctcatcagattccattatgcaatactgaactagacctccacaatacgcaaaatggcttttttaggtataatgggtccagtgcatcaatagatgagcatctgagctatgaaggcataagcagtggccatgatatgcaaataattccacttgatggggctgattctggttttgaagggcaccagacatcttacagagaaataccagtggagcctcctgagatgtttcttgcaggcttaattgttcacatagtgcggcaaagaagaagtctctttcctctttggaaatgctggagcatccaggaaactgaaccaccatacaaagctgttttagcgaaaagggagaacttcagggatatagtggttactccttacatgtttacagatcacttaccatggaggtgccactttgctatgcagaagattgttgaagctcaaacgcctatgagacgtgcgcattccgatccacccgtacaacaacatttggtctgaccaggacaaaactgctgcccatgtacagaattgcgtgaaggacagaaaattatgatgatcacatttagcagcatggtttattgcaggctggaccgctggaggcatatttcagtccttcaggcagccagaatatgtccgtgacagacccaaaatcgtgacgagcttattgacagtcagaggccaccgagacatgatcactggttactgtacaccaaacagtatctaatcagtctactcaccctggcaacctgcgcgtcaattaattaattcatcgattgttctcttc

SEQ ID NO: 14625 - DNA, 2514 bp, Zea Mays
cccgtgtctatttccgtccccgtccccaaccacccgcgttccccgctttccgtgcgcatggccgccgcgcgggcgcaaccaccaccgccgtggccggatgtctagaaagcccctcctccccacctgcgggtcctccacccctcccccgctcctcctcctccgccgcttcctccctcgccgccgcgcgacctcctctcccccgccgccctccacccggcggaggaccgccgccatgccaccccgcgccggcgactccgccgcggcggcggctgcggcggcatccttccgtctcgggatggtgcgggtggtctctttccttgtaggcgggctcaacctcgcggtgctgctgctcggactctacattatcgacgccgtgctcccgtcggggtgcggcggggggctcgctttcgcctcggcgcccgctctggctggggtccgcgtgctctccatgatcggcgccgcgcgcgcgcagcacgccacggcggacgccatagctaagcgccacctccacgagagcgacgcatctgtcgcagctgatgccgtagctcgccacgagattagggtgaggtacaaacgctggttgtggtggaccagatttggtatggcagttggtgcattgcagttggttgcagcaatttatctcatgtttgtcattgtaagagatctctcaaatgaaagaagatccacttcctgcttctttggataaagctgatcgggtgtcagtacgagcacttattgctttatttcttatcctttcatgggttgtgatcattgtccaatgcttcacgggttctgatatattgaggtggcgatcattttatgcaacacatgatatggcatggaaagctcattacagggaagtgttcgaccatggaatccgagaagctttgtgctgcctaggacgtgcaaaatatctaactgtattggaagaagatgaggtttattctgttgcaagactccttggtgatttggttgcatatcgtgcttctgggacaggacatttggagctcttagcagggcttgctctattgcagaagcacgggaatttatctgaattgcagactgaccttgtggaggcatcccatgagcttatgcaagaagctgctttcctccatccatttgcggaagcatgttatacgggaccacttcttgattttggacgaaatcctatcctgtttccctgtgcatgggtttatagacaaggtgtgttaactccatgggcacgcagaagacgccctgcacttgatggtgataattggtggcgaggccatgctgcagctttccttagatttgttaatataccacctaaagcacttctgaaaggacgtgtttgccagagcaagcgtgaagctgcttattttgttgtggttctccatgacaaaagaactgttgtcattggggttcgtggaacagagacaccagaggatctcataactgatggattatgcagagaatgtgcttttactatggaagatttggatggactagtaaatagtgaacaattacctgcaactacaagagagagagttatttcaacatttccacactatggtcatggtggaattgtagagtctgccagggagcttttcatgcaactaaatggagaaaacacatcttctggaagacttgggttcctttccacactgctgggggagggcagtgagtgtcatggatataaagttcgtcttgttgggcattctttaggaggcgctgttgctacagtcctaggaatgatgctatatggcaaatacccaagcgtgcatgtatatgcatatggaccacttccttgtgtggactttgtaatagcggaagcatgttcgcattttgtcacaaccattatttgcaatgatgaattttcctctcgcctttcaatcaattcgattcttaggctacgatctgctgcaataagtgctctttcagataactctccagctgatacagcaatgatacaaaagctcgctcgaagaattttgcatgtgaacaggtatcatgataatggtcctgacgatggcataatccagggctatgctgatcatacaagaacagcagatacaacagtaccgaatgaaagacaaatttctcatcagattccattatgcaatactgaactagacctccacaatacgcaaaatggcttttttaggtataatgggtccagtgcatcaatagatgagcatctgagctatgaaggcataagcagtggccatgatatgcaaataattccacttgatggggctgattctggttttgaagggcaccagacatcttacagagaaataccagtggagcctcctgagatgtttcttgcaggcttaattgttcacatagtgcggcaaagaagaagtctctttcctctttggaaatgctggagcatccaggaaactgaaccaccatacaaagctgttttagcgaaaagggagaacttcagggatatagtggttactccttacatgtttacagatcacttaccatggagatgttcgtgcttctactatacctgcctcacgattagaa

SEQ ID NO: 14626 - DNA, 2553 bp, Zea Mays
cccgtgtctatttccgtccccgtccccaaccacccgcgttccccgctttccgtgcgcatggccgccgcgcgggcgcaaccaccaccgccgtggccggatgtctagaaagcccctcctccccacctgcgggtcctccacccctcccccgctcctcctcctccgccgcttcctccctcgccgccgcgcgacctcctctcccccgccgccctccacccggcggaggaccgccgccatgccaccccgcgccggcgactccgccgcggcggcggctgcggcggcatccttccgtctcgggatggtgcgggtggtctctttccttgtaggcgggctcaacctcgcggtgctgctgctcggactctacattatcgacgccgtgctcccgtcggggtgcggcggggggctcgctttcgcctcggcgcccgctctggctggggtccgcgtgctctccatgatcggcgccgcgcgcgcgcagcacgccacggcggacgccatagctaagcgccacctccacgagagcgacgcatctgtcgcagctgatgccgtagctcgccacgagattagggtgaggtacaaacgctggttgtggtggaccagatttggtatggcagttggtgcattgcagttggttgcagcaatttatctcatgtttgtcattgtaagagatctctcaaatgaaagaagatccacttcctgcttctttggataaagctgatcgggtgtcagtacgagcacttattgctttatttcttatcctttcatgggttgtgatcattgtccaatgcttcacgggttctgatatattgaggtggcgatcattttatgcaacacatgatatggcatggaaagctcattacagggaagtgttcgaccatggaatccgagaagctttgtgctgcctaggacgtgcaaaatatctaactgtattggaagaagatgaggtttattctgttgcaagactccttggtgatttggttgcatatcgtgcttctgggacaggacatttggagctcttagcagggcttgctctattgcagaagcacgggaatttatctgaattgcagactgaccttgtggaggcatcccatgagcttatgcaagaagctgctttcctccatccatttgcggaagcatgttatacgggaccacttcttgattttggacgaaatcctatcctgtttccctgtgcatgggtttatagacaaggtgtgttaactccatgggcacgcagaagacgccctgcacttgatggtgataattggtggcgaggccatgctgcagctttccttagatttgttaatataccacctaaagcacttctgaaaggacgtgtttgccagagcaagcgtgaagctgcttattttgttgtggttctccatgacaaaagaactgttgtcattggggttcgtggaacagagacaccagaggatctcataactgatggattatgcagagaatgtgcttttactatggaagatttggatggactagtaaatagtgaacaattacctgcaactacaagagagagagttatttcaacatttccacactatggtcatggtggaattgtagagtctgccagggagcttttcatgcaactaaatggagaaaacacatcttctggaagacttgggttcctttccacactgctgggggagggcagtgagtgtcatggatataaagttcgtcttgttgggcattctttaggaggcgctgttgctacagtcctaggaatgatgctatatggcaaatacccaagcgtgcatgtatatgcatatggaccacttccttgtgtggactttgtaatagcggaagcatgttcgcattttgtcacaaccattatttgcaatgatgaattttcctctcgcctttcaatcaattcgattcttaggctacgatctgctgcaataagtgctctttcagataactctccagctgatacagcaatgatacaaaagctcgctcgaagaattttgcatgtgaacaggtatcatgataatggtcctgacgatggcataatccagggctatgctgatcatacaagaacagcagatacaacagtaccgaatgaaagacaaatttctcatcagattccattatgcaatactgaactagacctccacaatacgcaaaatggcttttttaggtataatgggtccagtgcatcaatagatgagcatctgagctatgaaggcataagcagtggccatgatatgcaaataattccacttgatggggctgattctggttttgaagggcaccagacatcttacagagaaataccagtggagcctcctgagatgtttcttgcaggcttaattgttcacatagtgcggcaaagaagaagtctctttcctctttggaaatgctggagcatccaggaaactgaaccaccatacaaagctgttttagcgaaaagggagaacttcagggatatagtggttactccttacatgtttacagatcacttaccatggaggaatggcagcatgcaatggacgaggagattgttgctcttgagtgtatcgatatgtgggaacttgttactaagcatat

SEQ ID NO: 14627 - DNA, 2836 bp, Zea Mays
gtctatttccgtccccgtccccaaccacccgcgttccccgctttccgtgcgcatggccgccgcgcgggcgcaaccaccaccgccgtggccggatgtctagaaagcccctcctccccacctgcgggtcctccacccctcccccgctcctcctcctccgccgcttcctccctcgccgccgcgcgacctcctctcccccgccgccctccacccggcggaggaccgccgccatgccaccccgcgccggcgactccgccgcggcggcggctgcggcggcatccttccgtctcgggatggtgcgggtggtctctttccttgtaggcgggctcaacctcgcggtgctgctgctcggactctacattatcgacgccgtgctcccgtcggggtgcggcggggggctcgctttcgcctcggcgcccgctctggctggggtccgcgtgctctccatgatcggcgccgcgcgcgcgcagcacgccacggcggacgccatagctaagcgccacctccacgagagcgacgcatctgtcgcagctgatgccgtagctcgccacgagattagggtgaggtacaaacgctggttgtggtggaccagatttggtatggcagttggtgcattgcagttggttgcagcaatttatctcatgtttgtcattgtaagagatctctcaaatgaaagaagatccacttcctgcttctttggacaggataaagctgatcgggtgtcagtacgagcacttattgctttatttcttatcctttcatgggttgtgatcattgtccaatgcttcacgggttctgatatattgaggtggcgatcattttatgcaacacatgatatggcatggaaagctcattacagggaagtgttcgaccatggaatccgagaagctttgtgctgcctaggacgtgcaaaatatctatgaggtttattctgttgcaagactccttggtgatttggttgcatatcgtgcttctgggacaggacatttggagctcttagcagggcttgctctattgcagaagcacgggaatttatctgaattgcagactgaccttgtggaggcatcccatgagcttatgcaagaagctgctttcctccatccatttgcggaagcatgttatacgggaccacttcttgattttggacgaaatcctatcctgtttccctgtgcatgggtttatagacaaggtgtgttaactccatgggcacgcagaagacgccctgcacttgatggtgataattggtggcgaggccatgctgcagctttccttagatttgttaatataccacctaaagcacttctgaaaggacgtgtttgccagagcaagcgtgaagctgcttattttgttgtggttctccatgacaaaagaactgttgtcattggggttcgtggaacagagacaccagaggatctcataactgatggattatgcagagaatgtgcttttactatggaagatttggatggactagtaaatagtgaacaattacctgcaactacaagagagagagttatttcaacatttccacactatggtcatggtggaattgtagagtctgccagggagcttttcatgcaactaaatggagaaaacacatcttctggaagacttgggttcctttccacactgctgggggagggcagtgagtgtcatggatataaagttcgtcttgttgggcattctttaggaggcgctgttgctacagtcctaggaatgatgctatatggcaaatacccaagcgtgcatgtatatgcatatggaccacttccttgtgtggactttgtaatagcggaagcatgttcgcattttgtcacaaccattatttgcaatgatgaattttcctctcgcctttcaatcaattcgattcttaggctacgatctgctgcaataagtgctctttcagataactctccagctgatacagcaatgatacaaaagctcgctcgaagaattttgcatgtgaacaggtatcatgataatggtcctgacgatggcataatccagggctatgctgatcatacaagaacagcagatacaacagtaccgaatgaaagacaaatttctcatcagattccattatgcaatactgaactagacctccacaatacgcaaaatggcttttttaggtataatgggtccagtgcatcaatagatgagcatctgagctatgaaggcataagcagtggccatgatatgcaaataattccacttgatggggctgattctggttttgaagggcaccagacatcttacagagaaataccagtggagcctcctgagatgtttcttgcaggcttaattgttcacatagtgcggcaaagaagaagtctctttcctctttggaaatgctggagcatccaggaaactgaaccaccatacaaagctgttttagcgaaaagggagaacttcagggatatagtggttactccttacatgtttacagatcacttaccatggaggtgccactttgctatgcagaagattgttgaagctcaaacgcctatgagacgtgcgcattccgatccacccgtacaacaacatttggtctgaccaggacaaaactgctgcccatgtacagaattgcgtgaaggacagaaaattatgatgatcacatttagcagcatggtttattgcaggctggaccgctggaggcatatttcagtccttcaggcagccagaatatgtccgtgacagacccaaaatcgtgacgagcttattgacagtcagaggccaccgagacatgatcactggttactgtacaccaaacagtatctaatcagtctactcaccctggcaacctgcgcgtcaattaattaattcatcgattgttctcttc

SEQ ID NO: 14628 - DNA, 3241 bp, Zea Mays
cccgtccccaaccacccgcgttccccgctttccgtgcgcatggccgccgcgcgggcgcaaccaccaccgccgtggccggatgtctagaaagcccctcctccccacctgcgggtcctccacccctcccccgctcctcctcctccgccgcttcctccctcgccgccgcgcgacctcctctcccccgccgccctccacccggcggaggaccgccgccatgccaccccgcgccggcgactccgccgcggcggcggctgcggcggcatccttccgtctcgggatggtgcgggtggtctctttccttgtaggcgggctcaacctcgcggtgctgctgctcggactctacattatcgacgccgtgctcccgtcggggtgcggcggggggctcgctttcgcctcggcgcccgctctggctggggtccgcgtgctctccatgatcggcgccgcgcgcgcgcagcacgccacggcggacgccatagctaagcgccacctccacgagagcgacgcatctgtcgcagctgatgccgtagctcgccacgagattagggtgaggtacaaacgctggttgtggtggaccagatttggtatggcagttggtgcattgcagttggttgcagcaatttatctcatgtttgtcattgtaagagatctctcaaatgaaagaagatccacttcctgcttctttggtatgttggtcgccattctgagctatttatttcctaactttgtacataattttttacaagttcttgtttgctggtagtttacaatcacatgaacttcatacatatacaacgacacacataaagtgggaaaaactttcgagcacccttttcttgaagttccatatgaaatttttttagtgaatgtaccacaaacatgctaactactctcactttgagcagattttgcttcaataaatgcactgaaacatagttaattaacacaatctagtaacaactcttaagagtatacacatttcattatactatcctaaggttttattttctgctgtgctaatccactcatctacttgggattgaataagtcgtttggatggtttataatctaggacaggataaagctgatcgggtgtcagtacgagcacttattgctttatttcttatcctttcatgggttgtgatcattgtccaatgcttcacgggttctgatatattgaggtggcgatcattttatgcaacacatgatatggcatggaaagctcattacagggaagtgttcgaccatggaatccgagaagctttgtgctgcctaggacgtgcaaaatatctaactgtattggaagaagatgaggtttattctgttgcaagactccttggtgatttggttgcatatcgtgcttctgggacaggacatttggagctcttagcagggcttgctctattgcagaagcacgggaatttatctgaattgcagactgaccttgtggaggcatcccatgagcttatgcaagaagctgctttcctccatccatttgcggaagcatgttatacgggaccacttcttgattttggacgaaatcctatcctgtttccctgtgcatgggtttatagacaaggtgtgttaactccatgggcacgcagaagacgccctgcacttgatggtgataattggtggcgaggccatgctgcagctttccttagatttgttaatataccacctaaagcacttctgaaaggacgtgtttgccagagcaagcgtgaagctgcttattttgttgtggttctccatgacaaaagaactgttgtcattggggttcgtggaacagagacaccagaggatctcataactgatggattatgcagagaatgtgcttttactatggaagatttggatggactagtaaatagtgaacaattacctgcaactacaagagagagagttatttcaacatttccacactatggtcatggtggaattgtagagtctgccagggagcttttcatgcaactaaatggagaaaacacatcttctggaagacttgggttcctttccacactgctgggggagggcagtgagtgtcatggatataaagttcgtcttgttgggcattctttaggaggcgctgttgctacagtcctaggaatgatgctatatggcaaatacccaagcgtgcatgtatatgcatatggaccacttccttgtgtggactttgtaatagcggaagcatgttcgcattttgtcacaacgtacgaataaactgagatcttcctgtggctactattttcaatggaacttcagttttggtgtgctgttctcttataaggttcattaacttctgactaccgagataactctccagctgatacagcaatgatacaaaagctcgctcgaagaattttgcatgtgaacaggtatcatgataatggtcctgacgatggcataatccagggctatgctgatcatacaagaacagcagatacaacagtaccgaatgaaagacaaatttctcatcagattccattatgcaatactgaactagacctccacaatacgcaaaatggcttttttaggtataatgggtccagtgcatcaatagatgagcatctgagctatgaaggcataagcagtggccatgatatgcaaataattccacttgatggggctgattctggttttgaagggcaccagacatcttacagagaaataccagtggagcctcctgagatgtttcttgcaggcttaattgttcacatagtgcggcaaagaagaagtctctttcctctttggaaatgctggagcatccaggaaactgaaccaccatacaaagctgttttagcgaaaagggagaacttcagggatatagtggttactccttacatgtttacagatcacttaccatggaggtgccactttgctatgcagaagattgttgaagctcaaacgcctatgagacgtgcgcattccgatccacccgtacaacaacatttggtctgaccaggacaaaactgctgcccatgtacagaattgcgtgaaggacagaaaattatgatgatcacatttagcagcatggtttattgcaggctggaccgctggaggcatatttcagtccttcaggcagccagaatatgtccgtgacagacccaaaatcgtgacgagcttattgacagtcagaggccaccgagacatgatcactggttactgtacaccaaacagtatctaatcagtctactcaccctggcaacctgcgcgtcaattaattaattcatcgattgttctcttc

SEQ ID NO: 14629 - DNA, 3149 bp, Zea Mays
cccgtccccaaccacccgcgttccccgctttccgtgcgcatggccgccgcgcgggcgcaaccaccaccgccgtggccggatgtctagaaagcccctcctccccacctgcgggtcctccacccctcccccgctcctcctcctccgccgcttcctccctcgccgccgcgcgacctcctctcccccgccgccctccacccggcggaggaccgccgccatgccaccccgcgccggcgactccgccgcggcggcggctgcggcggcatccttccgtctcgggatggtgcgggtggtctctttccttgtaggcgggctcaacctcgcggtgctgctgctcggactctacattatcgacgccgtgctcccgtcggggtgcggcggggggctcgctttcgcctcggcgcccgctctggctggggtccgcgtgctctccatgatcggcgccgcgcgcgcgcagcacgccacggcggacgccatagctaagcgccacctccacgagagcgacgcatctgtcgcagctgatgccgtagctcgccacgagattagggtgaggtacaaacgctggttgtggtggaccagatttggtatggcagttggtgcattgcagttggttgcagcaatttatctcatgtttgtcattgtaagagatctctcaaatgaaagaagatccacttcctgcttctttggtatgttggtcgccattctgagctatttatttcctaactttgtacataattttttacaagttcttgtttgctggtagtttacaatcacatgaacttcatacatatacaacgacacacataaagtgggaaaaactttcgagcacccttttcttgaagttccatatgaaatttttttagtgaatgtaccacaaacatgctaactactctcactttgagcagattttgcttcaataaatgcactgaaacatagttaattaacacaatctagtaacaactcttaagagtatacacatttcattatactatcctaaggttttattttctgctgtgctaatccactcatctacttgggattgaataagtcgtttggatggtttataatctaggacaggataaagctgatcgggtgtcagtacgagcacttattgctttatttcttatcctttcatgggttgtgatcattgtccaatgcttcacgggttctgatatattgaggtggcgatcattttatgcaacacatgatatggcatggaaagctcattacagggaagtgttcgaccatggaatccgagaagctttgtgctgcctaggacgtgcaaaatatctaactgtattggaagaagatgaggtttattctgttgcaagactccttggtgatttggttgcatatcgtgcttctgggacaggacatttggagctcttagcagggcttgctctattgcagaagcacgggaatttatctgaattgcagactgaccttgtggaggcatcccatgagcttatgcaagaagctgctttcctccatccatttgcggaagcatgttatacgggaccacttcttgattttggacgaaatcctatcctgtttccctgtgcatgggtttatagacaaggtgtgttaactccatgggcacgcagaagacgccctgcacttgatggtgataattggtggcgaggccatgctgcagctttccttagatttgttaatataccacctaaagcacttctgaaaggacgtgtttgccagagcaagcgtgaagctgcttattttgttgtggttctccatgacaaaagaactgttgtcattggggttcgtggaacagagacaccagaggatctcataactgatggattatgcagagaatgtgcttttactatggaagatttggatggactagtaaatagtgaacaattacctgcaactacaagagagagagttatttcaacatttccacactatggtcatggtggaattgtagagtctgccagggagcttttcatgcaactaaatggagaaaacacatcttctggaagacttgggttcctttccacactgctgggggagggcagtgagtgtcatggatataaagttcgtcttgttgggcattctttaggaggcgctgttgctacagtcctaggaatgatgctatatggcaaatacccaagcgtgcatgtatatgcatatggaccacttccttgtgtggactttgtaatagcggaagcatgttcgcattttgtcacaaccattatttgcaatgatgaattttcctctcgcctttcaatcaattcgattcttaggctacgatctgctgcaataagtgctctttcagataactctccagctgatacagcaatgatacaaaagctcgctcgaagaattttgcatgtgaacaggtatcatgataatggtcctgacgatggcataatccagggctatgctgatcatacaagaacagcagatacaacagtaccgaatgaaagacaaatttctcatcagattccattatgcaatactgaactagacctccacaatacgcaaaatggcttttttaggtataatgggtccagtgcatcaatagatgagcatctgagctatgaaggcataagcagtggccatgatatgcaaataattccacttgatggggctgattctggttttgaagggcaccagacatcttacagagaaataccagtggagcctcctgagatgtttcttgcaggcttaattgttcacatagtgcggcaaagaagaagtctctttcctctttggaaatgctggagcatccaggaaactgaaccaccatacaaagctgttttagcgaaaagggagaacttcagggatatagtggttactccttacatgtttacagatcacttaccatggaggtgccactttgctatgcagaagattgttgaagctcaaacgcctatgagacgtgcgcattccgatccacccgtacaacaacatttgcatggtttattgcaggctggaccgctggaggcatatttcagtccttcaggcagccagaatatgtccgtgacagacccaaaatcgtgacgagcttattgacagtcagaggccaccgagacatgatcactggttactgtacaccaaacagtatctaatcagtctactcaccctggcaacctgcgcgtcaattaattaattcatcgattgttctcttc

SEQ ID NO: 14630 - DNA, 3249 bp, Zea Mays
cccgtccccaaccacccgcgttccccgctttccgtgcgcatggccgccgcgcgggcgcaaccaccaccgccgtggccggatgtctagaaagcccctcctccccacctgcgggtcctccacccctcccccgctcctcctcctccgccgcttcctccctcgccgccgcgcgacctcctctcccccgccgccctccacccggcggaggaccgccgccatgccaccccgcgccggcgactccgccgcggcggcggctgcggcggcatccttccgtctcgggatggtgcgggtggtctctttccttgtaggcgggctcaacctcgcggtgctgctgctcggactctacattatcgacgccgtgctcccgtcggggtgcggcggggggctcgctttcgcctcggcgcccgctctggctggggtccgcgtgctctccatgatcggcgccgcgcgcgcgcagcacgccacggcggacgccatagctaagcgccacctccacgagagcgacgcatctgtcgcagctgatgccgtagctcgccacgagattagggtgaggtacaaacgctggttgtggtggaccagatttggtatggcagttggtgcattgcagttggttgcagcaatttatctcatgtttgtcattgtaagagatctctcaaatgaaagaagatccacttcctgcttctttggtatgttggtcgccattctgagctatttatttcctaactttgtacataattttttacaagttcttgtttgctggtagtttacaatcacatgaacttcatacatatacaacgacacacataaagtgggaaaaactttcgagcacccttttcttgaagttccatatgaaatttttttagtgaatgtaccacaaacatgctaactactctcactttgagcagattttgcttcaataaatgcactgaaacatagttaattaacacaatctagtaacaactcttaagagtatacacatttcattatactatcctaaggttttattttctgctgtgctaatccactcatctacttgggattgaataagtcgtttggatggtttataatctaggacaggataaagctgatcgggtgtcagtacgagcacttattgctttatttcttatcctttcatgggttgtgatcattgtccaatgcttcacgggttctgatatattgaggtggcgatcattttatgcaacacatgatatggcatggaaagctcattacagggaagtgttcgaccatggaatccgagaagctttgtgctgcctaggacgtgcaaaatatctaactgtattggaagaagatgaggtttattctgttgcaagactccttggtgatttggttgcatatcgtgcttctgggacaggacatttggagctcttagcagggcttgctctattgcagaagcacgggaatttatctgaattgcagactgaccttgtggaggcatcccatgagcttatgcaagaagctgctttcctccatccatttgcggaagcatgttatacgggaccacttcttgattttggacgaaatcctatcctgtttccctgtgcatgggtttatagacaaggtgtgttaactccatgggcacgcagaagacgccctgcacttgatggtgataattggtggcgaggccatgctgcagctttccttagatttgttaatataccacctaaagcacttctgaaaggacgtgtttgccagagcaagcgtgaagctgcttattttgttgtggttctccatgacaaaagaactgttgtcattggggttcgtggaacagagacaccagaggatctcataactgatggattatgcagagaatgtgcttttactatggaagatttggatggactagtaaatagtgaacaattacctgcaactacaagagagagagttatttcaacatttccacactatggtcatggtggaattgtagagtctgccagggagcttttcatgcaactaaatggagaaaacacatcttctggaagacttgggttcctttccacactgctgggggagggcagtgagtgtcatggatataaagttcgtcttgttgggcattctttaggaggcgctgttgctacagtcctaggaatgatgctatatggcaaatacccaagcgtgcatgtatatgcatatggaccacttccttgtgtggactttgtaatagcggaagcatgttcgcattttgtcacaacgtacgaataaactgagatcttcctgtggctactattttcaatggaacttcagttttggtgtgctgttctcttataaggctacgatctgctgcaataagtgctctttcagataactctccagctgatacagcaatgatacaaaagctcgctcgaagaattttgcatgtgaacaggtatcatgataatggtcctgacgatggcataatccagggctatgctgatcatacaagaacagcagatacaacagtaccgaatgaaagacaaatttctcatcagattccattatgcaatactgaactagacctccacaatacgcaaaatggcttttttaggtataatgggtccagtgcatcaatagatgagcatctgagctatgaaggcataagcagtggccatgatatgcaaataattccacttgatggggctgattctggttttgaagggcaccagacatcttacagagaaataccagtggagcctcctgagatgtttcttgcaggcttaattgttcacatagtgcggcaaagaagaagtctctttcctctttggaaatgctggagcatccaggaaactgaaccaccatacaaagctgttttagcgaaaagggagaacttcagggatatagtggttactccttacatgtttacagatcacttaccatggaggtgccactttgctatgcagaagattgttgaagctcaaacgcctatgagacgtgcgcattccgatccacccgtacaacaacatttggtctgaccaggacaaaactgctgcccatgtacagaattgcgtgaaggacagaaaattatgatgatcacatttagcagcatggtttattgcaggctggaccgctggaggcatatttcagtccttcaggcagccagaatatgtccgtgacagacccaaaatcgtgacgagcttattgacagtcagaggccaccgagacatgatcactggttactgtacaccaaacagtatctaatcagtctactcaccctggcaacctgcgcgtcaattaattaattcatcgattgttctcttc

SEQ ID NO: 14631 - DNA, 3125 bp, Zea Mays
cccgtccccaaccacccgcgttccccgctttccgtgcgcatggccgccgcgcgggcgcaaccaccaccgccgtggccggatgtctagaaagcccctcctccccacctgcgggtcctccacccctcccccgctcctcctcctccgccgcttcctccctcgccgccgcgcgacctcctctcccccgccgccctccacccggcggaggaccgccgccatgccaccccgcgccggcgactccgccgcggcggcggctgcggcggcatccttccgtctcgggatggtgcgggtggtctctttccttgtaggcgggctcaacctcgcggtgctgctgctcggactctacattatcgacgccgtgctcccgtcggggtgcggcggggggctcgctttcgcctcggcgcccgctctggctggggtccgcgtgctctccatgatcggcgccgcgcgcgcgcagcacgccacggcggacgccatagctaagcgccacctccacgagagcgacgcatctgtcgcagctgatgccgtagctcgccacgagattagggtgaggtacaaacgctggttgtggtggaccagatttggtatggcagttggtgcattgcagttggttgcagcaatttatctcatgtttgtcattgtaagagatctctcaaatgaaagaagatccacttcctgcttctttggtatgttggtcgccattctgagctatttatttcctaactttgtacataattttttacaagttcttgtttgctggtagtttacaatcacatgaacttcatacatatacaacgacacacataaagtgggaaaaactttcgagcacccttttcttgaagttccatatgaaatttttttagtgaatgtaccacaaacatgctaactactctcactttgagcagattttgcttcaataaatgcactgaaacatagttaattaacacaatctagtaacaactcttaagagtatacacatttcattatactatcctaaggttttattttctgctgtgctaatccactcatctacttgggattgaataagtcgtttggatggtttataatctaggacaggataaagctgatcgggtgtcagtacgagcacttattgctttatttcttatcctttcatgggttgtgatcattgtccaatgcttcacgggttctgatatattgaggtggcgatcattttatgcaacacatgatatggcatggaaagctcattacagggaagtgttcgaccatggaatccgagaagctttgtgctgcctaggacgtgcaaaatatctaactgtattggaagaagatgaggtttattctgttgcaagactccttggtgatttggttgcatatcgtgcttctgggacaggacatttggagctcttagcagggcttgctctattgcagaagcacgggaatttatctgaattgcagactgaccttgtggaggcatcccatgagcttatgcaagaagctgctttcctccatccatttgcggaagcatgttatacgggaccacttcttgattttggacgaaatcctatcctgtttccctgtgcatgggtttatagacaaggtgtgttaactccatgggcacgcagaagacgccctgcacttgatggtgataattggtggcgaggccatgctgcagctttccttagatttgttaatataccacctaaagcacttctgaaaggacgtgtttgccagagcaagcgtgaagctgcttattttgttgtggttctccatgacaaaagaactgttgtcattggggttcgtggaacagagacaccagaggatctcataactgatggattatgcagagaatgtgcttttactatggaagatttggatggactagtaaatgaacaattacctgcaactacaagagagagagttatttcaacatttccacactatggtcatggtggaattgtagagtctgccagggagcttttcatgcaactaaatggagaaaacacatcttctggaagacttgggttcctttccacactgctgggggagggcagtgagtgtcatggatataaagttcgtcttgttgggcattctttaggaggcgctgttgctacagtcctaggaatgatgcattatttgcaatgatgaattttcctctcgcctttcaatcaattcgattcttaggctacgatctgctgcaataagtgctctttcagataactctccagctgatacagcaatgatacaaaagctcgctcgaagaattttgcatgtgaacaggtatcatgataatggtcctgacgatggcataatccagggctatgctgatcatacaagaacagcagatacaacagtaccgaatgaaagacaaatttctcatcagattccattatgcaatactgaactagacctccacaatacgcaaaatggcttttttaggtataatgggtccagtgcatcaatagatgagcatctgagctatgaaggcataagcagtggccatgatatgcaaataattccacttgatggggctgattctggttttgaagggcaccagacatcttacagagaaataccagtggagcctcctgagatgtttcttgcaggcttaattgttcacatagtgcggcaaagaagaagtctctttcctctttggaaatgctggagcatccaggaaactgaaccaccatacaaagctgttttagcgaaaagggagaacttcagggatatagtggttactccttacatgtttacagatcacttaccatggaggtgccactttgctatgcagaagattgttgaagctcaaacgcctatgagacgtgcgcattccgatccacccgtacaacaacatttggtctgaccaggacaaaactgctgcccatgtacagaattgcgtgaaggacagaaaattatgatgatcacatttagcagcatggtttattgcaggctggaccgctggaggcatatttcagtccttcaggcagccagaatatgtccgtgacagacccaaaatcgtgacgagcttattgacagtcagaggccaccgagacatgatcactggttactgtacaccaaacagtatctaatcagtctactcaccctggcaacctgcgcgtcaattaattaattcatcgattgttctcttc

SEQ ID NO: 14632 - DNA, 2628 bp, Zea Mays
catggccgccgcgcgggcgcaaccaccaccgccgtggccggatgtctagaaagcccctcctccccacctgcgggtcctccacccctcccccgctcctcctcctccgccgcttcctccctcgccgccgcgcgacctcctctcccccgccgccctccacccggcggaggaccgccgccatgccaccccgcgccggcgactccgccgcggcggcggctgcggcggcatccttccgtctcgggatggtgcgggtggtctctttccttgtaggcgggctcaacctcgcggtgctgctgctcggactctacattatcgacgccgtgctcccgtcggggtgcggcggggggctcgctttcgcctcggcgcccgctctggctggggtccgcgtgctctccatgatcggcgccgcgcgcgcgcagcacgccacggcggacgccatagctaagcgccacctccacgagagcgacgcatctgtcgcagctgatgccgtagctcgccacgagattagggtgaggtacaaacgctggttgtggtggaccagatttggtatggcagttggtgcattgcagttggttgcagcaatttatctcatgtttgtcattgtaagagatctctcaaatgaaagaagatccacttcctgcttctttgggaagtgttcgaccatggaatccgagaagctttgtgctgcctaggacgtgcaaaatatctaagatgaggtttattctgttgcaagactccttggtgatttggttgcatatcgtgcttctgggacaggacatttggagctcttagcagggcttgctctattgcagaagcacgggaatttatctgaattgcagactgaccttgtggaggcatcccatgagcttatgcaagaagctgctttcctccatccatttgcggaagcatgttatacgggaccacttcttgattttggacgaaatcctatcctgtttccctgtgcatgggtttatagacaaggtgtgttaactccatgggcacgcagaagacgccctgcacttgatggtgataattggtggcgaggccatgctgcagctttccttagatttgttaatataccacctaaagcacttctgaaaggacgtgtttgccagagcaagcgtgaagctgcttattttgttgtggttctccatgacaaaagaactgttgtcattggggttcgtggaacagagacaccagaggatctcataactgatggattatgcagagaatgtgcttttactatggaagatttggatggactagtaaatagtgaacaattacctgcaactacaagagagagagttatttcaacatttccacactatggtcatggtggaattgtagagtctgccagggagcttttcatgcaactaaatggagaaaacacatcttctggaagacttgggttcctttccacactgctgggggagggcagtgagtgtcatggatataaagttcgtcttgttgggcattctttaggaggcgctgttgctacagtcctaggaatgatgctatatggcaaatacccaagcgtgcatgtatatgcatatggaccacttccttgtgtggactttgtaatagcggaagcatgttcgcattttgtcacaaccattatttgcaatgatgaattttcctctcgcctttcaatcaattcgattcttaggctacgatctgctgcaataagtgctctttcagataactctccagctgatacagcaatgatacaaaagctcgctcgaagaattttgcatgtgaacaggtatcatgataatggtcctgacgatggcataatccagggctatgctgatcatacaagaacagcagatacaacagtaccgaatgaaagacaaatttctcatcagattccattatgcaatactgaactagacctccacaatacgcaaaatggcttttttaggtataatgggtccagtgcatcaatagatgagcatctgagctatgaaggcataagcagtggccatgatatgcaaataattccacttgatggggctgattctggttttgaagggcaccagacatcttacagagaaataccagtggagcctcctgagatgtttcttgcaggcttaattgttcacatagtgcggcaaagaagaagtctctttcctctttggaaatgctggagcatccaggaaactgaaccaccatacaaagctgttttagcgaaaagggagaacttcagggatatagtggttactccttacatgtttacagatcacttaccatggaggtgccactttgctatgcagaagattgttgaagctcaaacgcctatgagacgtgcgcattccgatccacccgtacaacaacatttggtctgaccaggacaaaactgctgcccatgtacagaattgcgtgaaggacagaaaattatgatgatcacatttagcagcatggtttattgcaggctggaccgctggaggcatatttcagtccttcaggcagccagaatatgtccgtgacagacccaaaatcgtgacgagcttattgacagtcagaggccaccgagacatgatcactggttactgtacaccaaacagtatctaatcagtctactcaccctggcaacctgcgcgtcaattaattaattcatcgattgttctcttc

SEQ ID NO: 14633 - DNA, 2812 bp, Zea Mays
catggccgccgcgcgggcgcaaccaccaccgccgtggccggatgtctagaaagcccctcctccccacctgcgggtcctccacccctcccccgctcctcctcctccgccgcttcctccctcgccgccgcgcgacctcctctcccccgccgccctccacccggcggaggaccgccgccatgccaccccgcgccggcgactccgccgcggcggcggctgcggcggcatccttccgtctcgggatggtgcgggtggtctctttccttgtaggcgggctcaacctcgcggtgctgctgctcggactctacattatcgacgccgtgctcccgtcggggtgcggcggggggctcgctttcgcctcggcgcccgctctggctggggtccgcgtgctctccatgatcggcgccgcgcgcgcgcagcacgccacggcggacgccatagctaagcgccacctccacgagagcgacgcatctgtcgcagctgatgccgtagctcgccacgagattagggtgaggtacaaacgctggttgtggtggaccagatttggtatggcagttggtgcattgcagttggttgcagcaatttatctcatgtttgtcattgtaagagatctctcaaatgaaagaagatccacttcctgcttctttggataaagctgatcgggtgtcagtacgagcacttattgctttatttcttatcctttcatgggttgtgatcattgtccaatgcttcacgggttctgatatattgaggtggcgatcattttatgcaacacatgatatggcatggaaagctcattacagggaagtgttcgaccatggaatccgagaagctttgtgctgcctaggacgtgcaaaatatctaactgtattggaagaagatgaggtttattctgttgcaagactccttggtgatttggttgcatatcgtgcttctgggacaggacatttggagctcttagcagggcttgctctattgcagaagcacgggaatttatctgaattgcagactgaccttgtggaggcatcccatgagcttatgcaagaagctgctttcctccatccatttgcggaagcatgttatacgggaccacttcttgattttggacgaaatcctatcctgtttccctgtgcatgggtttatagacaaggtgtgttaactccatgggcacgcagaagacgccctgcacttgatggtgataattggtggcgaggccatgctgcagctttccttagatttgttaatataccacctaaagcacttctgaaaggacgtgtttgccagagcaagcgtgaagctgcttattttgttgtggttctccatgacaaaagaactgttgtcattggggttcgtggaacagagacaccagaggatctcataactgatggattatgcagagaatgtgcttttactatggaagatttggatggactagtaaatagtgaacaattacctgcaactacaagagagagagttatttcaacatttccacactatggtcatggtggaattgtagagtctgccagggagcttttcatgcaactaaatggagaaaacacatcttctggaagacttgggttcctttccacactgctgggggagggcagtgagtgtcatggatataaagttcgtcttgttgggcattctttaggaggcgctgttgctacagtcctaggaatgatgctatatggcaaatacccaagcgtgcatgtatatgcatatggaccacttccttgtgtggactttgtaatagcggaagcatgttcgcattttgtcacaacgtacgaataaactgagatcttcctgtggctactattttcaatggaacttcagttttggtgtgctgttctcttataaggttcattaacttctgactaccgagataactctccagctgatacagcaatgatacaaaagctcgctcgaagaattttgcatgtgaacaggtatcatgataatggtcctgacgatggcataatccagggctatgctgatcatacaagaacagcagatacaacagtaccgaatgaaagacaaatttctcatcagattccattatgcaatactgaactagacctccacaatacgcaaaatggcttttttaggtataatgggtccagtgcatcaatagatgagcatctgagctatgaaggcataagcagtggccatgatatgcaaataattccacttgatggggctgattctggttttgaagggcaccagacatcttacagagaaataccagtggagcctcctgagatgtttcttgcaggcttaattgttcacatagtgcggcaaagaagaagtctctttcctctttggaaatgctggagcatccaggaaactgaaccaccatacaaagctgttttagcgaaaagggagaacttcagggatatagtggttactccttacatgtttacagatcacttaccatggaggtgccactttgctatgcagaagattgttgaagctcaaacgcctatgagacgtgcgcattccgatccacccgtacaacaacatttggtctgaccaggacaaaactgctgcccatgtacagaattgcgtgaaggacagaaaattatgatgatcacatttagcagcatggtttattgcaggctggaccgctggaggcatatttcagtccttcaggcagccagaatatgtccgtgacagacccaaaatcgtgacgagcttattgacagtcagaggccaccgagacatgatcactggttactgtacaccaaacagtatctaatcagtctactcaccctggcaacctgcgcgtcaattaattaattcatcgattgttctcttc

SEQ ID NO: 14634 - DNA, 1805 bp, Zea Mays
gctctgtgtctccctaatccggcaccctgtcgacaaaccacaccaactgtcatctgtcatcggacggcccaaaagtggacctcgtgttcgattcagcggctatttcagctcgccgtgcctgcggcgcctcccccctactggctacttccttctccccttcaaatttgcgtagcgttgaatccacgccctcccggaacccccgaatctaccgacgctccctctcagtctctcacaacgctcaatccaaacgcgagccgcgagcctaaccctagcaaccgtgagtgatggcgcgcccaagggctaagaagcgtacgacgccccaggcggccgccactgattcggtcgagccggatgccaccgtcggtgcttcgagcaagctggaggaggcggcggcggagccggcaactcgggagcgggggaagcgcgtcaaggcgccgcccaagcccaagcccgagacggaatacttcgacgagaaaggaaatttcgaggatctatggttatctgctttccccgttggtaccgagtgggaaaacatcgataagataaaggagttcaactggagctttgaaaatgtagaggaagccttagaagaaggaggagagcttcatgggaagaccctttatatgtttggaagcaccgagcgtagactgtcctttcccaccttcagacaaaattggcataaattccgtccaaagggaaaatgaggaaatagtgccaatgaaggcgatgaagatggcatgggtgccttatgttccccttgaggaccggctgagcaggattgacattttcaaaacaaaaatattcacgctcggatgcacacagcgaaggtctgcactgaagcatctcaaaattgagagagtcaagaagtttgactactgcatgccttattatatgccactgcaacctcttgaagatgaagaaaacacaactatcaatttcttatatcctctggaacccccgatagtagatgagttcgactgggaaatggatgattacgaggattttgcagatcagaaagtccaagaaggtagcctgcccgagggcgagaaagaaaaattcaaggagttcctgaaggagaaggttagagaaaggaagagagagctgagacaggctaaagaagccaggaagaaagctattgatgatatggatcctgcgatgaaagaggcattcgagaatatcaaattttacaaattttatcctgtgaaaaccccagacacgcctgatgtaaacaatgtaaaggctaggtacatcaacagatactacaggaatgcccattatctgaagtaaaggctctcctgatctcacgtgcttgaggacgagcttgtcatttgagttggtgtaaaaaaattttgaaacccgggggagaaaagtttggtgacatctttggatggtcttactgttgtactgtactgtactagaattgccctcagactttcgctgtccggtgcatacagtcagaaaggttcaaggtagttttgagactaaccaaatcatgatggaacaatttgttcctttgtcatcatggttactgcacaccctgatggttatgctgtgactttttttaacatctgctatgagcaagctatgaattatgctgtaatctgtctggtgaagcgaccaggtacagtagggttcagactggttaacaatgggataacctggcttctaggcctgtttgtttttttccaattaataatcggtcttttgatctaatttaaattggtttctactccctttgccctacaatgaatgttgtttgacttttttggcataagttcgactgactcgtcttattcaaaatattt

SEQ ID NO: 14635 - DNA, 1654 bp, Zea Mays
gacctcgtgttcgattcagcggctatttcagctcgccgtgcctgcggcgcctcccccctactggctacttccttctccccttcaaatttgcgtagcgttgaatccacgccctcccggaacccccgaatctaccgacgctccctctcagtctctcacaacgctcaatccaaacgcgagccgcgagcctaaccctagcaaccgtgagtgatggcgcgcccaagggctaagaagcgtacgacgccccaggcggccgccactgattcggtcgagccggatgccaccgtcggtgcttcgagcaagctggaggaggcggcggcggagccggcaactcgggagcgggggaagcgcgtcaaggcgccgcccaagcccaagcccgagacggaatacttcgacgagaaaggaaatttcgaggatctatggttatctgctttccccgttggtaccgagtgggaaaacatcgataagataaaggagttcaactggagctttgaaaatgtagaggaagccttagaagaaggaggagagcttcatgggaagaccctttatatgtttggaagcaccgagcgtagactgtcctttcccaccttcagacaaaattggcataaattccgtccaaagggaaaatgaggaaatagtgccaatgaaggcgatgaagatggcatgggtgccttatgttccccttgaggaccggctgagcaggattgacattttcaaaacaaaaatattcacgctcggatgcacacagcgaaggtctgcactgaagcatctcaaaattgagagagtcaagaagtttgactactgcatgccttatagtagatgagttcgactgggaaatggatgattacgaggattttgcagatcagaaagtccaagaaggtagcctgcccgagggcgagaaagaaaaattcaaggagttcctgaaggagaaggttagagaaaggaagagagagctgagacaggctaaagaagccaggaagaaagctattgatgatatggatcctgcgatgaaagaggcattcgagaatatcaaattttacaaattttatcctgtgaaaaccccagacacgcctgatgtaaacaatgtaaaggctaggtacatcaacagatactacaggaatgcccattatctgaagtaaaggctctcctgatctcacgtgcttgaggacgagcttgtcatttgagttggtgtaaaaaaattttgaaacccgggggagaaaagtttggtgacatctttggatggtcttactgttgtactgtactgtactagaattgccctcagactttcgctgtccggtgcatacagtcagaaaggttcaaggtagttttgagactaaccaaatcatgatggaacaatttgttcctttgtcatcatggttactgcacaccctgatggttatgctgtgactttttttaacatctgctatgagcaagctatgaattatgctgtaatctgtctggtgaagcgaccaggtacagtagggttcagactggttaacaatgggataacctggcttctaggcctgtttgtttttttccaattaataatcggtcttttgatctaatttaaattggtttctactccctttgccctacaatgaatgttgtttgacttttttggcataagttcgactgactcgtcttattcaaaatattt

SEQ ID NO: 14636 - DNA, 2055 bp, Zea Mays
tttcagctcgccgtgcctgcggcgcctcccccctactggctacttccttctccccttcaaatttgcgtagcgttgaatccacgccctcccggaacccccgaatctaccgacgctccctctcagtctctcacaacgctcaatccaaacgcgagccgcgagcctaaccctagcaaccgtgagtgatggcgcgcccaagggctaagaagcgtacgacgccccaggcggccgccactgattcggtcgagccggatgccaccgtcggtgcttcgagcaagctggaggaggcggcggcggagccggcaactcgggagcgggggaagcgcgtcaaggcgccgcccaagcccaagcccgagacggaatacttcgacgagaaaggaaatttcgaggatctatggttatctgctttccccgttggtaccgagtgggaaaacatcgataagataaaggagttcaactggagctttgaaaatgtagaggaagccttagaagaaggaggagagcttcatgggaagaccctttatatgtttggaagcaccgagccccagctattgtatgttaatggtgaatcaaagatagtgcttatcccaattgtcgtcgctgtagactgtcctttcccaccttcagacaaaattggcataaattccgtccaaagggaaaatgaggaaatagtgccaatgaaggcgatgaagatggcatgggtgccttatgttccccttgaggaccggctgagcaggattgacattttcaaaacaaaaatattcacgctcggatgcacacagcgaaggtctgcactgaagcatctcaaaattgagagagtcaagaagtttgactactgcatgccttattatatgccactgcaacctcttgaagatgaagaaaacacaactatcaatttcttatatcctctggaacccccggtaagactcattgtttatttcaatgaggggcattacctgatcggtccaaaatgaaaatggaagttttcctctgttgtgtgaagtgacaataaatcagctcacaacctcaccattgtttccactttaacaaatttagtagttgttttttccaacattagtgtacttgatgcctcctattttatgcatgagttttaatttcatatagctgtagattgttgtcatgagttttaatttcatatagctgtagattgttgtcatgcatcactgtgtttactttgtgctgcttgctgcagatagtagatgagttcgactgggaaatggatgattacgaggattttgcagatcagaaagtccaagaaggtagcctgcccgagggcgagaaagaaaaattcaaggagttcctgaaggagaaggttagagaaaggaagagagagctgagacaggctaaagaagccaggaagaaagctattgatgatatggatcctgcgatgaaagaggcattcgagaatatcaaattttacaaattttatcctgtgaaaaccccagacacgcctgatgtaaacaatgtaaaggctaggtacatcaacagatactacaggaatgcccattatctgaagtaaaggctctcctgatctcacgtgcttgaggacgagcttgtcatttgagttggtgtaaaaaaattttgaaacccgggggagaaaagtttggtgacatctttggatggtcttactgttgtactgtactgtactagaattgccctcagactttcgctgtccggtgcatacagtcagaaaggttcaaggtagttttgagactaaccaaatcatgatggaacaatttgttcctttgtcatcatggttactgcacaccctgatggttatgctgtgactttttttaacatctgctatgagcaagctatgaattatgctgtaatctgtctggtgaagcgaccaggtacagtagggttcagactggttaacaatgggataacctggcttctaggcctgtttgtttttttccaattaataatcggtcttttgatctaatttaaattggtttctactccctttgccctacaatgaatgttgtttgacttttttggcataagttcgactgactcgtcttattcaaaatattt

SEQ ID NO: 14637 - DNA, 1738 bp, Zea Mays
actggctacttccttctccccttcaaatttgcgtagcgttgaatccacgccctcccggaacccccgaatctaccgacgctccctctcagtctctcacaacgctcaatccaaacgcgagccgcgagcctaaccctagcaaccgtgagtgatggcgcgcccaagggctaagaagcgtacgacgccccaggcggccgccactgattcggtcgagccggatgccaccgtcggtgcttcgagcaagctggaggaggcggcggcggagccggcaactcgggagcgggggaagcgcgtcaaggcgccgcccaagcccaagcccgagacggaatacttcgacgagaaaggaaatttcgaggatctatggttatctgctttccccgttggtaccgagtgggaaaacatcgataagataaaggagttcaactggagctttgaaaatgtagaggaagccttagaagaaggaggagagcttcatgggaagaccctttatatgtttggaagcaccgagcgtagactgtcctttcccaccttcagacaaaattggcataaattccgtccaaagggaaaatgaggaaatagtgccaatgaaggcgatgaagatggcatgggtgccttatgttccccttgaggaccggctgagcaggattgacattttcaaaacaaaaatattcacgctcggatgcacacagcgaaggtctgcactgaagcatctcaaaattgagagagtcaagaagtttgactactgcatgccttttaattcattggaattacagttgaataatgtggccatgaacagtgcggatctagaatttcacgatagggattatatgccactgcaacctcttgaagatgaagaaaacacaactatcaatttcttatatcctctggaacccccgatagtagatgagttcgactgggaaatggatgattacgaggattttgcagatcagaaagtccaagaaggtagcctgcccgagggcgagaaagaaaaattcaaggagttcctgaaggagaaggttagagaaaggaagagagagctgagacaggctaaagaagccaggaagaaagctattgatgatatggatcctgcgatgaaagaggcattcgagaatatcaaattttacaaattttatcctgtgaaaaccccagacacgcctgatgtaaacaatgtaaaggctaggtacatcaacagatactacaggaatgcccattatctgaagtaaaggctctcctgatctcacgtgcttgaggacgagcttgtcatttgagttggtgtaaaaaaattttgaaacccgggggagaaaagtttggtgacatctttggatggtcttactgttgtactgtactgtactagaattgccctcagactttcgctgtccggtgcatacagtcagaaaggttcaaggtagttttgagactaaccaaatcatgatggaacaatttgttcctttgtcatcatggttactgcacaccctgatggttatgctgtgactttttttaacatctgctatgagcaagctatgaattatgctgtaatctgtctggtgaagcgaccaggtacagtagggttcagactggttaacaatgggataacctggcttctaggcctgtttgtttttttccaattaataatcggtcttttgatctaatttaaattggtttctactccctttgccctacaatgaatgttgtttgacttttttggcataagttcgactgactcgtcttattcaaaatattt

SEQ ID NO: 14638 - DNA, 2372 bp, Zea Mays
ctcatagagtcaaaagtcattgcagacttgcaagcttccctcccctactatcaggcgaatcatatccatccacttactacgctgctaggctgctacgaacaaaatcctcctaattaagacgggcgtcgttggcttcaaatactgggtctccccgtttctgtccggcggttctgccgttccactgcttttgatttcggagtgtgaacttacatcttgctggataataaagattggattttaagcgatttgggggtgcttgcctgatctccccctgcgaggtactgccgggggattggatttcggggaagttttggtggtttgagattcggcttggccggagcaggaatgacgatcgacatgtccattcccgggagctccgggctgctgaacgctgcggggaagagggacatgaagttcttcagcaacccctacgtgcttgcgctcacgggcgctgcaggaatcggtggattcctctttggctacgatacaggtgtcatatctggagcccttctgtatatccgcgatgattttccagcggtcaaggacaattacttcttacaggaaacgattgttagcatggccttagtcggagctatgattggagctgctgggggtggttggatcaatgatgcatacggtcgcaagaagtctactcttcttgctgatttgatgtttgctcttggctcacttgtcatgtgtgctgctgctggtccttacattctaattatcggaaggctcctcgttggtttgggtgtgggtgttgcatcagtcacagcaccggtatacattgctgaagctgctccttcagaaatcaggggaggtttggtgtcaactaatgtactcatgattaccggtggccaattcttctcctatcttatcaatcttggctttactgaggtgcctggaacatggcgctggatgcttggtgttgctgctgttcctgccattatacagtttgtgctgatgctattcctgccagaatctccgcgttggctttactggaaggatgagaaggcaaaagctattgccgtccttgagaggatctatgaatccgaccgcttggaggaagaggtagagctgcttgctacatcctccatgcatgaattccagtccaacaataccggaagctatctggatgtcttcaagtcgaaagaattgaggctagctttctttgctggggctggccttcaggccttccagcaatttaccgggatcaacaccgtgatgtattacagccccacgatagtccagatggctggtttctcctccaacaggctggccttgctcctctccctgatcgtcgcggccatgaacgccgccggaaccatcgtcgggatctacctaatcgaccgttgcggccgccgccgtctggccctcacaagcttggccggggtcgtggtctccctggccatcctcgccacggccttcatactgcagtcatcatccggcctctgcatgagcgccgccagcggcacgtgccagggcgcgctaggctggttcgcggtggccggcctcgctctgtacatcgccttcttctccccgggcatggggcccgtgccgtgggccgtgaactcggagatctaccccgaggcgtaccgtgggacgtgcggcggcatgtcggccaccgtgaactgggtctctaacctcgtcgtggcacagacgttcctgtcgatcgtggggctggtcgggaccggcccgacgttcctgatcgtcgccgggatcgcggtgctggccttcgtcttcgtggccacgtacgtgccggagacgaagggcctgacttttgagcaggtggagcagatgtggagggagagagcgtgggggaacagcggcggcaactgcgagagccttttggcgggtactgctgctgcgccgtaggctacccgttgccagcactggtcaagcgcgtcagttttagtatggccgctctgggcttgatcggctccgtcctggcattagttggaagaaagtaaaaacagattggagatgcagatgcaaactgttgtatgtggtggtgcttatattgctatcctgttgcctgattgtacgtgttgtcgtcgtggcaaatgttcagtgggtgtaaaatatgaggtcgtaccgtgacgtcaaactaaggcaaaaggccagttgtatgaccccagatgggtgattataattatttgtacagtttccggcatatgaatgaatgatgtcctggagagacagtagggcaggagtttttttttggttgtccttggtcaagtgagttggtgtttgggctctacatgcggaccatgacaaacgagcacgatcagtagaagatctgtttctagtcctccagctttcacgctatgggcaacgattccacccatcgtctattaaaatggcagttattt

SEQ ID NO: 14639 - DNA, 4158 bp, Zea Mays
caaagagtcgctagcgcgtacatgagcgtccaaaccttaacgtactacacgccaaccaaacgccacccgataataaaaacagagcgccacacgagcgggcgcaacgatgcttcaggttcgcgcgtcctcggccttcctcccctccacctcctccccctccccgccatcctcgtcgcaggcaccggcgccagcgccgttccggctctcggggaagagccagcggcgcggcgggctgatcgcggtgccgcaggcgagccgcgtggctaggcggtccgtgatggcagcggcgggggcagccgcagccgccccggcggcggccaagctcgaggacgccgacgcgctcatcgactctgtggagaccttcatcttcgactgcgacggtgtgatctggaagggcgacaagctgatcgacggcgtgccggagactctcgacctgctccgatcaaagggcaagcggctggtgttcgtgaccaacaactccaccaagtcgaggaagcagtacggcaggaagttcgagacgctggggctgagcgtcgacgaggaagagatcttcgcttcgtctttcgcagccgccgcgtacctgcagtccatcgatttccccaaggacaagaaggtgtatgtcatcggagaggaagggattctgaaggagctagagttggctggatttcagtacctcggtgggcccacagacggagacaagaagatagagctcaagcctggtctctacatggagcacgacgaagatgtgggagcggtcgtggtgggatttgatcgctacttcaactactacaaagttcagtacgggacactgtgcatccgtgagaacccagggtgccttttcatcgcaacaaacagggacgccgtcacccatcttactgacgcccaagaatgggcaggtggcggagcaatggtcggtgcacttctcggttcgactaagcaagaaccgctcgtggtcgggaagccatccaccttcatgatggactacctggcaaagaagttcggaatcacaacatcccagatatgcatggtgggggaccgattggataccgatatcctgtttggtcagaatggaggctgcaagactctcctcgtcctctcaggcgtgacttccctgcagacgcttcagagccccgacaactcgatccagccagatttctacacgaatcagatttcagattttctcaccctcaaagcagcaactgtctgaagagcccgcgttccatttgcacagcatgtcagcatcggcctttttttaacgaataaggaaatacaaaggacggatttgttttttttcactcttgtgtaatcatgggatatctttatgtgcaacatcagccatgcaaatatcataaggatgccaagaattaatctaaattctctagtcaacctttttttttacttcagacaaaatgcatatatatgtccattgttaacgtaccagcatcaagttaccaaaatggtgataaagcacaaagtaggcagttgcaaacatgacctaaaaaagaatactgaaaatgtaattgcgttgcttatatgaaataaaagatattatgacgaggaacagtggccagtgggggtacttctgtacattgcatccgattgcacctgagcacctcgaatttgccataggtcattgaaaccttattggattatgtctatgccaataagttaacagaacattatatcttgtatgtatgtacagaaagttaataaaaacacacttatctcgctcagggggtccctagtttcaagctagccacgctaacaagcataatcacataatttcactatcgcggcaaacaaggaaagtgcactttacagttacgataattctagtcttgcccccaaatcgcaagacaaaaatccatacagctccagttgtgaagtgctggccctttattttgctgatttcttcaagctgctcattaatgctcgcaaagcttctttcacgttttggcccttcgtttgtctgacctcctgggatgtcagacgtaagctctcgaggccgcggcccagagaagcaatcatgggaacagaaggtgctgcctcggctgcgcactcgatcccatctccatgcatcacaaggccagcacatgcagccatgctgcagccaaatgttgcccaaggaaatattctgaaaggctgcctgtgcctcttctgcattatttcgtagaatgaagtccgcataaccaataagcttgttctctcggccgatgatattacggtatgcgtgaccgctcgaatcttctctgctgaagccgtgaactgcaaagcagaagccttcgagccagcggtaacaaccccgtgagggagtatcttgcttaatacaatagcagcatgtctttggagctgcattaatccatacttcagaaccgctggacttttgtaaggggccatcttaaggaaggcagaagcctgaagagatttcgataatgatgaaaagcccaggagtgctgtccctcctgcaccaacagcaaccacaggtttctcagatatccaactttttttgtcagtgtcgtctgctgaaggtacctcaattttatcatcattttcagcaccatagtgattgaagcatctgctagctaattgagtgatttctgaaggaacaggggtgttccaatgtctccttattccagctaagcagctcgcgtcaactatagccaccacagaaccaaactctcttagttgactcctgagagcttgcacaagaagaatgtggcacttctcatcagattggagttttgaaaaatccagatcatttgagccatgtttatctccggtatcaatttgggacctggctgcactgtttaagcccatcctgagggcttctattgcaattctaaatacatacacatcagacaacatatcactgctgattggctcccccttgtgaacttgtgtaagcaacttctgagcagaaaccatagccctaccaatcgatggaatatcagcaaatatatgataaagatcagcaagtaaagggtagacagactgagcaaatggtggagcttcatatctgtcaatcaacttgcattcagatggcctgcactcagtggcagcattggagggggctgcttgggacatcaagaaattaagagttggtgccagtgacttcaagagttgtcctccattatcatccataaggcatatactcctaccatgggagctcacaattgaagtggcgctcctgggggtcaagcagttagcctgcaattgcaaacctgaggcatcatccatggtgatgtgagctagcgagcagctagcctgtaatgactgagctgagttatcgtctgcagtactattctggctggccgatccaccgccgccacaattcctctcatagggagactcaagcaatagaaaacacgaccccgtctcctcggcggctctcttggcagcgagcagatggccatagaaaccgaccccgaaaatctcctgcaggacctggcacgcggcagccttcacgtactggtccctgctcctcttctcggtgacgcaccgcttgatcacctgaaacggcgacgccggtaccggcacgcccccgcctccattgcctgccaggcaatcctcttcgatccggacgtcttcgagggccggacgcgcgacctgggtgaccacggccctcggtcgcacctccctgatcaggcgctcggcgtccgaggcggactgctccgacagattctgcgcggcgaggatgtagatcacgccagcgccgtcccggtgccggtcgtgcggcgacccgccgggctcccggagcgcgagcacgaactgcttcgtctcctccggcacagagagcgacccgaccagccgcgctgacgcgcgtaggtcgtcctcctccctcaggagggcagagaacggccacagggcctgcaggtacgagagcagcgccgacgccatggacggcgccgcagcatcggcggtggcgaaggcgcgcgatcaggcggcgaggagggtcgattgacttgcccccgccttcgccttttcctccccttccgctggacctagatggacgaggagagggtaatgcgcctgcacggcggctgattcttctcggaccgccgccgccgccgcggtcgtcggctgcaggggaggcgagaagaacgggaatttcggtgccgtgcggatgggcggcgtgacctaggattgggttgctttgct

SEQ ID NO: 14640 - DNA, 1282 bp, Zea Mays
gagatcgcgatcacaaagtgtccattctcgtttcggtcgcaaacgggtaaagacccacggacaggacaagtttgcaaaacccccctctttgtgctgtttcttctcgccgccgccgccgccgtcgttgccgctagccggcgtagctgataggaaacctgaccacctgagccttctgtagaccagcctcagcgcaactcccaaccacttctcttatggcgctcctccttcgccgaggcgtggccctcgccgcccgctccttccgcgccgcggccgcctcctccgcttccaccactgtgcaccgcctcccagccggggcgtcccttgcgggcgccggggaattggctccggcgcagctcttcttcttcgagaaccgaagaggcttcgcgaaggggaagaaatcgaaggatgatcgaggtgacactgttcaagctgttcctgacattgggccaactgtcaaatcagctgccaccgcacaaatggacgctgcagtgatcgcactgtcacgagagctgagcaaactacggactggaagagctacacctggcatgcttgaccatatcatggtggagaatgcagatgttaaagttgcattgaatcgcattgccgttgtttctgtcctggacgcacataccctatcagtgatgccttatgatcctacttccatgaagtcgatcgagcatgctattatctcatcaccattgggcattaatccaacacctgatgggaataggattattgcagctatccctccgttgacaaaggagaacatacaggcactgtgcaaggttgttactaaatcagcggaggattttaaacaaagtattagaagagcacgccaaaaggtaacacaggcacttgatacaataaagaagtctgcatctagtatgcccaaggatgacgtaaagaggattgagaaggagattgaagaattgaccaaaaagttcataaagtcgtcagatgatatgtgcaaggctaaggagaaggaaatcagcggaaactgaagtcatctgtggcgatgaagttatgttttattcacattagttgtgttttgtttacattccaacaaagttgagcagctgagtggatgatataaatttctcaaatgttattgtcctattctaagtaatactgatagcacttgagaaaagtgagatgaccaggacaggttagctggtgctgttgtaatttccagccgcgccgtatttgattaaaacttgcaacacgacgaaacaaacttcagtttgctatatgtggttggtagttgtctagttgatactaatta

SEQ ID NO: 14641 - DNA, 1213 bp, Zea Mays
gagatcgcgatcacaaagtgtccattctcgtttcggtcgcaaacgggtaaagacccacggacaggacaagtttgcaaaacccccctctttgtgctgtttcttctcgccgccgccgccgccgtcgttgccgctagccggcgtagctgataggaaacctgaccacctgagccttctgtagaccagcctcagcgcaactcccaaccacttctcttatggcgctcctccttcgccgaggcgtggccctcgccgcccgctccttccgcgccgcggccgcctcctccgcttccaccactgtgcaccgcctcccagccggggcgtcccttgcgggcgccggggaattggctccggcgcagctcttcttcttcgagaaccgaagaggcttcgcgaaggggaagaaatcgactgccaccgcacaaatggacgctgcagtgatcgcactgtcacgagagctgagcaaactacggactggaagagctacacctggcatgcttgaccatatcatggtggagaatgcagatgttaaagttgcattgaatcgcattgccgttgtttctgtcctggacgcacataccctatcagtgatgccttatgatcctacttccatgaagtcgatcgagcatgctattatctcatcaccattgggcattaatccaacacctgatgggaataggattattgcagctatccctccgttgacaaaggagaacatacaggcactgtgcaaggttgttactaaatcagcggaggattttaaacaaagtattagaagagcacgccaaaaggcacttgatacaataaagaagtctgcatctagtatgcccaaggatgacgtaaagaggattgagaaggagattgaagaattgaccaaaaagttcataaagtcgtcagatgatatgtgcaaggctaaggagaaggaaatcagcggaaactgaagtcatctgtggcgatgaagttatgttttattcacattagttgtgttttgtttacattccaacaaagttgagcagctgagtggatgatataaatttctcaaatgttattgtcctattctaagtaatactgatagcacttgagaaaagtgagatgaccaggacaggttagctggtgctgttgtaatttccagccgcgccgtatttgattaaaacttgcaacacgacgaaacaaacttcagtttgctatatgtggttggtagttgtctagttgatactaatta

SEQ ID NO: 14642 - DNA, 2387 bp, Zea Mays
gagagaggaaagctctcgttcctagcttccttctcttcaactaagcgagcgaatccaacccatcccatccatttctcccttccctgttcacggattccaatccttcctccacaccccaccctcccttcgcctccacatccaccaccatccaatccgcgcgggtgcttcgccaccctatcccgattgctacctcctcgtggtgggcgccgctccgatccgcccgatccgcgctgctcctggggctccggcgcgcggcggcgagcggcggaggcggcgcaggaatggaatccgaggacgatatgcacgacgcaaacgactccgccgaagatgacttctacagcggcggggaggctggtctcgccgccagcgacgacggagacgcagactacgacttcgcggaccacgactccgacgactccgcggagctcctctcccacagacagcagcaaaattacagtatattgagtgaagttgatatcaagcggcgccaagaggatgacataaatagggtttcaactgttctttcaatttccaaaccagaggagtgttagtaaggtgcatgacgaatggtttgctgatgaagagcgtgttcggaaggtggttggtttaccagagaagcatattgaaatgccaaatgacagagaagtaacatgtggaatatgtttcgaaagttgccctctcggatcgatgagtgctgctgcatgtggtcatcctttctgcggtacatgttggcgaggttacattagcactgctataagtgatggtccgggatgcttgatgctgaggtgtcctgatccgtcctgtgctgctgctgttggacaagatatgataaattcactggctgatgttgaggatacagaaaagtatgggcgatatcttcgcagatcttacattgaagataatagaaagacaaaatggtgtcctgcgcctggatgtgaatatgcagcggaattcgtcatgggcagtggcagctatgacgttaattgcaactgttcatatgggttttgttggaattgcaccgaggaagctcatcgtccagtagactgtgccactgtttcgaagtggatcctcaagaacagtgcggagtcggagaatatgaactggatactggctaattcaaagccttgtcccaaatgcaagcggcctattgaaaaaaatcagggatgcatgcacatcacatgcactccaccatgcaaatttgagttctgctggctatgtcttggtccatggtcagagcatggagagaggactggtggattttatgcttgtaaccgctatgagtcagcaaggcaagaaggagtgtatgatgaatctgaaaggagaagagaaatggcaaagaactcgcttgagagatatacacattattatgaacgatgggcagccaatcagtcgtcgaggcaaaaggcactgggggaccttcaaagcctacagaacgacaagcttgaaaggttaagtgacatacaaagtcaacctgagtcacagctgaagttcattatagaggcatggttacagattgtcgaatgcagaagggtattgaagtggacttatgcctatggattttacctgccagagcatgagcatgccaaaagacagttctttgaatatctgcaaggtgaggcagaatcaggattggagcggctacatcaatgtgcagagaaagaacttcaaatataccttgatgcagaatctccctcgaaagacttcaatgatttccgtacaaagttggctggattaactagtgtgactcgcaattattttgaaaacctcgtccgggctctggaaactggattaaatgatgtaggtccttccactagccatggtacatgcagcaaaagcgcaacttcgaagagcctcggtggtaaaagtaagagtggcaagaaccgagcatcaagcaccagttccaagtcgggtggctcaagccgaggtgtggatgatagtaacatatggacgtgcgatcagtgcacatatgcaaaccccaaatctgccagagcctgccaggcttgtgatcaccagcatcgatagcgctgtcagtccttgctagagatttgaaccccatttgttgagaatcttctggtgctcccccgtgtaatacacaaacatacatgaaattgaatgctagctgatctctgggggtaattgcactaggaatgctgtaggttttcgtgtatctcggattgtttgtcgactgacatcgcctgagaagcctcaactcatcatccagttcgatttgtgtatataagtgtatcatctgtaacaatgttctttagatgagctaggaggcgtctgctgccaaaggaactgaactgttgtactgctgttgtaatataataatgcatttgtcaaatttaaagaaagttagccatcctgctacaagagaactcttgata

SEQ ID NO: 14643 - DNA, 1868 bp, Zea Mays
gagagaggaaagctctcgttcctagcttccttctcttcaactaagcgagcgaatccaacccatcccatccatttctcccttccctgttcacggattccaatccttcctccacaccccaccctcccttcgcctccacatccaccaccatccaatccgcgcgggtgcttcgccaccctatcccgattgctacctcctcgtggtgggcgccgctccgatccgcccgatccgcgctgctcctggggctccggcgcgcggcggcgagcggcggaggcggcgcaggaatggaatccgaggacgatatgcacgacgcaaacgactccgccgaagatgacttctacagcggcggggaggctggtctcgccgccagcgacgacggagacgcagactacgacttcgcggaccacgactccgacgactccgcggagctcctctcccacagacagcagtatattgagtgaagttgatatcaagcggcgccaagaggatgacataaatagggtttcaactgttctttcaatttccaaaccagaggcatgtgttcttctccgcaactataactggagtgttagtaaggtgcatgacgaatggtttgctgatgaagagcgtgttcggaaggtggttggtttaccagagaagcatattgaaatgccaaatgacagagaagtaacatgtggaatatgtttcgaaagttgccctctcggatcgatgagtgctgctgcatgtgagaggactggtggattttatgcttgtaaccgctatgagtcagcaaggcaagaaggagtgtatgatgaatctgaaaggagaagagaaatggcaaagaactcgcttgagagatatacacattattatgaacgatgggcagccaatcagtcgtcgaggcaaaaggcactgggggaccttcaaagcctacagaacgacaagcttgaaaggttaagtgacatacaaagtcaacctgagtcacagctgaagttcattatagaggcatggttacagattgtcgaatgcagaagggtattgaagtggacttatgcctatggattttacctgccagagcatgagcatgccaaaagacagttctttgaatatctgcaaggtgaggcagaatcaggattggagcggctacatcaatgtgcagagaaagaacttcaaatataccttgatgcagaatctccctcgaaagacttcaatgatttccgtacaaagttggctggattaactagtgtgactcgcaattattttgaaaacctcgtccgggctctggaaactggattaaatgatgtaggtccttccactagccatggtacatgcagcaaaagcgcaacttcgaagagcctcggtggtaaaagtaagagtggcaagaaccgagcatcaagcaccagttccaagtcgggtggctcaagccgaggtgtggatgatagtaacatatggacgtgcgatcagtgcacatatgcaaaccccaaatctgccagagcctgccaggcttgtgatcaccagcatcgatagcgctgtcagtccttgctagagatttgaaccccatttgttgagaatcttctggtgctcccccgtgtaatacacaaacatacatgaaattgaatgctagctgatctctgggggtaattgcactaggaatgctgtaggttttcgtgtatctcggattgtttgtcgactgacatcgcctgagaagcctcaactcatcatccagttcgatttgtgtatataagtgtatcatctgtaacaatgttctttagatgagctaggaggcgtctgctgccaaaggaactgaactgttgtactgctgttgtaatataataatgcatttgtcaaatttaaagaaagttagccatcctgctacaagagaactcttgata

SEQ ID NO: 14644 - DNA, 2354 bp, Zea Mays
gagagaggaaagctctcgttcctagcttccttctcttcaactaagcgagcgaatccaacccatcccatccatttctcccttccctgttcacggattccaatccttcctccacaccccaccctcccttcgcctccacatccaccaccatccaatccgcgcgggtgcttcgccaccctatcccgattgctacctcctcgtggtgggcgccgctccgatccgcccgatccgcgctgctcctggggctccggcgcgcggcggcgagcggcggaggcggcgcaggaatggaatccgaggacgatatgcacgacgcaaacgactccgccgaagatgacttctacagcggcggggaggctggtctcgccgccagcgacgacggagacgcagactacgacttcgcggaccacgactccgacgactccgcggagctcctctcccacagacagcagcaaaattacagtatattgagtgaagttgatatcaagcggcgccaagaggatgacataaatagggtttcaactgttctttcaatttccaaaccagaggcatgtgttcttctccgcaactataactggagtgttagtaaggtgcatgacgaatggtttgctgatgaagagcgtgttcggaaggtggttggtttaccagagaagcatattgaaatgccaaatgacagagaagtaacatgtggaatatgtttcgaaagttgccctctcggatcgatgagtgctgctgcatgtggtcatcctttctgcggtacatgttggcgaggttacattagcactgctataagtgatggtccgggatgcttgatgctgaggtgtcctgatccgtcctgtgctgctgctgttggacaagatatgataaattcactggctgatgttgaggatacagaaaagtatgggcgatatcttcgcagatcttacattgaagataatagaaagacaaaatggtgtcctgcgcctggatgtgaatatgcagcggaattcgtcatgggcagtggcagctatgacgttaattgcaactgttcatatgggttttgttggaattgcaccgaggaagctcatcgtccagtagactgtgccactgtttcgaagtggatcctcaagaacagtgcggagtcggagaatatgaactggatactggctaattcaaagccttgtcccaaatgcaagcggcctattgaaaaaaatcagggatgcatgcacatcacatgcactccaccatgcaaatttgagttctgctggctatgtcttggtccatggtcagagcatggagagaggactggtggattttatgcttgtaaccgctatgagtcagcaaggcaagaaggagtgtatgatgaatctgaaaggagaagagaaatggcaaagaactcgcttgagagatatacacattattatgaacgatgggcagccaatcagtcgtcgaggcaaaaggcactgggggaccttcaaagcctacagaacgacaagcttgaaaggttaagtgacatacaaagtcaacctgagtcacagctgaagttcattatagaggcatggttacagattgtcgaatgcagaagggtattgaagtggacttatgcctatggattttacctgccagagcatgagcatgccaaaagacagttctttgaatatctgcaaggtgaggcagaatcaggattggagcggctacatcaatgtgcagagaaagaacttcaaatataccttgatgcagaatctccctcgaaagacttcaatgatttccgtacaaagttggctggattaactaggtccttccactagccatggtacatgcagcaaaagcgcaacttcgaagagcctcggtggtaaaagtaagagtggcaagaaccgagcatcaagcaccagttccaagtcgggtggctcaagccgaggtgtggatgatagtaacatatggacgtgcgatcagtgcacatatgcaaaccccaaatctgccagagcctgccaggcttgtgatcaccagcatcgatagcgctgtcagtccttgctagagatttgaaccccatttgttgagaatcttctggtgctcccccgtgtaatacacaaacatacatgaaattgaatgctagctgatctctgggggtaattgcactaggaatgctgtaggttttcgtgtatctcggattgtttgtcgactgacatcgcctgagaagcctcaactcatcatccagttcgatttgtgtatataagtgtatcatctgtaacaatgttctttagatgagctaggaggcgtctgctgccaaaggaactgaactgttgtactgctgttgtaatataataatgcatttgtcaaatttaaagaaagttagccatcctgctacaagagaactcttgata

SEQ ID NO: 14645 - DNA, 2405 bp, Zea Mays
gagagaggaaagctctcgttcctagcttccttctcttcaactaagcgagcgaatccaacccatcccatccatttctcccttccctgttcacggattccaatccttcctccacaccccaccctcccttcgcctccacatccaccaccatccaatccgcgcgggtgcttcgccaccctatcccgattgctacctcctcgtggtgggcgccgctccgatccgcccgatccgcgctgctcctggggctccggcgcgcggcggcgagcggcggaggcggcgcaggaatggaatccgaggacgatatgcacgacgcaaacgactccgccgaagatgacttctacagcggcggggaggctggtctcgccgccagcgacgacggagacgcagactacgacttcgcggaccacgactccgacgactccgcggagctcctctcccacagacagcagtatattgagtgaagttgatatcaagcggcgccaagaggatgacataaatagggtttcaactgttctttcaatttccaaaccagaggcatgtgttcttctccgcaactataactggagtgttagtaaggtgcatgacgaatggtttgctgatgaagagcgtgttcggaaggtggttggtttaccagagaagcatattgaaatgccaaatgacagagaagtaacatgtggaatatgtttcgaaagttgccctctcggatcgatgagtgctgctgcatgtggtcatcctttctgcggtacatgttggcgaggttacattagcactgctataagtgatggtccgggatgcttgatgctgaggtgtcctgatccgtcctgtgctgctgctgttggacaagatatgataaattcactggctgatgttgaggatacagaaaagtatgggcgatatcttcgcagatcttacattgaagataatagaaagacaaaatggtgtcctgcgcctggatgtgaatatgcagcggaattcgtcatgggcagtggcagctatgacgttaattgcaactgttcatatgggttttgttggaattgcaccgaggaagctcatcgtccagtagactgtgccactgtttcgaagtggatcctcaagaacagtgcggagtcggagaatatgaactggatactggctaattcaaagccttgtcccaaatgcaagcggcctattgaaaaaaatcagggatgcatgcacatcacatgcactccaccatgcaaatttgagttctgctggctatgtcttggtccatggtcagagcatggagagaggactggtggattttatgcttgtaaccgctatgagtcagcaaggcaagaaggagtgtatgatgaatctgaaaggagaagagaaatggcaaagaactcgcttgagagatatacacattattatgaacgatgggcagccaatcagtcgtcgaggcaaaaggcactgggggaccttcaaagcctacagaacgacaagcttgaaaggttaagtgacatacaaagtcaacctgagtcacagctgaagttcattatagaggcatggttacagattgtcgaatgcagaagggtattgaagtggacttatgcctatggattttacctgccagagcatgagcatgccaaaagacagttctttgaatatctgcaaggtgaggcagaatcaggattggagcggctacatcaatgtgcagagaaagaacttcaaatataccttgatgcagaatctccctcgaaagacttcaatgatttccgtacaaagttggctggattaactagtgtgactcgcaattattttgaaaacctcgtccgggctctggaaactggattaaatgatgtaggtccttccactagccatggtacatgcagcaaaagcgcaacttcgaagagcctcggtggtaaaagtaagagtggcaagaaccgagcatcaagcaccagttccaagtcgggtggctcaagccgaggtgtggatgatagtaacatatggacgtgcgatcagtgcacatatgcaaaccccaaatctgccagagcctgccaggcttgtgatcaccagcatcgatagcgctgtcagtccttgctagagatttgaaccccatttgttgagaatcttctggtgctcccccgtgtaatacacaaacatacatgaaattgaatgctagctgatctctgggggtaattgcactaggaatgctgtaggttttcgtgtatctcggattgtttgtcgactgacatcgcctgagaagcctcaactcatcatccagttcgatttgtgtatataagtgtatcatctgtaacaatgttctttagatgagctaggaggcgtctgctgccaaaggaactgaactgttgtactgctgttgtaatataataatgcatttgtcaaatttaaagaaagttagccatcctgctacaagagaactcttgata

SEQ ID NO: 14646 - DNA, 1889 bp, Zea Mays
ccgcttcacgtcaaacgggtgaagagagttgctggagtaaaatcggcgcccatgccagcagaagcggcgaaacttccacccccaccttcccctcctgctgcgtgtgtatacatatttactcgccccggctggctcccaccacctcactccattcctgacggcggtttgaccttctgaccggagggagagagagagagagagagagaggagaatcatagctgctgcgttcgatttgcggagggctggaggggacgcgagacgggacaggacggatcttcgacggagcgttgcccgattcgtcgcagttcccggacaagggaggaaaggcgtgggaagagggaggacgcgcgttggtctccgatccaagagctttgttaacaccagagattaaaagatagcgccgtagcgcaatgaaggcaccatcgctactggttcggtgtttccctggcttgcttcccagcaaggacactagttgtgtgccaattgtgtccgagaaggatctgcagctaccatcactagccgttgaaataattccctcaaaggtgctcacccgtacaaatatgctggagagaaggttgatgtgcaaggttttgatattttcaagggtaaagttagtgtagcagatatgatatccttctcaccttctgaagtagcatcatcaaaatatgatggagctctgaaaagctgggagaattctattactcttgtcaacattattcgaaatgagatccgtgatggccagttgagcttcaggggcaagcgggttctagagcttggatgtggatctggcgtctccgggattttttcatgcttgaagggtgcatccaccgttcactttcaggacatgaacgcagaaaccatacggtgcagaacaatacccaatgttcttgcaaacctcgagcaggctcgggacaggcagaacagaccatcagaagagagccccgtgacgccatcccggcagctcttggatccaaacgtgcatttctatgccggagagtgggatgaactcccgacagttctctcggctgtgccgccacccgcggcgccagcagacctcagcttctccgaagacgatttcatggatggcggcagcagtagtcatgatggaagcagtgtagtcgtcggccaggactactgccccagaagatctaggaagctctccggtagccgccgcgcgtgggagagggctaataacgagaccgaccaggcagatggcggctacgatgtgattttggtctccgatgtcccctacgcagctaactctctgaagaagctccatgcgcttatttcaaagtgcctacgccctccgtacggagtcatgtactacgtggcatcgaagaagagctcggttgggtccaacggtggcgccaggcagctccgagctctgatggaagagggaggcgtccttggcggccacttgttgaccgaggtgtgtgacagggagatatggaagttcttcttcaagtgagcagatccagggactgggagtgggaacggcaggggaaatggatccttcctgacgttgaaatgaaacccagttttttttttggtttctatctgcagcgatgtacatacataccgcgaggcgtatagtacgtagttccattaattctttggcagcagcagcagcaacgttgaagcttcaagaatcaaatacctgtagctgagcttgcacgaatccttcgccgcctttgtagagatctgtctgctatgtgctgtgctagtgtcgttctgttaaagtacagagagcaaattgtagtgacctttttgtgtatatcgaatacacggtgatggcaattcggccggtgcatggtatgtgtgagaaactcgcgcacaatttctacatgcatctttctacacgtcgtaccatgtgtgttgttggattggct

SEQ ID NO: 14647 - DNA, 1756 bp, Zea Mays
ccgcttcacgtcaaacgggtgaagagagttgctggagtaaaatcggcgcccatgccagcagaagcggcgaaacttccacccccaccttcccctcctgctgcgtgtgtatacatatttactcgccccggctggctcccaccacctcactccattcctgacggcggtttgaccttctgaccggagggagagagagagagagagagagaggagaatcatagctgctgcgttcgatttgcggagggctggaggggacgcgagacgggacaggacggatcttcgacggagcgttgcccgattcgtcgcagttcccggacaagggaggaaaggcgtgggaagagggaggacgcgcgttggtctccgatccaagagctttgttaacaccagagattaaaagatagcgccgtagcgcaatgaaggcaccatcgctactggttcggtgtttccctggcttgcttcccagcaaggacactagttgtgtgccaattgtgtccgagaaggatctgcagctaccatcactagccgttgaaataattccctcaaagagtgctcacccgtacaaatatgctggagagaaggttgatgtgcaaggttttgatattttcaagggtaaagttagtgtagcagatatgatatccttctcaccttctgaagtagcatcatcaaaatatgatggagctctgaaaagctgggagaattctattactcttgtcaacattattcgaaatgagatccgtgatggccagttgagcttcaggggcaagcgggttctagagcttggatgtggatctggcgtctccgggattttttcatgcttgaagggtgcatccaccgttcactttcaggacatgaacgcagaaaccatacggtgcagaacaatacccaatgttcttgcaaacctcgagcaggctcgggacaggcagaacagaccatcagaagagagccccgtgacgccatcccggcagctcttggatccaaacgtgcatttctatgccggagagtgggatgaactcccgacagttctctcggctgtgccgccacccgcggcgccagcagacctcagcttctccgaagacgatttcatggatggcggcagcagtagtcatgatggaagcagtgtagtcgtcggccaggactactgccccagaagatctaggaagctctccggtagccgccgcgcgtgggagagggctaataacgagaccgaccaggcagatggcggctacgatgtgattttggtctccgatgtcccctacgcagctaactctctgaagaagctccatgcgcttatttcaaagtgcctacgccctccgtacggagtcatgtactacgtggcatcgaagaagagctcggttgggtccaacggtggcgccaggcagctccgagctctgatggaagagggaggcgtccttggcggccacttgttgaccgagcgatgtacatacataccgcgaggcgtatagtacgtagttccattaattctttggcagcagcagcagcaacgttgaagcttcaagaatcaaatacctgtagctgagcttgcacgaatccttcgccgcctttgtagagatctgtctgctatgtgctgtgctagtgtcgttctgttaaagtacagagagcaaattgtagtgacctttttgtgtatatcgaatacacggtgatggcaattcggccggtgcatggtatgtgtgagaaactcgcgcacaatttctacatgcatctttctacacgtcgtaccatgtgtgttgttggattggct

SEQ ID NO: 14648 - DNA, 2068 bp, Zea Mays
ccgcttcacgtcaaacgggtgaagagagttgctggagtaaaatcggcgcccatgccagcagaagcggcgaaacttccacccccaccttcccctcctgctgcgtgtgtatacatatttactcgccccggctggctcccaccacctcactccattcctgacggcggtttgaccttctgaccggagggagagagagagagagagagagaggagaatcatagctgctgcgttcgatttgcggagggctggaggggacgcgagacgggacaggacggatcttcgacggagcgttgcccgattcgtcgcagttcccggacaagggaggaaaggcgtgggaagagggaggacgcgcgttggtctccgatccaagagctttgttaacaccagagattaaaagatagcgccgtagcgcaatgaaggcaccatcgctactggttcggtgtttccctggcttgcttcccagcaaggacactagttgtgtgccaattgtgtccgagaaggatctgcagctaccatcactagccgttgaaataattccctcaaagagtgctcacccgtacaaatatgctggagagaaggttgatgtgcaaggttttgatattttcaagggtaaagttagtgtagcagatatgatatccttctcaccttctgaagtagcatcatcaaaatatgatggagctctgaaaagctgggagaattctattactcttgtcaacattattcgaaatgagatccgtgatggccagttgagcttcaggggcaagcgggttctagagcttggatgtggatctggcgtctccgggattttttcatgcttgaagggtgcatccaccgttcactttcaggacatgaacgcagaaaccatacggtgcagaacaatacccaatgttcttgcaaacctcgagcaggctcgggacaggcagaacagaccatcagaagagagccccgtgacgccatcccggcagctcttggatccaaacgtgcatttctatgccggagagtgggatgaactcccgacagttctctcggctgtgccgccacccgcggcgccagcagacctcagcttctccgaagacgatttcatggatggcggcagcagtagtcatgatggaagcagtgtagtcgtcggccaggactactgccccagaagatctaggaagctctccggtagccgccgcgcgtgggagagggctaataacgagaccgaccaggcagatggcggctacgatgtgattttggtctccgatgtcccctacgcagctaactctctgaagaagctccatgcgcttatttcaaagctgaaatagcagtggaggcagcacgcacgacacttaaaaaaagtcgattaggttaggttcttccattgatcagaaccgggcatagctaagagtgcgtgcttcctcgtcctttcgaccggcgacgcgctgatacgaagcagcgttgttttaacggcaacagcgtctctcctgcctgcagtgcctacgccctccgtacggagtcatgtactacgtggcatcgaagaagagctcggttgggtccaacggtggcgccaggcagctccgagctctgatggaagagggaggcgtccttggcggccacttgttgaccgaggtgtgtgacagggagatatggaagttcttcttcaagtgagcagatccagggactgggagtgggaacggcaggggaaatggatccttcctgacgttgaaatgaaacccagttttttttttggtttctatctgcagcgatgtacatacataccgcgaggcgtatagtacgtagttccattaattctttggcagcagcagcagcaacgttgaagcttcaagaatcaaatacctgtagctgagcttgcacgaatccttcgccgcctttgtagagatctgtctgctatgtgctgtgctagtgtcgttctgttaaagtacagagagcaaattgtagtgacctttttgtgtatatcgaatacacggtgatggcaattcggccggtgcatggtatgtgtgagaaactcgcgcacaatttctacatgcatctttctacacgtcgtaccatgtgtgttgttggattggct

SEQ ID NO: 14649 - DNA, 1578 bp, Zea Mays
cagggggaaaaaaaagaagggttttccttggaggctaccgagcgctacttcggccgtctttgttaacaccagagattaaaagatagcgccgtagcgcaatgaaggcaccatcgctactggttcggtgtttccctggcttgcttcccagcaaggacactagttgtgtgccaattgtgtccgagaaggatctgcagctaccatcactagccgttgaaataattccctcaaagagtgctcacccgtacaaatatgctggagagaaggttgatgtgcaaggttttgatattttcaagggtaaagttagtgtagcagatatgatatccttctcaccttctgaagtagcatcatcaaaatatgatggagctctgaaaagctgggagaattctattactcttgtcaacattattcgaaatgagatccgtgatggccagttgagcttcaggggcaagcgggttctagagcttggatgtggatctggcgtctccgggattttttcatgcttgaagggtgcatccaccgttcactttcaggacatgaacgcagaaaccatacggtgcagaacaatacccaatgttcttgcaaacctcgagcaggctcgggacaggcagaacagaccatcagaagagagccccgtgacgccatcccggcagctcttggatccaaacgtgcatttctatgccggagagtgggatgaactcccgacagttctctcggctgtgccgccacccgcggcgccagcagacctcagcttctccgaagacgatttcatggatggcggcagcagtagtcatgatggaagcagtgtagtcgtcggccaggactactgccccagaagatctaggaagctctccggtagccgccgcgcgtgggagagggctaataacgagaccgaccaggcagatggcggctacgatgtgattttggtctccgatgtcccctacgcagctaactctctgaagaagctccatgcgcttatttcaaagtgcctacgccctccgtacggagtcatgtactacgtggcatcgaagaagagctcggttgggtccaacggtggcgccaggcagctccgagctctgatggaagagggaggcgtccttggcggccacttgttgaccgaggtgtgtgacagggagatatggaagttcttcttcaagtgagcagatccagggactgggagtgggaacggcaggggaaatggatccttcctgacgttgaaatgaaacccagttttttttttggtttctatctgcagcgatgtacatacataccgcgaggcgtatagtacgtagttccattaattctttggcagcagcagcagcaacgttgaagcttcaagaatcaaatacctgtagctgagcttgcacgaatccttcgccgcctttgtagagatctgtctgctatgtgctgtgctagtgtcgttctgttaaagtacagagagcaaattgtagtgacctttttgtgtatatcgaatacacggtgatggcaattcggccggtgcatggtatgtgtgagaaactcgcgcacaatttctacatgcatctttctacacgtcgtaccatgtgtgttgttggattggct

SEQ ID NO: 14650 - DNA, 1540 bp, Zea Mays
gttgattcgtactcgtgtgctttgttaacaccagagattaaaagatagcgccgtagcgcaatgaaggcaccatcgctactggttcggtgtttccctggcttgcttcccagcaaggacactagttgtgtgccaattgtgtccgagaaggatctgcagctaccatcactagccgttgaaataattccctcaaagagtgctcacccgtacaaatatgctggagagaaggttgatgtgcaaggttttgatattttcaagggtaaagttagtgtagcagatatgatatccttctcaccttctgaagtagcatcatcaaaatatgatggagctctgaaaagctgggagaattctattactcttgtcaacattattcgaaatgagatccgtgatggccagttgagcttcaggggcaagcgggttctagagcttggatgtggatctggcgtctccgggattttttcatgcttgaagggtgcatccaccgttcactttcaggacatgaacgcagaaaccatacggtgcagaacaatacccaatgttcttgcaaacctcgagcaggctcgggacaggcagaacagaccatcagaagagagccccgtgacgccatcccggcagctcttggatccaaacgtgcatttctatgccggagagtgggatgaactcccgacagttctctcggctgtgccgccacccgcggcgccagcagacctcagcttctccgaagacgatttcatggatggcggcagcagtagtcatgatggaagcagtgtagtcgtcggccaggactactgccccagaagatctaggaagctctccggtagccgccgcgcgtgggagagggctaataacgagaccgaccaggcagatggcggctacgatgtgattttggtctccgatgtcccctacgcagctaactctctgaagaagctccatgcgcttatttcaaagtgcctacgccctccgtacggagtcatgtactacgtggcatcgaagaagagctcggttgggtccaacggtggcgccaggcagctccgagctctgatggaagagggaggcgtccttggcggccacttgttgaccgaggtgtgtgacagggagatatggaagttcttcttcaagtgagcagatccagggactgggagtgggaacggcaggggaaatggatccttcctgacgttgaaatgaaacccagttttttttttggtttctatctgcagcgatgtacatacataccgcgaggcgtatagtacgtagttccattaattctttggcagcagcagcagcaacgttgaagcttcaagaatcaaatacctgtagctgagcttgcacgaatccttcgccgcctttgtagagatctgtctgctatgtgctgtgctagtgtcgttctgttaaagtacagagagcaaattgtagtgacctttttgtgtatatcgaatacacggtgatggcaattcggccggtgcatggtatgtgtgagaaactcgcgcacaatttctacatgcatctttctacacgtcgtaccatgtgtgttgttggattggct

SEQ ID NO: 14651 - DNA, 4491 bp, Zea Mays
ggaaacagggcactggccttgggacttccacggcctggaatcttctgccgtcccgccgtccctcccaccccggtggcggcggcgagaattgggagagtctggaggctgccagccggtctagtggctcggccaaggcgagcggtggtcccagcgccgttctttccgcctggtgccggagtttcagtcttcaaggctgtgctcggagtttctgtgttctaggggccgggagcttgcaggttcatcgccgttggcgccgaacttgcctgccgtacagtctttctagtgccaaagttgaattttgaggaactgtgaagccgctttaagcaattacctttgccgaactttcctctaaaggcttgaccttttgggttccggagttcattgctgatcgacgggtcttggagtttttgtctactacctgcgttatgaacaggacatttctgcataagaaaagttgtctcctgtgcagatagccagatactcctgctttgctagtatatcaaattgcttcttgtgtttgaacaaagattctgttcagctagaagacagtgctctcctttatatcctgtctgtagctcaatacagtgctccaaatccatttcggcgtactaggtgtggataaggatccttgcctcgacgagtggagcaaagccatggatgtgcctacgcctcccaaccgtgccggctgcaacagtaacatcggcagccccatgcaatcttttgatgatccctttggtgttgctgccatgacgagctttgatggatactcggagctctgcagcccatcagttgctgatcacatattctccctgctgaatgatccctccgctgcgcaacagatggttgccatgtggtcatccttgggctcatctccgcgtgcttcagctgtgagagaagacatgtcgtttgacacctttcctgggcctgtggacgggacatcgtcacttgctcaaaggttcaactcagcagcagcatcgagtccaactggagtcgacagagggctaaaagagtcagatgggcttgttcttccaagtaatggctcacagcaagggagtagcatcattccgaggtctgttggcaacgctcttgcagacaggatgctcatggcgctatctttgttcaggaagtcattgagtgatggtgttcttgcccaagtctggatgcctgttgagcacaatggtcgtgtcgtgttgagtacatctgagcagccctatttacttgaccaggatcttgcaggttacagagaagtttctagaaatttcctgttttcagttaaggaggagcctggtctgcacctagggcttccagggagggtcttcatatccggggtgccagagtggacgtcaagtgttatctattacagtaagccagagtatttgagaatggagcatgctcttcttcatgaaatacaagggtcacttgctatgccagtttacgatcccagcaagggctcttgttgtgcagttcttgaacttgtcacaaacaaggagaaacctaattttgatgcagagatggacattgctgtgaacttgcagacaacaacagatcgcagcaatcagaaggtttactctgaaaatcagaaatctgcttttactgagatattggatgttctaagagctatttgtcatgcacacatgcttcctttggcccttacatgggtccctacatcaaatggcatcgctaatggtttttgtgttggaaagaatattgggatagatccgcaaccaggaaaagcagcacttcgtatccatgaatcagcttgctatgttaatgatgcaaagatgcaggggtttcttcatgcatgtgctgatcgtcatcttgagaaggggcagggtattgcaggccgagcccttaaatcgaatctgccattcttctcacctgatataagagagtacagtatcgaagactacccgcttgcacaccatgctcgtaagtttggtctgcacgctgctgtagccatacggctgaggagtacgtacaccagttacgatgactacatactagaattctttctcccagtcaactgcaagggctgtggagagcagcagatgttattaaacaacctttccagcacaatgcaaagaatatgcaaaagcttgcgaacagtctctgaggcagagattgaaaatgttagtgctactgcagcaatgtttgagaagactagtggaacttgtttaccaactggtaactctgaaagttcctcacatgatgaccagccaatcacagaatctgcactccaggatctatctttgggtgacaaacaaggagacagagaacctgacaagccacagagaagctcaatgcgagttgcagataaaaagcgcagtgcatctgaaaagaactttagtctggatgttcttcgcaaatacttctctgggagcctgagggatgctgcaatgagccttggtgtttgtccaacgacattgaaacgaatatgcagacaacatggaatttcccgatggccatctcgaaagataaacaaggtcaatcgttcattgaagaagatagagaaggtcattaaatcagttcacggtgtggatagatccttgcagtacgatcctgctactgggtctcttgttcctgcaacctctcttccggaaaagatgccattctctgcttgcgatacattgcctacttcatctcttgggagagcagtggaggaaacatgtagcccaaaatcagaacaagatttctcttcgcctgatgggtggcaaagagaaactagccaatttcatgtttctggtatacctaaaaggggaggcgatgaagttcggacgttggcaaacaacaacaaaggcagaagaaactatgtttctggtattgcaaatatcacacagcattcaaactctgaaggcacacatggtccttcatatcccaatcccattggtgctgttaattctctgcatactggagaaacaggcaacatcgattctctgacctccctccacccaagcatggatggcattgaaggccaaacaacagtaaggaactcaccatttgtgcaacaagcagatgtcactatggtcgatggtcatgacaccaaggagcagacactcccttccacctctggcatgaccgattcttcgagcggcagcgcctcaagcgagcctactttcaaggggaacccaggacgtgccctcaaagaccgaagcagccctgcactgaccgtgaaagctacctacaatggcgacaccgtccggttcaagtttgtgccagcaaggggctggtaccacttgctggaagagatagcaaagaggttcaagctgacggctggagcattccagctcaaatacaaggacgatgaggacgagtgggtgatcctggcgaacgatgccgacctccaggagtgcatggacgtcctggactcgatcagctcacgcaacatgaagctgcaggtgcgcgacctctcctgccacgtgggcagctcgggcagcagcagcagctgcttgcaggtggaagcgcatagctcgtgacagaacagaagcctaggttaccgcccttagcctgttgtagtaggcccagtatcctgttgtcgccatagaggttccttgtccatgttcacgccatgttgtcgtatggaatgtacaaatggcgagtgtagaaaaggaataaagtgtcatactcttcgcacggttgaaacacgaaacgatgccgtgaaggtttttgtcataatctgttgttggtttcaaaagtcctggcaataatctgttgtcatgaagatgagttcatggcttaagctgcgatacgaagtttctgaacttgctgtgttccaaaatttcagtctggttcttccggtccccttcggtctgtatcattgatggtttgctggtggtaccctgtagtgttacagaaccatgtggacgtgatgcagtttggagtcgacttccagaaatcttttctccgatctcctgcaagtgacaacctgacattgtggctttgattgcccgggttggaggttgctttccagtcgcagcgagtgggttgggcgtgctggtgccgctgaaggcgtggagcagctggtgagtctggacgggagagctactgtttgtattcatgcatcaggctgatcagaagtcgtccagctgggaagaataacagctcgccctcgccgtcagggaagggcaagctcggcgtcgagtggaatcaggcttatctgctaccaatggcgcgacttgcagaatgcttccctggtagggaacggctgggctgtcaattcgcctggaagtggggaagctttatgctactgtgtgtgaaggtggtagtgcatgcgcgcccagtctcctagatgtagcgagccaaatatgtaactagtagtttggctcaaaaaattagaaacggcgagaagcattgtatatttttaaagggtcaatgtttttttaatttttatataagtttcaatctcttacgggatggacttcgaagttgatacatgttcttacataattgatctataacttatcatacgagaaaaccagttcttaatagccgtcc

SEQ ID NO: 14652 - DNA, 4996 bp, Zea Mays
cttccacggcctggaatcttctgccgtcccgccgtccctcccaccccggtggcggcggtgggtgtcccagtcgcctttgattccttccccagtcttcccctcagatctgcgatccttatccctcccggttccccgtcctctcctcggccccagtcgaggagacgccgctgcggctctcgactcctgttgcaataattttgtaggcgagaattgggagagtctggaggctgccagccggtctagtggctcggccaaggcgagcggtggtcccagcgccgttctttccgcctggtgccggagtttcagtcttcaaggctgtgctcggagtttctgtgttctaggggccgggaggtgtgtgctggtgtgaatttggctttcttttgatccaattggtgcttaatttcagcctgtcgaaagaggcttctagcttgcaggttcatcgccgttggcgccgaacttgcctgccgtacagtctttctagtgccaaagttgaattttgaggaactgtgaagccgctttaagcaattacctttgccgaactttcctctaaaggcttgaccttttgggttccggagttcattgctgatcgacgggtcttggagtttttgtctactacctgcgttatgaacaggacatttctgcataagaaaagttgtctcctgtgcagatagccagatactcctgctttgctagtatatcaaattgcttcttgtgtttgaacaaagattctgttcagctagaagacagtgctctcctttatatcctgtctgtagctcaatacagtgctccaaatccatttcggcgtactaggtgtggataaggatccttgcctcgacgagtggagcaaagccatggatgtgcctacgcctcccaaccgtgccggctgcaacagtaacatcggcagccccatgcaatcttttgatgatccctttggtgttgctgccatgacgagctttgatggatactcggagctctgcagcccatcagttgctgatcacatattctccctgctgaatgatccctccgctgcgcaacagatggttgccatgtggtcatccttgggctcatctccgcgtgcttcagctgtgagagaagacatgtcgtttgacacctttcctgggcctgtggacgggacatcgtcacttgctcaaaggttcaactcagcagcagcatcgagtccaactggagtcgacagagggctaaaagagtcagatgggcttgttcttccaagtaatggctcacagcaagggagtagcatcattccgaggtctgttggcaacgctcttgcagacaggatgctcatggcgctatctttgttcaggaagtcattgagtgatggtgttcttgcccaagtctggatgcctgttgagcacaatggtcgtgtcgtgttgagtacatctgagcagccctatttacttgaccaggatcttgcaggttacagagaagtttctagaaatttcctgttttcagttaaggaggagcctggtctgcacctagggcttccagggagggtcttcatatccggggtgccagagtggacgtcaagtgttatctattacagtaagccagagtatttgagaatggagcatgctcttcttcatgaaatacaagggtcacttgctatgccagtttacgatcccagcaagggctcttgttgtgcagttcttgaacttgtcacaaacaaggagaaacctaattttgatgcagagatggacattgctgtgaacttgcagacaacaacagatcgcagcaatcagaaggtttactctgaaaatcagaaatctgcttttactgagatattggatgttctaagagctatttgtcatgcacacatgcttcctttggcccttacatgggtccctacatcaaatggcatcgctaatggtttttgtgttggaaagaatattgggatagatccgcaaccaggaaaagcagcacttcgtatccatgaatcagcttgctatgttaatgatgcaaagatgcaggggtttcttcatgcatgtgctgatcgtcatcttgagaaggggcagggtattgcaggccgagcccttaaatcgaatctgccattcttctcacctgatataagagagtacagtatcgaagactacccgcttgcacaccatgctcgtaagtttggtctgcacgctgctgtagccatacggctgaggagtacgtacaccagttacgatgactacatactagaattctttctcccagtcaactgcaagggctgtggagagcagcagatgttattaaacaacctttccagcacaatgcaaagaatatgcaaaagcttgcgaacagtctctgaggcagagattgaaaatgttagtgctactgcagcaatgtttgagaagactagtggaacttgtttaccaactggtaactctgaaagttcctcacatgatgaccagccaatcacagaatctgcactccaggatctatctttgggtgacaaacaaggagacagagaacctgacaaggtgctgcgctatcattctatctagtcattcaaaattgttagttgagatatgtgacttctttgacacctaatcataagtatctaaaccacttgcaattcttttcaagatggactacattcaattttcatgctagtagattctgatgcgtgcatttttttatttaaaaatatggaacctttgttattcttttcaagatggattacattcagttttcatgctagtagaatctgatgcgtgcatttttttatttaaaaatatggaacctttgttattgcacccttttgatgagaaaccttgttatgtgcagccacagagaagctcaatgcgagttgcagataaaaagcgcagtgcatctgaaaagaactttagtctggatgttcttcgcaaatacttctctgggagcctgagggatgctgcaatgagccttggtgtttgtccaacgacattgaaacgaatatgcagacaacatggaatttcccgatggccatctcgaaagataaacaaggtcaatcgttcattgaagaagatagagaaggtcattaaatcagttcacggtgtggatagatccttgcagtacgatcctgctactgggtctcttgttcctgcaacctctcttccggaaaagatgccattctctgcttgcgatacattgcctacttcatctcttgggagagcagtggaggaaacatgtagcccaaaatcagaacaagatttctcttcgcctgatgggtggcaaagagaaactagccaatttcatgtttctggtatacctaaaaggggaggcgatgaagttcggacgttggcaaacaacaacaaaggcagaagaaactatgtttctggtattgcaaatatcacacagcattcaaactctgaaggcacacatggtccttcatatcccaatcccattggtgctgttaattctctgcatactggagaaacaggcaacatcgattctctgacctccctccacccaagcatggatggcattgaaggccaaacaacagtaaggaactcaccatttgtgcaacaagcagatgtcactatggtcgatggtcatgacaccaaggagcagacactcccttccacctctggcatgaccgattcttcgagcggcagcgcctcaagcgagcctactttcaaggggaacccaggacgtgccctcaaagaccgaagcagccctgcactgaccgtgaaagctacctacaatggcgacaccgtccggttcaagtttgtgccagcaaggggctggtaccacttgctggaagagatagcaaagaggttcaagctgacggctggagcattccagctcaaatacaaggacgatgaggacgagtgggtgatcctggcgaacgatgccgacctccaggagtgcatggacgtcctggactcgatcagctcacgcaacatgaagctgcaggtgcgcgacctctcctgccacgtgggcagctcgggcagcagcagcagctgcttgcaggtggaagcgcatagctcgtgacagaacagaagcctaggttaccgcccttagcctgttgtagtaggcccagtatcctgttgtcgccatagaggttccttgtccatgttcacgccatgttgtcgtatggaatgtacaaatggcgagtgtagaaaaggaataaagtgtcatactcttcgcacggttgaaacacgaaacgatgccgtgaaggtttttgtcataatctgttgttggtttcaaaagtcctggcaataatctgttgtcatgaagatgagttcatggcttaagctgcgatacgaagtttctgaacttgctgtgttccaaaatttcagtctggttcttccggtccccttcggtctgtatcattgatggtttgctggtggtaccctgtagtgttacagaaccatgtggacgtgatgcagtttggagtcgacttccagaaatcttttctccgatctcctgcaagtgacaacctgacattgtggctttgattgcccgggttggaggttgctttccagtcgcagcgagtgggttgggcgtgctggtgccgctgaaggcgtggagcagctggtgagtctggacgggagagctactgtttgtattcatgcatcaggctgatcagaagtcgtccagctgggaagaataacagctcgccctcgccgtcagggaagggcaagctcggcgtcgagtggaatcaggcttatctgctaccaatggcgcgacttgcagaatgcttccctggtagggaacggctgggctgtcaattcgcctggaagtggggaagctttatgctactgtgtgtgaaggtggtagtgcatgcgcgcccagtctcctagatgtagcgagccaaatatgtaactagtagtttggctcaaaaaattagaaacggcgagaagcattgtatatttttaaagggtcaatgtttttttaatttttatataagtttcaatctcttacgggatggacttcgaagttgatacatgttcttacataattgatctataacttatcatacgagaaaaccagttcttaatagccgtcc

SEQ ID NO: 14653 - DNA, 4673 bp, Zea Mays
ctggaatcttctgccgtcccgccgtccctcccaccccggtggcggcggtgggtgtcccagtcgcctttgattccttccccagtcttcccctcagatctgcgatccttatccctcccggttccccgtcctctcctcggccccagtcgaggagacgccgctgcggctctcgactcctgttgcaataattttgtaggcgagaattgggagagtctggaggctgccagccggtctagtggctcggccaaggcgagcggtggtcccagcgccgttctttccgcctggtgccggagtttcagtcttcaaggctgtgctcggagtttctgtgttctaggggccgggaggtgtgtgctggtgtgaatttggctttcttttgatccaattggtgcttaatttcagcctgtcgaaagaggcttctagcttgcaggttcatcgccgttggcgccgaacttgcctgccgtacagtctttctagtgccaaagttgaattttgaggaactgtgaagccgctttaagcaattacctttgccgaactttcctctaaaggcttgaccttttgggttccggagttcattgctgatcgacgggtcttggagtttttgtctactacctgcgttatgaacaggacatttctgcataagaaaagttgtctcctgtgcagatagccagatactcctgctttgctagtatatcaaattgcttcttgtgtttgaacaaagattctgttcagctagaagacagtgctctcctttatatcctgtctgtagctcaatacagtgctccaaatccatttcggcgtactaggtgtggataaggatccttgcctcgacgagtggagcaaagccatggatgtgcctacgcctcccaaccgtgccggctgcaacagtaacatcggcagccccatgcaatcttttgatgatccctttggtgttgctgccatgacgagctttgatggatactcggagctctgcagcccatcagttgctgatcacatattctccctgctgaatgatccctccgctgcgcaacagatggttgccatgtggtcatccttgggctcatctccgcgtgcttcagctgtgagagaagacatgtcgtttgacacctttcctgggcctgtggacgggacatcgtcacttgctcaaaggttcaactcagcagcagcatcgagtccaactggagtcgacagagggctaaaagagtcagatgggcttgttcttccaagtaatggctcacagcaagggagtagcatcattccgaggtctgttggcaacgctcttgcagacaggatgctcatggcgctatctttgttcaggaagtcattgagtgatggtgttcttgcccaagtctggatgcctgttgagcacaatggtcgtgtcgtgttgagtacatctgagcagccctatttacttgaccaggatcttgcaggttacagagaagtttctagaaatttcctgttttcagttaaggaggagcctggtctgcacctagggcttccagggagggtcttcatatccggggtgccagagtggacgtcaagtgttatctattacagtaagccagagtatttgagaatggagcatgctcttcttcatgaaatacaagggtcacttgctatgccagtttacgatcccagcaagggctcttgttgtgcagttcttgaacttgtcacaaacaaggagaaacctaattttgatgcagagatggacattgctgtgaacttgcagacaacaacagatcgcagcaatcagaaggtttactctgaaaatcagaaatctgcttttactgagatattggatgttctaagagctatttgtcatgcacacatgcttcctttggcccttacatgggtccctacatcaaatggcatcgctaatggtttttgtgttggaaagaatattgggatagatccgcaaccaggaaaagcagcacttcgtatccatgaatcagcttgctatgttaatgatgcaaagatgcaggggtttcttcatgcatgtgctgatcgtcatcttgagaaggggcagggtattgcaggccgagcccttaaatcgaatctgccattcttctcacctgatataagagagtacagtatcgaagactacccgcttgcacaccatgctcgtaagtttggtctgcacgctgctgtagccatacggctgaggagtacgtacaccagttacgatgactacatactagaattctttctcccagtcaactgcaagggctgtggagagcagcagatgttattaaacaacctttccagcacaatgcaaagaatatgcaaaagcttgcgaacagtctctgaggcagagattgaaaatgttagtgctactgcagcaatgtttgagaagactagtggaacttgtttaccaactggtaactctgaaagttcctcacatgatgaccagccaatcacagaatctgcactccaggatctatctttgggtgacaaacaaggagacagagaacctgacaagagaagctcaatgcgagttgcagataaaaagcgcagtgcatctgaaaagaactttagtctggatgttcttcgcaaatacttctctgggagcctgagggatgctgcaatgagccttggtgtttgtccaacgacattgaaacgaatatgcagacaacatggaatttcccgatggccatctcgaaagataaacaaggtcaatcgttcattgaagaagatagagaaggtcattaaatcagttcacggtgtggatagatccttgcagtacgatcctgctactgggtctcttgttcctgcaacctctcttccggaaaagatgccattctctgcttgcgatacattgcctacttcatctcttgggagagcagtggaggaaacatgtagcccaaaatcagaacaagatttctcttcgcctgatgggtggcaaagagaaactagccaatttcatgtttctggtatacctaaaaggggaggcgatgaagttcggacgttggcaaacaacaacaaaggcagaagaaactatgtttctggtattgcaaatatcacacagcattcaaactctgaaggcacacatggtccttcatatcccaatcccattggtgctgttaattctctgcatactggagaaacaggcaacatcgattctctgacctccctccacccaagcatggatggcattgaaggccaaacaacagtaaggaactcaccatttgtgcaacaagcagatgtcactatggtcgatggtcatgacaccaaggagcagacactcccttccacctctggcatgaccgattcttcgagcggcagcgcctcaagcgagcctactttcaaggggaacccaggacgtgccctcaaagaccgaagcagccctgcactgaccgtgaaagctacctacaatggcgacaccgtccggttcaagtttgtgccagcaaggggctggtaccacttgctggaagagatagcaaagaggttcaagctgacggctggagcattccagctcaaatacaaggacgatgaggacgagtgggtgatcctggcgaacgatgccgacctccaggagtgcatggacgtcctggactcgatcagctcacgcaacatgaagctgcaggtgcgcgacctctcctgccacgtgggcagctcgggcagcagcagcagctgcttgcaggtggaagcgcatagctcgtgacagaacagaagcctaggttaccgcccttagcctgttgtagtaggcccagtatcctgttgtcgccatagaggttccttgtccatgttcacgccatgttgtcgtatggaatgtacaaatggcgagtgtagaaaaggaataaagtgtcatactcttcgcacggttgaaacacgaaacgatgccgtgaaggtttttgtcataatctgttgttggtttcaaaagtcctggcaataatctgttgtcatgaagatgagttcatggcttaagctgcgatacgaagtttctgaacttgctgtgttccaaaatttcagtctggttcttccggtccccttcggtctgtatcattgatggtttgctggtggtaccctgtagtgttacagaaccatgtggacgtgatgcagtttggagtcgacttccagaaatcttttctccgatctcctgcaagtgacaacctgacattgtggctttgattgcccgggttggaggttgctttccagtcgcagcgagtgggttgggcgtgctggtgccgctgaaggcgtggagcagctggtgagtctggacgggagagctactgtttgtattcatgcatcaggctgatcagaagtcgtccagctgggaagaataacagctcgccctcgccgtcagggaagggcaagctcggcgtcgagtggaatcaggcttatctgctaccaatggcgcgacttgcagaatgcttccctggtagggaacggctgggctgtcaattcgcctggaagtggggaagctttatgctactgtgtgtgaaggtggtagtgcatgcgcgcccagtctcctagatgtagcgagccaaatatgtaactagtagtttggctcaaaaaattagaaacggcgagaagcattgtatatttttaaagggtcaatgtttttttaatttttatataagtttcaatctcttacgggatggacttcgaagttgatacatgttcttacataattgatctataacttatcatacgagaaaaccagttcttaatagccgtcc

SEQ ID NO: 14654 - DNA, 4512 bp, Zea Mays
ctggaatcttctgccgtcccgccgtccctcccaccccggtggcggcggtgggtgtcccagtcgcctttgattccttccccagtcttcccctcagatctgcgatccttatccctcccggttccccgtcctctcctcggccccagtcgaggagacgccgctgcggctctcgactcctgttgcaataattttgtaggcgagaattgggagagtctggaggctgccagccggtctagtggctcggccaaggcgagcggtggtcccagcgccgttctttccgcctggtgccggagtttcagtcttcaaggctgtgctcggagtttctgtgttctaggggccgggaggttcatcgccgttggcgccgaacttgcctgccgtacagtctttctagtgccaaagttgaattttgaggaactgtgaagccgctttaagcaattacctttgccgaactttcctctaaaggcttgaccttttgggttccggagttcattgctgatcgacgggtcttggagtttttgtctactacctgcgttatgaacaggacatttctgcataagaaaagttgtctcctgtgcagatagccagatactcctgctttgctagtatatcaaattgcttcttgtgtttgaacaaagattctgttcagctagaagacagtgctctcctttatatcctgtctgtagctcaatacagtgctccaaatccatttcggcgtactaggtgtggataaggatccttgcctcgacgagtggagcaaagccatggatgtgcctacgcctcccaaccgtgccggctgcaacagtaacatcggcagccccatgcaatcttttgatgatccctttggtgttgctgccatgacgagctttgatggatactcggagctctgcagcccatcagttgctgatcacatattctccctgctgaatgatccctccgctgcgcaacagatggttgccatgtggtcatccttgggctcatctccgcgtgcttcagctgtgagagaagacatgtcgtttgacacctttcctgggcctgtggacgggacatcgtcacttgctcaaaggttcaactcagcagcagcatcgagtccaactggagtcgacagagggctaaaagagtcagatgggcttgttcttccaagtaatggctcacagcaagggagtagcatcattccgaggtctgttggcaacgctcttgcagacaggatgctcatggcgctatctttgttcaggaagtcattgagtgatggtgttcttgcccaagtctggatgcctgttgagcacaatggtcgtgtcgtgttgagtacatctgagcagccctatttacttgaccaggatcttgcaggttacagagaagtttctagaaatttcctgttttcagttaaggaggagcctggtctgcacctagggcttccagggagggtcttcatatccggggtgccagagtggacgtcaagtgttatctattacattcttgaacttgtcacaaacaaggagaaacctaattttgatgcagagatggacattgtttgcgatgccttgcaggctgtgaacttgcagacaacaacagatcgcagcaatcagaaggtttactctgaaaatcagaaatctgcttttactgagatattggatgttctaagagctatttgtcatgcacacatgcttcctttggcccttacatgggtccctacatcaaatggcatcgctaatggtttttgtgttggaaagaatattgggatagatccgcaaccaggaaaagcagcacttcgtatccatgaatcagcttgctatgttaatgatgcaaagatgcaggggtttcttcatgcatgtgctgatcgtcatcttgagaaggggcagggtattgcaggccgagcccttaaatcgaatctgccattcttctcacctgatataagagagtacagtatcgaagactacccgcttgcacaccatgctcgtaagtttggtctgcacgctgctgtagccatacggctgaggagtacgtacaccagttacgatgactacatactagaattctttctcccagtcaactgcaagggctgtggagagcagcagatgttattaaacaacctttccagcacaatgcaaagaatatgcaaaagcttgcgaacagtctctgaggcagagattgaaaatgttagtgctactgcagcaatgtttgagaagactagtggaacttgtttaccaactggtaactctgaaagttcctcacatgatgaccagccaatcacagaatctgcactccaggatctatctttgggtgacaaacaaggagacagagaacctgacaagccacagagaagctcaatgcgagttgcagataaaaagcgcagtgcatctgaaaagaactttagtctggatgttcttcgcaaatacttctctgggagcctgagggatgctgcaatgagccttggtgtttgtccaacgacattgaaacgaatatgcagacaacatggaatttcccgatggccatctcgaaagataaacaaggtcaatcgttcattgaagaagatagagaaggtcattaaatcagttcacggtgtggatagatccttgcagtacgatcctgctactgggtctcttgttcctgcaacctctcttccggaaaagatgccattctctgcttgcgatacattgcctacttcatctcttgggagagcagtggaggaaacatgtagcccaaaatcagaacaagatttctcttcgcctgatgggtggcaaagagaaactagccaatttcatgtttctggtatacctaaaaggggaggcgatgaagttcggacgttggcaaacaacaacaaaggcagaagaaactatgtttctggtattgcaaatatcacacagcattcaaactctgaaggcacacatggtccttcatatcccaatcccattggtgctgttaattctctgcatactggagaaacaggcaacatcgattctctgacctccctccacccaagcatggatggcattgaaggccaaacaacagtaaggaactcaccatttgtgcaacaagcagatgtcactatggtcgatggtcatgacaccaaggagcagacactcccttccacctctggcatgaccgattcttcgagcggcagcgcctcaagcgagcctactttcaaggggaacccaggacgtgccctcaaagaccgaagcagccctgcactgaccgtgaaagctacctacaatggcgacaccgtccggttcaagtttgtgccagcaaggggctggtaccacttgctggaagagatagcaaagaggttcaagctgacggctggagcattccagctcaaatacaaggacgatgaggacgagtgggtgatcctggcgaacgatgccgacctccaggagtgcatggacgtcctggactcgatcagctcacgcaacatgaagctgcaggtgcgcgacctctcctgccacgtgggcagctcgggcagcagcagcagctgcttgcaggtggaagcgcatagctcgtgacagaacagaagcctaggttaccgcccttagcctgttgtagtaggcccagtatcctgttgtcgccatagaggttccttgtccatgttcacgccatgttgtcgtatggaatgtacaaatggcgagtgtagaaaaggaataaagtgtcatactcttcgcacggttgaaacacgaaacgatgccgtgaaggtttttgtcataatctgttgttggtttcaaaagtcctggcaataatctgttgtcatgaagatgagttcatggcttaagctgcgatacgaagtttctgaacttgctgtgttccaaaatttcagtctggttcttccggtccccttcggtctgtatcattgatggtttgctggtggtaccctgtagtgttacagaaccatgtggacgtgatgcagtttggagtcgacttccagaaatcttttctccgatctcctgcaagtgacaacctgacattgtggctttgattgcccgggttggaggttgctttccagtcgcagcgagtgggttgggcgtgctggtgccgctgaaggcgtggagcagctggtgagtctggacgggagagctactgtttgtattcatgcatcaggctgatcagaagtcgtccagctgggaagaataacagctcgccctcgccgtcagggaagggcaagctcggcgtcgagtggaatcaggcttatctgctaccaatggcgcgacttgcagaatgcttccctggtagggaacggctgggctgtcaattcgcctggaagtggggaagctttatgctactgtgtgtgaaggtggtagtgcatgcgcgcccagtctcctagatgtagcgagccaaatatgtaactagtagtttggctcaaaaaattagaaacggcgagaagcattgtatatttttaaagggtcaatgtttttttaatttttatataagtttcaatctcttacgggatggacttcgaagttgatacatgttcttacataattgatctataacttatcatacgagaaaaccagttcttaatagccgtcc

SEQ ID NO: 14655 - DNA, 1775 bp, Zea Mays
atggtcaccttttgtaaagaagtaaagactatagttcatcctggtgaggacacaaatggtcgaagcaatgctcgaggcaagagggtggaattccatgaaacagagcaagtgaacaagtggacacatttagtggtaactgctaattctgtggtaacagtgttgggctttcgaaatattgctgcagattatttaattgtcaatgtaccacatgatagggttgaggctcgtcaggaatgtcaagttgctcctggacgcagtgcaatgatgagtgacaagactgcaagtctgcaagtgtgtcttctcgcccatacgccttctactacagttctactgtcatgtatgttacacccatcaagcgttatacactgccaactcatgaaccatatatcagcggggtatgcatcacgtacgtaaacgcgcaggcagtacacagtacttgttctcttcgatgctcgcatgatccagctttccaagggtccccaaaaaagcctccttgttgggtcagggtcatgcacgcagccttattcgcgttttgacaccctgtgttcatggagagcaacatgaccaaactgccctcctcctgtcgatcaaggctccacgttccagagtccggactccccctcctttaactaactctcccagtgcctcctcgatccttcatgtccatgccgtggaagctcacttgacttatccccacagggacgagggaatgtagtgacatcctgacgtgacctcacgtctcctctcagcccgatcctggttcctgtctctgatcccaacgcccactggtccgcggcagcccggagatgtttctccactccctcttgatgcaaaaaatggcaaagaacacgcagcagccaagaaaagacggcggcgcgagatcgtcaggtggcgggctgtcgtcgtccaagaagtcccggtggtaccagcgcgcggtggaggtgctcctcctggtctggaagcagcagccggcggcgcctccaacgacgaaggccgcggcggcgtcgggggtgacagccgccgcctcgggcaacaagggcgcggcgccaccgggggggaggctgcgcaagtcctcgtcgctgaacgtggcggcgtcgttcacgcgggtgtgcctgtgcgcgcccatctcctcgtacaacagcgagtcgctctactgcttcccggccgacggcgccgcgccgcgccggagctacagctacccgcgcgcgtcgtcggcgtcagcgtccgggtgcggcgccggcaccggcgtgagcccgctggtggcgccggcgtcggcgccgccgccgctgcctcctctccccgcggggagcagaggcggtgagggcgcgcggcgcgtgttccgcggcaagtcgctgacggacgacgtcctgatgcggcggttcgtggtggacgaggaggccacgcggcggcgcaacgagatggaggtcgtccggcggcgccacgccgcggcctccaagcgccggcgcctcggccccagcccactccgccggatggcgctggcggagtcggaggcggaggccgaggaggaggaagcagcgcctggaactgggaggggaacggacaatcgcgtggcagctgctgctgtagcgtaggactgactgcggagctttttttccccctgtcctgtgtgctctcgatcggctcgccgtcgcctctgttttttcctctgtcgttttcctcttctgctgctgctgtcgtgcgctgcgatgcgactgggagaaggaggagaatcgcccagttttttttaacagaactgtactagcctcttgttgtcc

SEQ ID NO: 14656 - DNA, 5188 bp, Zea Mays
ttcctcttcctgacagtgaacatgaataccatcaataactacagaactgcttataaaaaaaagcgttggcaattagagtagatcttggagtaacaacaaatgttgctaacattaaaaggcacaatatgcttatccaaatagtggtactgagtgctggaaacctggaatctgttacaaaataaaaccgagaacctgaaaatgctaaaaaggccctgtttggaattactaagtgttggcaatcagaaggtggatgctgattcagtggaggaggcagaagcgcatggtgatagcaggaagcgtaatccaaggaaccgaaggccaaataccaggatcgttgggccgatgtgggctgtttgatgggccttgtaacagcatatagcgtataaaaagggaatactggagatgtatgagaattatgcaagataagaaaaatattctacgccgccacttcggctgcttcctctgttcttcttcttccccacgtctcttcccacgttccacgctgctaacatcttgccatcagaccctgaaactgcaaggaagcatacaacagcaacctctaaatattttactggatagtggtagcacacacacatttgtcaatgacaagttcattccattgctctctggggttcagacaatcttttctcctcgacacgtgcaagtcgccaatggcacaattgttgcgggtcaacatcagttgctgcaggcccattggcagattcagaaatatgagtttatatcagatctgctctttttgccactgcccagttatgatatggttgttggtatggattggttgtccaggtttagccctatgcgtgtggattgggcgcagaaatggttggctattccttacaagggttcaagcatagtcttgtatggtcagtcccagacaataccaaatggtacagttgtggaattatggtctctagactcagaaattcagcagcattcccagccaaattaccctccacagattcaatcgttattattacagtacgcatctgtgtttgaggatcctgttgggctgccccctaagagagtgtgaccaccaaattcctctggtgcctggggcgcaacctgtgaatgttaaaccatacagataccccccaagattgaaggatgagatagaaaagcaagtggctgacatgttacatcaaggagtgatacagaaaagcacaagtgcctttgcttctcctgttttgttagtcaagaagaaggataatacttggagattctgtgttgactatagatatttgaatgccttgacaatcaagagcaagtaccctgtgcctgtgttcgaccaattaatggatgaactagctcatgcaaggtggtttagcaaattggatttgaaggcaggctaccatcagatcttgctacaagctggggaagaatacaaaacggccttccagactcatattggtcactatgaatttagagtcatggcatttggactaactggagcacctaacacctttttgggggcgatgaatgatacactcaaatctgtccttcgaaagtgtgttttggttttctttgatgacatcttgatctatagtcaaaccttcgaggaccatgtacgtcatttgcagcaggtcctacaactcttgttgagggatcagtggaaagttaaactctctaagtgtgaacttgctcaaaatcaaattgcatacctggggcatatcatcagtgcaaatggggtagccactgaccctgccaagattactgccattgaacattggaagacgcccacatctgctaaagagttacgcagcttcttgggtttagcaggattctatagaaaatttgtgcgccactttgggatgattagtcgtccactgtttgatttactaaaaaagcatacactgtttgtctggactccagaacatcaaaaggcctttgaattattgaagcaaactctgatgtcagcacctgtcttggctcttcctgatttcaccaagccattttgcatttataccgatgcatgtcagacaggcgtgggcgcggtattgatgcaacaaggtcatccgttggcctttctcagtcgggccttgggtcccaagaatcaagggttgtcaacctacaaaaaggagtacatggctatcctcttggcggtgactcaatggcgatcctatcttcagctagctgaattcattatttacacggaccatcgcagtttgactcagttgaatgagcaacgactgaatacgatgtggcaacagaaggtgtatacaaagctagcaggattgcagtacaaggtgatttacaagaagggaacagaaaacggcgctgctgacgctctatctcgacaatgttctgatgagttacagtgctgtgttgtttctcattgcacaccagcatgactacaagagttggttgtcagttatgatcaggattctgacactaaggagttgttgaccaaattgagtttgcactcggggcagctggatccgttttcactccagcaaggtgtcattcgtcataagggacgtatatggctggcaagcagtccatctatgcaactcaaggtgatacgagccgtgcatgacactgccattgggggacattccggagtaccagcaacatatagcaaactgaagtcattgttttattggcccggtatgaaggcagctgtccgtgagtatgtacagtcttgtgctatttgtcaagaggccaaaccagatcgagcacgttatccaggcttgctgcaacccttagcagttccacctcaggcttggcacaccatctctttggacttcattgaaggcttgcccagatctttgcagcccaattgtatcctcgttgtggtcgacaagttttccaaatatggccatttcatacctcttcttcacccttttactgcgagcaaagttgccaaagttttactggacaatgtctacaaactccatggactgcctgttaacattgtatccgatagagaccgtatctttactagcagcttttggcaacacttgtttcagctcactgacactaagctgtgcatgtcatcggcgtatcatccacaatctgatggccagacagagcgcttgaatcaatgtttggaaacatttctttgctgtttcgtgcacacctgtccaattcgttggtcgcagtggttatcggtggcggaatactggtacaatacgtcttttcattaagcattgggacggactccttttgaggtgctatacggctatgccccacgacactttggcatttcatcagaggtggtggttccagtaccagagttagctgattggttacaggaacgtgagctgatgagtcgcgtcattcagcttcatttgtccagagctcagcagaggatgaaaaagcaagctgacaagagtcgttccgaaaggcaatttcagtgggtgaatgggtctttttgaagctacaaccttacattcaatcgtcagttgcgacacgttccaacaacaagttgtgcttcaaatttttcggtccttaccaaattctggagcgtattggaatggtggcttacaaattgcgtcttccagcgaacagcactgtgcatcccgtttttcatgtctcccaactcaaacgggccattggtcgtgactcaacattgattcctcagcttccatgtgattctcaggcagtacaggtgcctatgaagattttgcagcgtcgaatggtggagcgcggtggagatcttattcccaggtcaaggtgctttggtctggcatggccgacgagctggcgacatgggaggatgctgctgcccttcaagaccagtttccagctgcaccagcttgggggcaagctggttctgaaggaagggggaatgttggcaatcagaaggtggatgctgattcagtggaggaggcagaagcgcatggtgatagcaggaagcgtaatccaaggaaccgaaggccaaataccaggatcgttgggccgatgtgggctgtttgatgggccttgtaacagcatatagcgtataaaaagggaatactggagatgtatgagaattatgcaagataagaaaaatactctatgccgccacttcggctgcttcctctgttcttcttcttccccacgtctcttcccacgttccacgctgctactaaggttcgtctataaagacattacggttgggacttactacttacgagtgactcaatagtcaacatatgaatcacccaagcaaaaacatcaaaaccaagatggaatactgttattttgagtgagggcatgcaaaagatgtgaatgttttatataacggcttctgatattagattatggtgaggtgaccaaagtggacgacacataaaatgagcacgatactagtctgccagggcaaaatttcaggatgctaagtatccaattatgacagttgcattgcattttcatctaaagaaaattactaatgtaatctagaaaggcaataaacattatcagaacataaactagcatgagcaaatttgggcataacattcggtgagcaagctagtatcaggaacacaacacaaaggtgagtcagtagtcagttctacgggagcatgtcggtacctgaattcctgaaatattggagtacaggaacgaaagcaagctgtaaacatgagtaagcgacagatcactgaagcgactgcaaatgaagtgctggtgtaccttctgcttcttcttgaactcctcccaggtgagggtgtgcgtcttgttaaggctggccaggcgcgccgcatgccactctggagaatggaatgaaccgtccgtctgcgacggccctcgttagccaaagttctttttctttatctttcacccaaagcgaaagtgggatggtagccaaaattcctcagcggctggaagcctactctatcgtatataattagcatagtaatatggctgcggaaataatcagatcaggatggattgcgagcctggaactcggaagtgcagatgggaaacagagatctcctaggagagaggaaggggaccgaccatgccgtcttcgggggcgtcggcggcgcccggcgcgccggacgaggaccccaaccgcgcccgctgcatcgccttgtacgcctggttcttccccatctctccctcgccgccaggcccggcgagaccagattggaatcggaaggggaggagccggggcctggggaccggagatccctttcgttctgctgctggtctggtggtgcgcgtctctgcctgccgtgagttatga

SEQ ID NO: 14657 - DNA, 1408 bp, Zea Mays
ctgcttccaagggaaccagcttggcttctgccctgccgtgtagccatggagccagaaagaggcctgatcgcatatgaagggccgcctccagactcgacggacctgctgtcgagcgcgtggtgcagctcggctatccaagttcttgacacaggaggacacaaggagtgctcgatggccctggtggagcatccggtcatggcgcttggcaacgacaggaacgacgtgttggcaaagagcgaccgtagcttggtggttgacaacagcagcttcagcacggcccagtggaaatatgacgatctgaagtcgtggatatggctgcagaaggcaattcatcccgaactggactatgatctctgcctcaagaagaaatggctcccgcgcaagatgacggcgtggaacgggatctcgctcaagaagtgggtcaaggagcggaagcagaagcgcaaggaggaggcgcgcctgcagcgggccgaggtccacgccgccgtgtccgtggccggcgtggcggccgcgctcgccgccatcgccgccgagaacgccgcgccgcgccgcgcgcccgggatgagggagacggcgctggcgtccgcggccgccctggtcgcggcgcagtgcgccagggtggccgaggccgcgggcgcctcgcgcgaccaggtcgcggcggccgtcgacgccgccagggcctccacggacgacagcagcgtcatcacgctcaccgcggccgccgccacctcactgcgtggcgctgcgacgctgagaggacggcgcagcggcagcggcgggcacggccagaacgagagggcggagcacgcggggccggctctgtctcaggacgacctcgacttcgacttcaaccacgcgaggtccagggcggcgctggccaagggcgacgagatgttcgtcgcgatgccggacgggaagtggaagctccacacggtgtcggcggcgtcgaacaagcgcggcgagatcgtgctgcggatcaagaagacgaacctcgtcatggccttctcccacgcaaaagaaagcgtgatccacgacgtgcagccgtgctccccggagaagccgagcccccacgagggcgcgacatacccagtggaggtctccacgaacaagggcaaggtggagctccgcacggacgactacggcgtctacaagcggtgggttgcgacgctgagccacatgctcgtgatgtccaccgccgtctccgtctccaccaggcacgagccggcgcgccgggactgacccaccggtgcggctcttccctcgaagcaatggaccgaccccacccatcacgacgtaaacgaaaacgttgatctgtgtcgatcccatgtgtatttagtactactactgcccatgaactgtatgagtagcagtatcagcactgcaagctgcaaccaaagattcagatact

SEQ ID NO: 14658 - DNA, 1023 bp, Zea Mays
atcgtcggtaaaatcgccgttgtacgatgcggctgcgactcatcgacaagcgaaggtgatttggtgtggctgggtgttttggcgcgatttttttcctcaccacacggtaattccgcgctaattcctccaatctttggttcataaatcccctcccatctagtgccttctccaaaccaaactccgatggatccattggatgtgcaggggaggaaggcatccgcggcgccgtcatttgtgctggatgcggcggggatgcaggaacttctagatgcggcggcggcgcggaagcagactggcgatgcagcaccgtcggtggctaagaggaccggcatggggaaggcggcagcagcagggtcgacacgcttgcaacgtgctatggaggcggactttcaaggagcaggcacagcggagggccgccagcggccaggcacagctttgggattgaagcggaaggtggccgccatggcagctgctccatccgtggtggctccacctgttcatgatttcacgaccttctgtagcacagcttcatccatcgctgggagccaagccttcagcagcatcccaaacttcacgagtggacatgcaatttcttcaccgacaactcctccatgggtacgaagtgaagcaacggatccagcagcctgctcttgagagcaaagacgctaagatgttggaggcatacaattctctcctcttaaaagacacaggagggtactctgctgaagagaaagatgaacatttggctgcacttatatgtttgaggaagcgtctttttccagaagattaagctgagcaagtagatgattgaggaagcgtctttttcttaaacatgcagcaaaatagctacaaagattcaatgtatacttgatcaatattgatcaataaaaggctttttatgaattaaatagtacatagacagtcttacagacatagcattgtatgagctgtcttttttactgtctgtgtgcgaccttcaatacacttagagatcgtctataccattgtacatgccctaaggag

SEQ ID NO: 14659 - DNA, 1879 bp, Zea Mays
ctcacctggtggtcggcgttatcgctgttgcttgatgcgctagccgtggaatttgatgtactaatggagtctaagggtggcaagaagtctagcagtagtcgttccatgatgtatgaagctccccttggctacagcattgaggacgttcgacctgccggaggcgcgaagaagttccagtctgctgcttactccaactgcgcaaagaagccatcctgatatcccttttggcttcctcgttctagtagtttaggatttcttttctgacacttcgattcttaccaatccccctggcctgctgctttcctgacaatcgaccagttccccagtcttgctccctgcagtcctccctcctccatctccagcgttgtgttctgactcacctgcaccaatggctgttctttctgctgctggtgctcccccggcctcagctatcgggtttgagggctatgagaagcgccttgagatcacattctctgaggcacctgtctttgtggacccccatggcagcggtttgcgtgccctctccaggtcccagattgactctgttctggatcttgcacggtgcacgatcgtgtccgagctctccaacaaggattttgactcctatgttctctccgagtcaagcttgttcatctatcctctgaagattgtcatcaagacctgtggcactaccaagctcctgctcacaattccaaggatcctagagcttgctgaagagctgtctatgcctcttgctgctgtgaagtactcccgcgggacgttcatctttcctggcgcacagccagccccccaccggagcttctccgaggaagttgctgtacttaaccgatactttgggggcctgaagtctggtggcaatgcttatgtgattggagatgcagcaagaccaggacagaagtggcacatctactacgccactgagtacccagagcaaccaatggtcaaccttgagatgtgcatgactggtctggacacgaagaaagcttcagtcttcttcaagactaatgctgatggcaacacaacatgtgccaaggaaatgacgaagctctctggtatctctgaaattatccctgagatggagatctgtgattttgacttcgaaccctgcggctactccatgaatgcaatccatggctctgcgttctccacgatccatgtgacgcctgaggatgggttcagctacgccagttatgaggttatgggcttggatgccactgccctgtcttacggtgaccttgtcaagagggtccttgggtgcttcggcccctcggaattttctgtcgccgtgaccatcttcggcgggcggggccaagctgggacatggggaaaggaacttggtgcggaggcttatgactgcaacaacatggtcgagcaggagctgcctggaggtgggatcctcatctaccagagcttctgtgctgctgaagacgccgttgctagctcgcccaaatccgttcttcgctgctttgatggcgagaatgcagcaccttttgcgaaggactgcaagctggctaatcttgtctgcttggaggaagttggatgctatcgaggagaaggatggagtgcttgatgagtaagacgggtttctggtgtcgatttgcttctgagtttttttctttttatatcgttgcgatctcgtggttgtcgtttggttagcagccaagccaggctattagtacgaagaatgtcgtctataaacatgtgttcctacgttgccacatgctgagtcaatctgtatacagctagctctaggtggtcagctgcgtctaccacaatgagcatacatgtatggataaatcttctgtgaaagcattcgatgaataagggttgttttcgtgattcgttttctgaagtctgaaatgttattatttattctctt

SEQ ID NO: 14660 - DNA, 1873 bp, Zea Mays
cgctgttcagacttagataggtggattggatatttgttcattgaatttgatgtactaatggagtctaagggtggcaagaagtctagcagtagtcgttccatgatgtatgaagctccccttggctacagcattgaggacgttcgacctgccggaggcgcgaagaagttccagtctgctgcttactccaactgcgcaaagaagccatcctgatatcccttttggcttcctcgttctagtagtttaggatttcttttctgacacttcgattcttaccaatccccctggcctgctgctttcctgacaatcgaccagttccccagtcttgctccctgcagtcctccctcctccatctccagcgttgtgttctgactcacctgcaccaatggctgttctttctgctgctggtgctcccccggcctcagctatcgggtttgagggctatgagaagcgccttgagatcacattctctgaggcacctgtctttgtggacccccatggcagcggtttgcgtgccctctccaggtcccagattgactctgttctggatcttgcacggtgcacgatcgtgtccgagctctccaacaaggattttgactcctatgttctctccgagtcaagcttgttcatctatcctctgaagattgtcatcaagacctgtggcactaccaagctcctgctcacaattccaaggatcctagagcttgctgaagagctgtctatgcctcttgctgctgtgaagtactcccgcgggacgttcatctttcctggcgcacagccagccccccaccggagcttctccgaggaagttgctgtacttaaccgatactttgggggcctgaagtctggtggcaatgcttatgtgattggagatgcagcaagaccaggacagaagtggcacatctactacgccactgagtacccagagcaaccaatggtcaaccttgagatgtgcatgactggtctggacacgaagaaagcttcagtcttcttcaagactaatgctgatggcaacacaacatgtgccaaggaaatgacgaagctctctggtatctctgaaattatccctgagatggagatctgtgattttgacttcgaaccctgcggctactccatgaatgcaatccatggctctgcgttctccacgatccatgtgacgcctgaggatgggttcagctacgccagttatgaggttatgggcttggatgccactgccctgtcttacggtgaccttgtcaagagggtccttgggtgcttcggcccctcggaattttctgtcgccgtgaccatcttcggcgggcggggccaagctgggacatggggaaaggaacttggtgcggaggcttatgactgcaacaacatggtcgagcaggagctgcctggaggtgggatcctcatctaccagagcttctgtgctgctgaagacgccgttgctagctcgcccaaatccgttcttcgctgctttgatggcgagaatgcagcaccttttgcgaaggactgcaagctggctaatcttgtctgcttggaggaagttggatgctatcgaggagaaggatggagtgcttgatgagtaagacgggtttctggtgtcgatttgcttctgagtttttttctttttatatcgttgcgatctcgtggttgtcgtttggttagcagccaagccaggctattagtacgaagaatgtcgtctataaacatgtgttcctacgttgccacatgctgagtcaatctgtatacagctagctctaggtggtcagctgcgtctaccacaatgagcatacatgtatggataaatcttctgtgaaagcattcgatgaataagggttgttttcgtgattcgttttctgaagtctgaaatgttattatttattctctt

SEQ ID NO: 14661 - DNA, 1876 bp, Zea Mays
tgatggtagtggatatgcttcacccctgtttagatttgaaacatggaatttgatgtactaatggagtctaagggtggcaagaagtctagcagtagtcgttccatgatgtatgaagctccccttggctacagcattgaggacgttcgacctgccggaggcgcgaagaagttccagtctgctgcttactccaactgcgcaaagaagccatcctgatatcccttttggcttcctcgttctagtagtttaggatttcttttctgacacttcgattcttaccaatccccctggcctgctgctttcctgacaatcgaccagttccccagtcttgctccctgcagtcctccctcctccatctccagcgttgtgttctgactcacctgcaccaatggctgttctttctgctgctggtgctcccccggcctcagctatcgggtttgagggctatgagaagcgccttgagatcacattctctgaggcacctgtctttgtggacccccatggcagcggtttgcgtgccctctccaggtcccagattgactctgttctggatcttgcacggtgcacgatcgtgtccgagctctccaacaaggattttgactcctatgttctctccgagtcaagcttgttcatctatcctctgaagattgtcatcaagacctgtggcactaccaagctcctgctcacaattccaaggatcctagagcttgctgaagagctgtctatgcctcttgctgctgtgaagtactcccgcgggacgttcatctttcctggcgcacagccagccccccaccggagcttctccgaggaagttgctgtacttaaccgatactttgggggcctgaagtctggtggcaatgcttatgtgattggagatgcagcaagaccaggacagaagtggcacatctactacgccactgagtacccagagcaaccaatggtcaaccttgagatgtgcatgactggtctggacacgaagaaagcttcagtcttcttcaagactaatgctgatggcaacacaacatgtgccaaggaaatgacgaagctctctggtatctctgaaattatccctgagatggagatctgtgattttgacttcgaaccctgcggctactccatgaatgcaatccatggctctgcgttctccacgatccatgtgacgcctgaggatgggttcagctacgccagttatgaggttatgggcttggatgccactgccctgtcttacggtgaccttgtcaagagggtccttgggtgcttcggcccctcggaattttctgtcgccgtgaccatcttcggcgggcggggccaagctgggacatggggaaaggaacttggtgcggaggcttatgactgcaacaacatggtcgagcaggagctgcctggaggtgggatcctcatctaccagagcttctgtgctgctgaagacgccgttgctagctcgcccaaatccgttcttcgctgctttgatggcgagaatgcagcaccttttgcgaaggactgcaagctggctaatcttgtctgcttggaggaagttggatgctatcgaggagaaggatggagtgcttgatgagtaagacgggtttctggtgtcgatttgcttctgagtttttttctttttatatcgttgcgatctcgtggttgtcgtttggttagcagccaagccaggctattagtacgaagaatgtcgtctataaacatgtgttcctacgttgccacatgctgagtcaatctgtatacagctagctctaggtggtcagctgcgtctaccacaatgagcatacatgtatggataaatcttctgtgaaagcattcgatgaataagggttgttttcgtgattcgttttctgaagtctgaaatgttattatttattctctt

SEQ ID NO: 14662 - DNA, 1928 bp, Zea Mays
ctggagacagcctaagagcttgttcgttttgctctcaatccatgtggattgggtgggattgtgagagagaatgagtcccgcattgttggccaacttcttactctcatggatggaaacaaaaaggcgtcaaagatgcttcctcacatagttgttgttgcatcgactaacagatgccgttgatcctgcattgagaagggcaggacgttttgactcagaggtagaggttgccgttcctacagttgaagaaaggctgctgattcttaagctttataccaaaaacctacatctggatgaaaaagtcgatcttcagactgttgctgcgttctgcaatggctatgttggagctgatttagaagcattgtgtcgagaagctgccaagcttgcatatcatagaatgttaaacttatgtgagggtgacaaagtacttaaactacttatggaagactgggaatgtgctagatctatggtgggaccaagcataacaagaggggtaaccaaagaaatttcaattgtttcgtgggatgatataggaggcttgaaagatctaaagaaagagcttcagaaagttgttgaatggcccatcaagcatgctgctgcattttctagacttggaataccaccagtccggggggtgctgttgcatggcccaccagggtgctccaagactactcttgccaaggctgcagcgcatgctgcccaagcttctttcttttctttgaggttcatcaggaaacaacattttattttacgaaaataacagttcactttccgttgtgtgaagaacatagaacttttagcccacagtatttaaaacagattaacataatttacttatttctgccagttgagttaatatcctgtacccagaagtcagcgaatgcttgaaaataatcaactaaaacatgttcagataaagatactctcatcaacactcactagcttttcacataaattcttataacagtggtgcagatttatattccaagtatgttggagaaggggaagctctgttgcgtagaacatttcagaaagctcgtcttgcttctcccagcattatattttttgatgaggctgatgccattgcccccaagagaactggccctggtgggaattctagtggcaatgccacagtcggagaaagacttttgtcgactttattgaccgaaatggatggtttagaactggctacgggaattatcgtattgggtgctacgaatcgcccaaatgcaattgatgctgctcttttgcgtccagggcgtttcgataaggtccttcagtgcttctgttaatgacacatggacatatagacactggccataatttcccattgatctgcaggtgctgtatgtcccgccaccagatgtggaagggcgacacgagatactacgcatccatacacggaaaatgaagttgggagaggatgtagatctttggaaggttgcagagtgtaccgagctattcaccggtgctgatcttgaaggcctttgcagggaagctggaatggcagcattgagggaagatatctcagcaagtttgatacatgacgctcacttccaagccgcacgaagttcattaagcccctctcttacaaaagcagtagttgatgagtactcaaaggtagatataaatgatccatcgagtaggaaacattgatatgttccttttctatttctttgttgcacactaggcgcaatacacatttgcaaccttgccaccaagacacacagatggagatagagagatctttttaagaatattctttttaaaccaatcctcttaccgtcagctctggatgttatttaaaaaaaatgccctcactggatattatttttaaaatgtcctgtgttgagcaccgtttatggtcggacggtctggccgtacagttggacggtcgcgggaacaaaatcaataatggtttatagtttttt

SEQ ID NO: 14663 - DNA, 1601 bp, Zea Mays
aagagcttgttcgttttgctctcaatccatgtggattgggtgggattgtgagagagaatgagtcccgcattgttggccaacttcttactctcatggatggaaacaaaaaggcgtcaaagatgcttcctcacatagttgttgttgcatcgactaacagatgccgttgatcctgcattgagaagggcaggacgttttgactcagaggtagaggttgccgttcctacagttgaagaaaggctgctgattcttaagctttataccaaaaacctacatctggatgaaaaagtcgatcttcagactgttgctgcgttctgcaatggctatgttggagctgatttagaagcattgtgtcgagaagctgccaagcttgcatatcatagaatgttaaacttatgtgagggtgacaaagtacttaaactacttatggaagactgggaatgtgctagatctatggtgggaccaagcataacaagaggggtaaccaaagaaatttcaattgtttcgtgggatgatataggaggcttgaaagatctaaagaaagagcttcagaaagttgttgaatggcccatcaagcatgctgctgcattttctagacttggaataccaccagtccggggggtgctgttgcatggcccaccagggtgctccaagactactcttgccaaggctgcagcgcatgctgcccaagcttctttcttttctttgagtggtgcagatttatattccaagtatgttggagaaggggaagctctgttgcgtagaacatttcagaaagctcgtcttgcttctcccagcattatattttttgatgaggctgatgccattgcccccaagagaactggccctggtgggaattctagtggcaatgccacagtcggagaaagacttttgtcgactttattgaccgaaatggatggtttagaactggctacgggaattatcgtattgggtgctacgaatcgcccaaatgcaattgatgctgctcttttgcgtccagggcgtttcgataaggtgctgtatgtcccgccaccagatgtggaagggcgacacgagatactacgcatccatacacggaaaatgaagttgggagaggatgtagatctttggaaggttgcagagtgtaccgagctattcaccggtgctgatcttgaaggcctttgcagggaagctggaatggcagcattgagggaagatatctcagcaagtttgatacatgacgctcacttccaagccgcacgaagttcattaagcccctctcttacaaaagcagtagttgatgagtactcaaaggtagatataaatgatccatcgagtaggaaacattgatatgttccttttctatttctttgttgcacactaggcgcaatacacatttgcaaccttgccaccaagacacacagatggagatagagagatctttttaagaatattctttttaaaccaatcctcttaccgtcagctctggatgttatttaaaaaaaatgccctcactggatattatttttaaaatgtcctgtgttgagcaccgtttatggtcggacggtctggccgtacagttggacggtcgcgggaacaaaatcaataatggtttatagtttttt

SEQ ID NO: 14664 - DNA, 1723 bp, Zea Mays
gtgggattgtgagagagaatgagtcccgcattgttggccaacttcttactctcatggatggaaacaaaaaggcgtcaaagatgcttcctcacatagttgttgttgcatcgactaacaggatagatgccgttgatcctgcattgagaagggcaggacgttttgactcagaggtagaggttgccgttcctacagttgaagaaaggctgctgattcttaagctttataccaaaaacctacatctggatgaaaaagtcgatcttcagactgttgctgcgttctgcaatggctatgttggagctgatttagaagcattgtgtcgagaagctgccaagcttgcatatcatagaatgttaaacttatgtgagggtgacaaagtacttaaactacttatggaagactgggaatgtgctagatctatggtgggaccaagcataacaagaggggtaaccaaagaaatttcaattgtttcgtgggatgatataggaggcttgaaagatctaaagaaagagcttcagaaagttgttgaatggcccatcaagcatgctgctgcattttctagacttggaataccaccagtccggggggtgctgttgcatggcccaccagggtgctccaagactactcttgccaaggctgcagcgcatgctgcccaagcttctttcttttctttgagtggtgcagatttatattccaagtatgttggagaaggggaagctctgttgcgtagaacatttcagaaagctcgtcttgcttctcccagcattatattttttgatgaggctgatgccattgcccccaagagaactggccctggtgggaattctagtggcaatgccacagtcggagaaagacttttgtcgactttattgaccgaaatggatggtttagaactggctacggtactgttagcctgctgataactttctgtgtgattctactgattatatctacatgtatattcactagaaggcaatcctttttttagggaattatcgtattgggtgctacgaatcgcccaaatgcaattgatgctgctcttttgcgtccagggcgtttcgataaggtccttcagtgcttctgttaatgacacatggacatatagacactggccataatttcccattgatctgcaggtgctgtatgtcccgccaccagatgtggaagggcgacacgagatactacgcatccatacacggaaaatgaagttgggagaggatgtagatctttggaaggttgcagagtgtaccgagctattcaccggtgctgatcttgaaggcctttgcagggaagctggaatggcagcattgagggaagatatctcagcaagtttgatacatgacgctcacttccaagccgcacgaagttcattaagcccctctcttacaaaagcagtagttgatgagtactcaaaggtagatataaatgatccatcgagtaggaaacattgatatgttccttttctatttctttgttgcacactaggcgcaatacacatttgcaaccttgccaccaagacacacagatggagatagagagatctttttaagaatattctttttaaaccaatcctcttaccgtcagctctggatgttatttaaaaaaaatgccctcactggatattatttttaaaatgtcctgtgttgagcaccgtttatggtcggacggtctggccgtacagttggacggtcgcgggaacaaaatcaataatggtttatagtttttt

SEQ ID NO: 14665 - DNA, 1809 bp, Zea Mays
gggattgtgagagagaatgagtcccgcattgttggccaacttcttactctcatggatggaaacaaaaaggcgtcaaagatgcttcctcacatagttgttgttgcatcgactaacaggatagatgccgttgatcctgcattgagaagggcaggacgttttgactcagaggtagaggttgccgttcctacagttgaagaaaggctgctgattcttaagctttataccaaaaacctacatctggatgaaaaagtcgatcttcagactgttgctgcgttctgcaatggctatgttggagctgatttagaagcattgtgtcgagaagctgccaagcttgcatatcatagaatgttaaacttatgtgagggtgacaaagtacttaaactacttatggaagactgggaatgtgctagatctatggtgggaccaagcataacaagaggggtaaccaaagaaatttcaattgtttcgtgggatgatataggaggcttgaaagatctaaagaaagagcttcagaaagttgttgaatggcccatcaagcatgctgctgcattttctagacttggaataccaccagtccggggggtgctgttgcatggcccaccagggtgctccaagactactcttgccaaggctgcagcgcatgctgcccaagcttctttcttttctttgaggttcatcaggaaacaacattttattttacgaaaataacagttcactttccgttgtgtgaagaacatagaacttttagcccacagtatttaaaacagattaacataatttacttatttctgccagttgagttaatatcctgtacccagaagtcagcgaatgcttgaaaataatcaactaaaacatgttcagataaagatactctcatcaacactcactagcttttcacataaattcttataacagtggtgcagatttatattccaagtatgttggagaaggggaagctctgttgcgtagaacatttcagaaagctcgtcttgcttctcccagcattatattttttgatgaggctgatgccattgcccccaagagaactggccctggtgggaattctagtggcaatgccacagtcggagaaagacttttgtcgactttattgaccgaaatggatggtttagaactggctacgggaattatcgtattgggtgctacgaatcgcccaaatgcaattgatgctgctcttttgcgtccagggcgtttcgataaggtgctgtatgtcccgccaccagatgtggaagggcgacacgagatactacgcatccatacacggaaaatgaagttgggagaggatgtagatctttggaaggttgcagagtgtaccgagctattcaccggtgctgatcttgaaggcctttgcagggaagctggaatggcagcattgagggaagatatctcagcaagtttgatacatgacgctcacttccaagccgcacgaagttcattaagcccctctcttacaaaagcagtagttgatgagtactcaaaggtagatataaatgatccatcgagtaggaaacattgatatgttccttttctatttctttgttgcacactaggcgcaatacacatttgcaaccttgccaccaagacacacagatggagatagagagatctttttaagaatattctttttaaaccaatcctcttaccgtcagctctggatgttatttaaaaaaaatgccctcactggatattatttttaaaatgtcctgtgttgagcaccgtttatggtcggacggtctggccgtacagttggacggtcgcgggaacaaaatcaataatggtttatagtttttt

SEQ ID NO: 14666 - DNA, 1947 bp, Zea Mays
atcattaccaaaacgtcctagtattttacaacgaagctctgacattggaaattttttccagattctattatcagccacggaccacggaatgacctactccgtaccctacttcctaatgcagactatatatgttctgggtttgtacgctgattatattcaatatctagcagttctggtgagcattattgtttagacaatctcttgttatgtaaaaatttaaagagatagatatgaccaagaaaatatctgaatagtaacatcctacacaatctaagattggctactaagatcgggaaattaaaaagaccagcgtacttcataaaactgaaatgcaattgcgcattttcaatggctcttgatgacacttaacttacttcatatatcctcgtgctgccagcctaaacatgacttgtgagatcagcgcttacttaccttttttctacctcgctccatcttttccttcttacctctacatcgtcttttataattactcttcttcctctccatccatctatggccggcaaaaacttatacaaaaactaggggctttatggccctggatccgcccccgtgtgagaatgtggcactgcaattctatgtgtgacacaacatgggcctagaggtcaactagagccaagaggatataatcttgggatgagaattccagtatggcgcatggcatgtcactaccggaatccggctctttatcgagtgtccactcggcaaaaaactcagttccggtagtgtgtatatatgatggtatcatttcactaaccatcaaagctgtgctagaatcaagcaaatgaagaagattcaaaacattctccacacatgtcgaccacctattattatataggtaggacaacaattttactacttccaataaaatggtcaaacatggagtcatacaattaatttgaatccatgtaaagggctcaaataaaacaaattccactcaactagtaactttcaggtactattccaacaagtgacatacgtatcttgttaacatcattatcacaacgatacactctgtacttgtcatttctaggcgggaacagccaacatatatccacattattcttattatagaaaatttcgtgaaactcatttttttaaatgtcacggtagaacttctgatgataaaatgtagtacacagtaatgtgtgaaatcatcagccctccagcctgttcgctgtggtttgttaactaaaaacaacctttatctatttatatctattcaataaactactactcaaccttatcttgagatgatgacgggagaaacattatcacgtcatcagcataaaaggatacatgatggtttacctgttgtgttattagattatcatgggatatgttgtgttattagacttatcatgggatatgtttatagctatacctattattgatactatcttctacaaacttggtcaaactttaacatatgatccaaaaatagctacagttgcatttttcgggaccaaggcagtaaaattcatgcgggtcacaaaatgaagaccgaaataaataaaatatatgttcatatatatcatacatctccactttaaatgactttatgtgtgtaagctgctccaaggaagtaaacagatagaaggccatacgctgaactaacactatatgcatgctcagtcgttctgccatgcataggttgttacattcaaataatttttaaattgttgtaatgtactaagtctatggtctgatcacagctacaagtagtttactacatcaacaagttcaggtaatttatgtgaaagcataaaatccaaacgaacaaatatgcaagtatttgccaggataaattcactaacatcagccttacgtcaacaattgtctattgatcatcaaagttcaaaagacttgattgcaagaatcctaaaataatgtatatacaattgaacaaatcatcaatgaaccattacc

SEQ ID NO: 14667 - DNA, 2255 bp, Zea Mays
tgtatataatactgcagtatttgagaatactgcagtattcttccaaaactgcagaaaaactttgttcccaaacacccccttattagtgcaataatgccttggctggagtttttacacctctacataaccaccttgcgctagcttcattacatatattttaaaaataaaaggacgctttgatgtgcaggtgcatagctacatagatatattattagatataagatcagattgagctaacatacatgatgaaacagaagtgggaatggattaagagagtatatgtatcaccctgagtatatatgatgaaacagatgttgcgctagcttcattacatatatttttaaaataaaaaggaagctttgatgtgcaagtgtggtttacatgctaatggaaagagagtatatgtattaccctgattattcctatgctggattaagactttatatacttgaaaatttatatgcactgccattaaccattgtagcgccatgttggaactggaaaactaacaaaaattcttttgcctgtaagtgagcagtttaaaagcaacatcagactttactaattgtaaagaaagcatgcaatattgcaacataggaaaaagttgaaagttcaacgtttgtccagtaaaaaagaactggcagcaactagcttggcctttcttttttatagaatacttgtgtgtgaaaaatcaacactcctgctggtgaaaagttcgtaggttgaattcaaatttagaaacccccaacgcaaactttggctacatataccagaaaatatttatttcttaaccaacctacaactttcaccagggaccatgcttgcgcgtaccttgaaaccttcaatgctattatttacagccgacttgactttttacttgcccatataataaagacagaaaaaaaataaagcttacattgtcccaggtaatcgaagtataaaacaatataaatcctgcaaagcccaataattcaacaaaacctccggaactataatttgtttcacactattcagtgaaattatgccgtctttatgaacatcaaacgccgatatataaacttaatttgcgcaaggaaaaaaaataaattcaggaatgcatatcgcccgagccccttaatttattagaccgatcgagcggcagcacaaaagtcaaagaaatggcgtgtgcggccaggaattcgatcggacgagtacaagcaccatgaatggaacggcggccggctagctatctcaacagtatcctgcatatatgcatatccggagccattaggggacaacgcatcgttgcaccattactcctacctttgaattccaaccagcgacatggctattcaagaacagaaaggacggcagtagaagacaactgaccgatcgagatatcgtgcggagacggcggcagccactgcagatctgccggccgaccgtgtcaccgtgctcctgtgcctcgctctccttggcgtcacaattccatgcgtcttcttgctcttccatggcatctcatctctggcacacggcggcggtgcttgtggatcaggtctcctcagacttcaacggtaaccctgaaagggaaagaagaaaaacaaacgaggagaggaagaagcgatttggtaaatagatctggtcaaaaacaccatggaggggccggactacggatccgcatccatccgggtagattcctgacgatgccgctgccatataccaggttccaaaggttcatcaatggcacagtgaataaatccgccgccccgggaagggagtaaaaaaataaatgtgatggtatagggttcctcggaaagacgaacgggccgggggcgtcgtacgaggccgaggaagaaacaaacaacgagaaaagtacggcagcgagaaggaagaaataacacccccccccccggttccatcaatcatcaaatcgaacagtaccatgaatacgaatgaaggagtacgataacgaatcggagagaaatccaaaagattgagattgaaattctctctggtggaaggaagacgatgagacgatctaaattagagaacccggtccagctccagccaggtcatgggaggcggagcacgagagggatgggggcttagacatgcatagggcgtggcgctggcgcagcgggcagctagcgccggccggcggtgagcgaaagccgcgcgtggcttgagaggcccggaccagcggatgacagaaagagcagtgagcacgcggccgcgacggcacgtgccgtcacgcccggccgtgtgctcactctctt

SEQ ID NO: 14668 - DNA, 2536 bp, Zea Mays
cgcaagcgcggcccagcaactgctgcagccgtttccccacagctgctgcttccttctcctacactgccccgctccgctctgagatggatcccgcgccggcgaccccgcgctggaatcttgagcgaccgtaccttactggacgcttccaccaggaggcgaaggcggctgcggcggcgcagggcctcggatccaagccgttctcgcttgactccttcagccgcggcgccggcgccgggagtgtcatcggatcgtacgcagtatcagtgcaggagcttttggttatcgatgatttgctatcagctctggtgggtattgagggacggtatgtttctattaagagagttcgtggaaaggagggctatgttgtctttcagattgattcttctatggaccttgccctccaggaattgactcgccggattttccctttgtgcgaggattatgtgttggtaagccagtttgtggagtccaggtcacatttcaagaatggtttggtcaaccatgctctggctgcagctctaagagcattcttactggattatcaggcaatggttgctcaactggagcaccagttccgtcttggaaggctttctgttcagggattatggttcttttgtcaaaggatgatgagttcactgaatgcactggcagttctagtggagaaggctacctccaacaatactaatggttcagcgacacttaatctacttcaaagccaggcaaaggcgatgggtggtgatagtgctgttcggtctttactggagaagatgacagaatatgcaagtgcagcatacctcaggatgctagaaaggtgggtgtatgagggagttattgacgatccttatggtgaattcttcattgctgaaaacaaatctctgcagaaggagagcctcactcaagattatgatgccaaatattggcagcaacgttacagcctaaaagaaggaattcctagtttccttacgaatgttgccgcaacgattctaacaacagggaagtatcttaatgttatgagagaatgtgggcacaatgttcaggtttccttgtcagacaattctaagcttatgagctttggctcaaaccaccaatatcttgaatgtataaaatctgcatatgattttgcaagtggtgaattgttgactctgatgaaagataagtatgatctcatcgggaaactccgatccctgaagcgctatctactccttgaccaaggtgactttttggtccattttatggatattgctcgagaggagcttacaaagaaaccagaagaaatatccgctgaaaaacttcagtctctgcttgacattgctttacggagtactgcagctgcttcagatccaagccatgaggaattaatctgctgtgtggaaaggagttccctccttaagaaactggccactctgaaggacttggatcctgcagataagcttgctgcagcagatgttgatcgatcaatgcaattaagcatcacgggtttggaaacattctgccttagcaataaggtccagtggccgttatctcttgtaatttcaaggaaggctttgacaaaataccaattgatctttcgcctattgttccactgcaagcatgttagtcgccagctgtgtgcagcatggcaaatacaacaagttcttgaaccaaattggcatctgatgcatgaccgccttcaaacagcaaggagcatagatgaggttatccagatccatgatttcttcctccagaagtgtctaaaagaatgcttgctgttgtcgcctgaactccttgtgaaagtcgagaagctgaaaggtttatgccttcagtatgccacttccatccagatcttgatgccatctatcgatgtcgctaactctgagaacacatcgaagtctaggaagtcaagatcaagaatcgataaatcacaggacagagaccagcagctgaaactagcatcagagaatgttgtcatgtcagagtcgatcctgaaatttgaagcagcgttcaattcagagctgcagagtcttgctcctacgctgagtaacagttcacaagcggagccgtacgtgactcatctcgcacagtgcattcttggcgtgcgaatcggccaatgagttatttgatgggccgtacccatacctgcctgccttcatttggacttttggcacaatgccatactctatgtgcgccgctgcagtcaaggtaggtgcatatccgtttcttgtgaatgctaatgtggagctacgacgcgtttagtgaccctagggtggtgtcgggagccttgttatcttgagctcgaaccttgctgtgtgtttatcagctgcgactcagcatttcgtgctgttgatatctgacaatagcaatgtgtggttgtgttgtgttgtgttgtgagactcagatgtaagctttgtggagttcatttccacgtgtgtgggaaaagtgtttggtttgaatcgaactgggcattggtattccacgagagttggttagcggccagtaatgtaatagtaaatatcatgctattaagctaatttaagttgatgaaatccaaataaagcaa

SEQ ID NO: 14669 - DNA, 2613 bp, Zea Mays
cgcaagcgcggcccagcaactgctgcagccgtttccccacagctgctgcttccttctcctacactgccccgctccgctctgagatggatcccgcgccggcgaccccgcgctggaatcttgagcgaccgtaccttactggacgcttccaccaggaggcgaaggcggctgcggcggcgcagggcctcggatccaagccgttctcgcttgactccttcagccgcggcgccggcgccgggagtgtcatcggatcgtacgcagtatcagtgcaggagcttttggttatcgatgatttgctatcagctctggtgggtattgagggacggtatgtttctattaagagagttcgtggaaaggagggctatgttgtctttcagattgattcttctatggaccttgccctccaggaattgactcgccggattttccctttgtgcgaggattatgtgttggtaagccagtttgtggagtccaggtcacatttcaagaatggtttggtcaaccatgctctggctgcagctctaagagcattcttactggattatcaggcaatggttgctcaactggagcaccagttccgtcttggaaggctttctgttcagggattatggttcttttgtcaattctagtggagaaggctacctccaacaatactaatggttcagcgacacttaatctacttcaaagccaggcaaaggcgatgggtggtgatagtgctgttcggtctttactggagaagatgacagaatatgcaagtgcagcatacctcaggatgctagaaaggtgggtgtatgagggagttattgacgatccttatggtgaattcttcattgctgaaaacaaatctctgcagaaggagagcctcactcaagattatgatgccaaatattggcagcaacgttacagcctaaaagaaggaattcctagtttccttacgaatgttgccgcaacgattctaacaacagggaagtatcttaatgttatgagagaatgtgggcacaatgttcaggtttccttgtcagacaattctaagcttatgagctttggctcaaaccaccaatatcttgaatgtataaaatctgcatatgattttgcaagtggtgaattgttgactctgatgaaagataagtatgatctcatcgggaaactccgatccctgaagcgctatctactccttgaccaaggtgactttttggtccattttatggatattgctcgagaggagcttacaaagaaaccagaagaaatatccgctgaaaaacttcagtctctgcttgacattgctttacggagtactgcagctgcttcagatccaagccatgaggaattaatctgctgtgtggaaaggagttccctccttaagaaactggccactctgaaggacttggatcctgcagataagcttgctgcagcagatgttgatcgatcaatgcaattaagcatcacgggtttggaaacattctgccttagcaataaggtccagtggccgttatctcttgtaatttcaaggaaggctttgacaaaataccaattgatctttcgcctattgttccactgcaagcatgttagtcgccagctgtgtgcagcatggcaaatacaacaagcattccggtctgtcaagattctagggacaccaattctgcggtcatcaattctttgtcgtagcatgctcaagtttgtaaatagccttttgcattatctaacatttgaggttcttgaaccaaattggcatctgatgcatgaccgccttcaaacagcaaggagcatagatgaggttatccagatccatgatttcttcctccagaagtgtctaaaagaatgcttgctgttgtcgcctgaactccttgtgaaagtcgagaagctgaaaggtttatgccttcagtatgccacttccatccagatcttgatgccatctatcgatgtcgctaactctgagaacacatcgaagtctaggaagtcaagatcaagaatcgataaatcacaggacagagaccagcagctgaaactagcatcagagaatgttgtcatgtcagagtcgatcctgaaatttgaagcagcgttcaattcagagctgcagagtcttgctcctacgctgagtaacagttcacaagcggagccgtacgtgactcatctcgcacagtgcattcttggcgtgcgaatcggccaatgagttatttgatgggccgtacccatacctgcctgccttcatttggacttttggcacaatgccatactctatgtgcgccgctgcagtcaaggtaggtgcatatccgtttcttgtgaatgctaatgtggagctacgacgcgtttagtgaccctagggtggtgtcgggagccttgttatcttgagctcgaaccttgctgtgtgtttatcagctgcgactcagcatttcgtgctgttgatatctgacaatagcaatgtgtggttgtgttgtgttgtgttgtgagactcagatgtaagctttgtggagttcatttccacgtgtgtgggaaaagtgtttggtttgaatcgaactgggcattggtattccacgagagttggttagcggccagtaatgtaatagtaaatatcatgctattaagctaatttaagttgatgaaatccaaataaagcaa

SEQ ID NO: 14670 - DNA, 3398 bp, Zea Mays
cgcaagcgcggcccagcaactgctgcagccgtttccccacagctgctgcttccttctcctacactgccccgctccgctctgagatggatcccgcgccggcgaccccgcgctggaatcttgagcgaccgtaccttactggacgcttccaccaggaggcgaaggcggctgcggcggcgcagggcctcggatccaagccgttctcgcttgactccttcagccgcggcgccggcgccgggagtgtcatcggatcgtacgcagtatcagtgcaggagcttttggttatcgatgatttgctatcagctctggtgggtattgagggacggtatgtttctattaagagagttcgtggaaaggagggctatgttgtctttcagattgattcttctatggaccttgccctccaggaattgactcgccggattttccctttgtgcgaggattatgtgttggtaagccagtttgtggagtccaggtcacatttcaagaatggtttggtcaaccatgctctggctgcagctctaagagcattcttactggattatcaggcaatggttgctcaactggagcaccagttccgtcttggaaggctttctgttcagggattatggttcttttgtcaaaggatgatgagttcactgaatgcactggcagttctagtggagaaggctacctccaacaatactaatggttcagcgacacttaatctacttcaaagccaggcaaaggcgatgggtggtgatagtgctgttcggtctttactggagaagatgacagaatatgcaagtgcagcatacctcaggatgctagaaaggtgggtgtatgagggagttattgacgatccttatggtgaattcttcattgctgaaaacaaatctctgcagaaggagagcctcactcaagattatgatgccaaatattggcagcaacgttacagcctaaaagaaggaattcctagtttccttacgaatgttgccgcaacgattctaacaacagggaagtatcttaatgttatgagagaatgtgggcacaatgttcaggtttccttgtcagacaattctaagcttatgagctttggctcaaaccaccaatatcttgaatgtataaaatctgcatatgattttgcaagtggtgaattgttgactctgatgaaagataagtatgatctcatcgggaaactccgatccctgaagcgctatctactccttgaccaaggtgactttttggtccattttatggatattgctcgagaggagcttacaaagaaaccagaagaaatatccgctgaaaaacttcagtctctgcttgacattgctttacggagtactgcagctgcttcagatccaagccatgaggaattaatctgctgtgtggaaaggagttccctccttaagaaactggccactctgaaggacttggatcctgcagataagcttgctgcagcagatgttgatcgatcaatgcaattaagcatcacgggtccagtggccgttatctcttgtaatttcaaggaaggctttgacaaaataccaattgatctttcgcctattgttccactgcaagcatgttagtcgccagctgtgtgcagcatggcaaatacaacaagcattccggtctgtcaagattctagggacaccaattctgcggtcatcaattctttgtcgtagcatgctcaagtttgtaaatagccttttgcattatctaacatttgaggttcttgaaccaaattggcatctgatgcatgaccgccttcaaacagcaaggagcatagatgaggttatccagatccatgatttcttcctccagaagtgtctaaaagaatgcttgctgttgtcgcctgaactccttgtgaaagtcgagaagctgaaaggtttatgccttcagtatgccacttccatccagatcttgatgccatctatcgatgtcgctaactctgagaacacatcgaagtctaggaagtcaagatcaagaatcgataaatcacaggacagagaccagcagctgaaactagcatcagagaatgttgtcatgtcagagtcgatcctgaaatttgaagcagcgttcaattcagagctgcagagtcttgctcctacgctgagtaacagttcacaagcggagccgtacgtgactcatctcgcacagtgcattcttggcgtgcgaatcggccaatgagttatttgatgggccgtacccatacctgcctgccttcatttggacttttggcacaatgccatactctatgtgcgccgctgcagtcaagggcttgccaacttctcaataacagattgtgggaaaaacaaccctgagcttgccaaagagatggagaagcaatttgtcgatcttcttaatgaggaactcaagctgcagcaggttgtagctgaggagcatagtcaccacatgaacgccactcttgtcgaagcaaaaagacaagctactcaataccagcgagaagccgaaaagtgtaatgcagctacagagacctgcgaggaagctcgggagcagtctgaagtagcaatttcaaaggagaagaaactcacagcaatgtgggaacagcgagctcggcaactgggttggcatgattctcgagccacgagcatgtgacagctttagttctgaattttcaggtgaaattatttctggtagctgcatgggttatgccttgcagccaaaccaaccggcgacgtttgtctatgtaatatcagtttccacgacaacattgttaattttgagtctcaacattatagttccagcttccttacaaatgtgactagcttgctgccgcctagatatctgaattttgtcatagtactgttgaaagccattttattaaggacatgtttgtttttctcctagattatataacctgaattatgacgaaagagtaagagggtaaaatatcactttgaaagcacaaataagctgaactaaactactcaatgccagcttatttatagttctaaagtgatatttttacccttctacccttacaccataatccaacttatataatctagaagggaaacaacagatctaagtgctgatttggtgacaaaagaatcactggggatggaagagggttaaaggagaaataaactaattttcctctcaatcccatctaattctcccgtgatctctggtcactaaaacagccctaagtgttgtggttgtggtttaatgccgaattgttggagaaacttaattcaaatctggatacaggatgtacagagtcttgatctatagcatcaatctggcggtacagcttacttgttgggtgacggaagtaccttcggaatataattgttgtatgtgttgacatattgatatattcttgtgggtcgaaggcctatttgttattatataatccagcttaaataagttaaaagataaacaaataacatata

SEQ ID NO: 14671 - DNA, 2363 bp, Zea Mays
gtgaaacatcatcactatataggagcttttggttatcgatgatttgctatcagctctggtgggtattgagggacggtatgtttctattaagagagttcgtggaaaggagggctatgttgtctttcagattgattcttctatggaccttgccctccaggaattgactcgccggattttccctttgtgcgaggattatgtgttggtaagccagtttgtggagtccaggtcacatttcaagaatggtttggtcaaccatgctctggctgcagctctaagagcattcttactggattatcaggcaatggttgctcaactggagcaccagttccgtcttggaaggctttctgttcagggattatggttcttttgtcaaaggatgatgagttcactgaatgcactggcagttctagtggagaaggctacctccaacaatactaatggttcagcgacacttaatctacttcaaagccaggcaaaggcgatgggtggtgatagtgctgttcggtctttactggagaagatgacagaatatgcaagtgcagcatacctcaggatgctagaaaggtgggtgtatgagggagttattgacgatccttatggtgaattcttcattgctgaaaacaaatctctgcagaaggagagcctcactcaagattatgatgccaaatattggcagcaacgttacagcctaaaagaaggaattcctagtttccttacgaatgttgccgcaacgattctaacaacagggaagtatcttaatgttatgagagaatgtgggcacaatgttcaggtttccttgtcagacaattctaagcttatgagctttggctcaaaccaccaatatcttgaatgtataaaatctgcatatgattttgcaagtggtgaattgttgactctgatgaaagataagtatgatctcatcgggaaactccgatccctgaagcgctatctactccttgaccaaggtgactttttggtccattttatggatattgctcgagaggagcttacaaagaaaccagaagaaatatccgctgaaaaacttcagctgcttcagatccaagccatgaggaattaatctgctgtgtggaaaggagttccctccttaagaaactggccactctgaaggacttggatcctgcagataagcttgctgcagcagatgttgatcgatcaatgcaattaagcatcacgggtttggaaacattctgccttagcaataaggtccagtggccgttatctcttgtaatttcaaggaaggctttgacaaaataccaattgatctttcgcctattgttccactgcaagcatgttagtcgccagctgtgtgcagcatggcaaatacaacaagcattccggtctgtcaagattctagggacaccaattctgcggtcatcaattctttgtcgtagcatgctcaagtttgtaaatagccttttgcattatctaacatttgaggttcttgaaccaaattggcatctgatgcatgaccgccttcaaacagcaaggagcatagatgaggttatccagatccatgatttcttcctccagaagtgtctaaaagaatgcttgctgttgtcgcctgaactccttgtgaaagtcgagaagctgaaaggtttatgccttcagtatgccacttccatccagatcttgatgccatctatcgatgtcgctaactctgagaacacatcgaagtctaggaagtcaagatcaagaatcgataaatcacaggacagagaccagcagctgaaactagcatcagagaatgttgtcatgtcagagtcgatcctgaaatttgaagcagcgttcaattcagagctgcagagtcttgctcctacgctgagtaacagttcacaagcggagccgtacgtgactcatctcgcacagtgcattcttggcgtgcgaatcggccaatgagttatttgatgggccgtacccatacctgcctgccttcatttggacttttggcacaatgccatactctatgtgcgccgctgcagtcaaggtaggtgcatatccgtttcttgtgaatgctaatgtggagctacgacgcgtttagtgaccctagggtggtgtcgggagccttgttatcttgagctcgaaccttgctgtgtgtttatcagctgcgactcagcatttcgtgctgttgatatctgacaatagcaatgtgtggttgtgttgtgttgtgttgtgagactcagatgtaagctttgtggagttcatttccacgtgtgtgggaaaagtgtttggtttgaatcgaactgggcattggtattccacgagagttggttagcggccagtaatgtaatagtaaatatcatgctattaagctaatttaagttgatgaaatccaaataaagcaa

SEQ ID NO: 14672 - DNA, 1941 bp, Zea Mays
aacttcttcaaggtggggttaaccaacagattctctaaatttaacttttcacatccacttattgcacctgccgccaccaggactgtcgtcgtgacatgcagctgtagaacactacctgtgatgccgagccagatgaagaagcgagtatgaaagccatggcgcttttcattttttttaccgagcaaaggcacttcaccgagtctcttggacttctctaaaatccggtccatgcgcggtaactttaagttgggtccacctccacacgaatcagcacgatagtgcgtagtggcaggctgccaagctcaatcaaggattctggactcagcatgccagtctcctctcgcggccctgttgtttgccggaaatccgctcggggaccccgcgcgcactagccatttttgcgctctacctccgcaccaaccatccgcgtccaccaccaccaccggcccgtgccccagccacaacaaggcgaaatcaggggtggtcacgccgagcgactacgcgaagacgcagtcggcgggggcgaagatctcccaacccacattgcgcgcgcgtctacgcccgaggatcgatggttggcggcggggggcgccgcgcggcgctggggcgctggtgcctggtgatcctggccgtggcctccgcgctaggggtctctggccccgccttctactggcgctacaagaagggcttctcctcctcctccccctcgtccaccgcggcggcggtggcttcttccccgtcgtgccctccctgcagctgcgactgcccggcgcccctttccctcaagtccatcgccccagggcttgccaacttctcaataacagattgtgggaaaaacaaccctgagcttgccaaagagatggagaagcaatttgtcgatcttcttaatgaggaactcaagctgcagcaggttgtagctgaggagcatagtcaccacatgaacgccactcttgtcgaagcaaaaagacaagctactcaataccagcgagaagccgaaaagtgtaatgcagctacagagacctgcgaggaagctcgggagcagtctgaagtagcaatttcaaaggagaagaaactcacagcaatgtgggaacagcgagctcggcaactgggttggcatgattctcgagccacgagcatgtgacagctttagttctgaattttcaggtgaaattatttctggtagctgcatgggttatgccttgcagccaaaccaaccggcgacgtttgtctatgtaatatcagtttccacgacaacattgttaattttgagtctcaacattatagttccagcttccttacaaatgtgactagcttgctgccgcctagatatctgaattttgtcatagtactgttgaaagccattttattaaggacatgtttgtttttctcctagattatataacctgaattatgacgaaagagtaagagggtaaaatatcactttgaaagcacaaataagctgaactaaactactcaatgccagcttatttatagttctaaagtgatatttttacccttctacccttacaccataatccaacttatataatctagaagggaaacaacagatctaagtgctgatttggtgacaaaagaatcactggggatggaagagggttaaaggagaaataaactaattttcctctcaatcccatctaattctcccgtgatctctggtcactaaaacagccctaagtgttgtggttgtggtttaatgccgaattgttggagaaacttaattcaaatctggatacaggatgtacagagtcttgatctatagcatcaatctggcggtacagcttacttgttgggtgacggaagtaccttcggaatataattgttgtatgtgttgacatattgatatattcttgtgggtcgaaggcctatttgttattatataatccagcttaaataagttaaaagataaacaaataacatata

SEQ ID NO: 14673 - DNA, 1813 bp, Zea Mays
accgagcaaaggcacttcaccgagtctcttggacttctctaaaatccggtccatgcgcggtaactttaagttgggtccacctccacacgaatcagcacgatagtgcgtagtggcaggctgccaagctcaatcaaggattctggactcagcatgccagtctcctctcgcggccctgttgtttgccggaaatccgctcggggaccccgcgcgcactagccatttttgcgctctacctccgcaccaaccatccgcggttagttcacttcccacactcccccacgccactgtttcagtgttcccctcaccacccgagccccaccaccagtccaccaccaccaccggcccgtgccccagccacaacaaggcgaaatcaggggtggtcacgccgagcgactacgcgaagacgcagtcggcgggggcgaagatctcccaacccacattgcgcgcgcgtctacgcccgaggatcgatggttggcggcggggggcgccgcgcggcgctggggcgctggtgcctggtgatcctggccgtggcctccgcgctaggggtctctggccccgccttctactggcgctacaagaagggcttctcctcctcctccccctcgtccaccgcggcggcggtggcttcttccccgtcgtgccctccctgcagctgcgactgcccggcgcccctttccctcaagtccatcgccccagattgtgggaaaaacaaccctgagcttgccaaagagatggagaagcaatttgtcgatcttcttaatgaggaactcaagctgcagcaggttgtagctgaggagcatagtcaccacatgaacgccactcttgtcgaagcaaaaagacaagctactcaataccagcgagaagccgaaaagtgtaatgcagctacagagacctgcgaggaagctcgggagcagtctgaagtagcaatttcaaaggagaagaaactcacagcaatgtgggaacagcgagctcggcaactgggttggcatgattctcgagccacgagcatgtgacagctttagttctgaattttcaggtgaaattatttctggtagctgcatgggttatgccttgcagccaaaccaaccggcgacgtttgtctatgtaatatcagtttccacgacaacattgttaattttgagtctcaacattatagttccagcttccttacaaatgtgactagcttgctgccgcctagatatctgaattttgtcatagtactgttgaaagccattttattaaggacatgtttgtttttctcctagattatataacctgaattatgacgaaagagtaagagggtaaaatatcactttgaaagcacaaataagctgaactaaactactcaatgccagcttatttatagttctaaagtgatatttttacccttctacccttacaccataatccaacttatataatctagaagggaaacaacagatctaagtgctgatttggtgacaaaagaatcactggggatggaagagggttaaaggagaaataaactaattttcctctcaatcccatctaattctcccgtgatctctggtcactaaaacagccctaagtgttgtggttgtggtttaatgccgaattgttggagaaacttaattcaaatctggatacaggatgtacagagtcttgatctatagcatcaatctggcggtacagcttacttgttgggtgacggaagtaccttcggaatataattgttgtatgtgttgacatattgatatattcttgtgggtcgaaggcctatttgttattatataatccagcttaaataagttaaaagataaacaaataacatata

SEQ ID NO: 14674 - DNA, 3207 bp, Zea Mays
accgagcaaaggcacttcaccgagtctcttggacttctctaaaatccggtccatgcgcggtaactttaagttgggtccacctccacacgaatcagcacgatagtgcgtagtggcaggctgccaagctcaatcaaggattctggactcagcatgccagtctcctctcgcggccctgttgtttgccggaaatccgctcggggaccccgcgcgcactagccatttttgcgctctacctccgcaccaaccatccgcggttagttcacttcccacactcccccacgccactgtttcagtgttcccctcaccacccgagccccaccaccagtccaccaccaccaccggcccgtgccccagccacaacaaggcgaaatcaggggtggtcacgccgagcgactacgcgaagacgcagtcggcgggggcgaagatctcccaacccacattgcgcgcgcgtctacgcccgaggatcgatggttggcggcggggggcgccgcgcggcgctggggcgctggtgcctggtgatcctggccgtggcctccgcgctaggggtctctggccccgccttctactggcgctacaagaagggcttctcctcctcctccccctcgtccaccgcggcggcggtggcttcttccccgtcgtgccctccctgcagctgcgactgcccggcgcccctttccctcaagtccatcgccccaggtgatctgtcctgttcagaccctctttccagatcttcctacagttctcgcctgatcagtgtcggtacgcatgtctacccataattcgttaggtaaaacaaaaaataataatctgtattttggtcgggactagggtcatcagatgaacgccatagcatatggtacagctgacgcatgcatatgggtagcaaataagctagttttagttgctgtgtctaatcgtctatgatgaaaactcccagttgcagctatgtccacattactgacaggaatttgtgtttattgcagggcttgccaacttctcaataacaggtttgggtccttccttcacagttcacactcctgtcaattgaggcatgggtttcctcatatttggatgagcatagtggttatcttatgatagaatggcagcaatcgtcatggatcactgtgttctttacttactaaactgaacaattcgtgaagctgccttcagtagttcagtcactatgatgatgcatggggtgatttatagaccttatggaaccttctacttgggttattcttcacactacaaaaaatgcacgagcaaaatagttcttatgaaatgaaagtaaaattatgtgttgaattctgaaaattcacattcttaatcatttagcctcaaattgtcttatgtgaaaagaaaagctgaacactagaattctagcctatcaagtatgttaagtgctgcatatctttaagagttggattttataattaggtgcggaactacagagatttgtctaatgatgcgatctactgaaatacctactgtaggcttcttaaaagcatcctgttgttgagaaaaaaatatctttttcttcatcttggtttgcatttcataagtctttggcatcaggctattaccctaacaatatagcatagatgaaagttagttgtgattagaccgtgtccagcagttcacccatatggtcgcccaaaaaactattttgcactgtagaccgcactgttcacaaagtggagtttgaatataggtatggggatgagtaagctgctgaagatagccttagtatgtgttgacgttcataacatccaatgaaactcagagattgttcttccatccaactagatttggcattttggcactttttagatttggacggtatatttgcttcatcaaggttgcacaaatcttcctcactatgctgcaccattagttcttgtgcttttgtatctcatagccacccagttttccagaacaggaattgtcgaaatatttgaatcaccttatttgcactgttttctatgtctacctttttctttcaatgcacactttcctgaccttattattgctattatcaaaatattaggctaactgaactaaaactttaaagtttgtgttgaaatatgcagattgtgggaaaaacaaccctgagcttgccaaagagatggagaagcaatttgtcgatcttcttaatgaggaactcaagctgcagcaggttgtagctgaggagcatagtcaccacatgaacgccactcttgtcgaagcaaaaagacaagctactcaataccagcgagaagccgaaaagtgtaatgcagctacagagacctgcgaggaagctcgggagcagtctgaagtagcaatttcaaaggagaagaaactcacagcaatgtgggaacagcgagctcggcaactgggttggcatgattctcgagccacgagcatgtgacagctttagttctgaattttcaggtgaaattatttctggtagctgcatgggttatgccttgcagccaaaccaaccggcgacgtttgtctatgtaatatcagtttccacgacaacattgttaattttgagtctcaacattatagttccagcttccttacaaatgtgactagcttgctgccgcctagatatctgaattttgtcatagtactgttgaaagccattttattaaggacatgtttgtttttctcctagattatataacctgaattatgacgaaagagtaagagggtaaaatatcactttgaaagcacaaataagctgaactaaactactcaatgccagcttatttatagttctaaagtgatatttttacccttctacccttacaccataatccaacttatataatctagaagggaaacaacagatctaagtgctgatttggtgacaaaagaatcactggggatggaagagggttaaaggagaaataaactaattttcctctcaatcccatctaattctcccgtgatctctggtcactaaaacagccctaagtgttgtggttgtggtttaatgccgaattgttggagaaacttaattcaaatctggatacaggatgtacagagtcttgatctatagcatcaatctggcggtacagcttacttgttgggtgacggaagtaccttcggaatataattgttgtatgtgttgacatattgatatattcttgtgggtcgaaggcctatttgttattatataatccagcttaaataagttaaaagataaacaaataacatata

SEQ ID NO: 14675 - DNA, 944 bp, Zea Mays
ccgaactgcggggcatctcctgttccttcatcagcgagccactcagatctgccgttcctgacccggagcgaacgaggtgagccgaggcggggggacgcgccaccggccatggagcccgggctgagaatcgagtccggttccgccatccgcgtcgcggtggtccccgtgggcggcccgatcccgccgccgcgcctgcgcgaatacgcggcgctggtggcgcgcaacgcgcgcgtcgacctcgcctcggtccgcacctactacgcggagcaccagaagagcccattccagcaccagccctgggagaccggatgtctccgccttaagttcgtgctcggcggctgcgtgccttcaccctgggaagacttccagtcctcgcgcaaggtgcttgccgtgatcggcatctgccacctgccgtcctcgaccgcgtagcggcagacttcatagacgctgcgcggtcgtacccgtcagcgctcgccaaccggtgcttcgccttctgccccacggacgctcaggtgtcatgagtagtgaaatttcagccatctcagcttcatcaaacaccataaaagaactgctcacagttttctgctggcatatagaacatattctgagctggtaccccacattcaccacctgagtcaagatttccatagaaagatcctgatccaggccaatctcttttgtggctaccactgcaaccacaaattagtagcatcagaaacatataaaaactgtatcgtttcattacttgatctgttgtcgaattggaatcctagacgaacctcccaaccatgtaaggcacagtagaagcaatgggctcaacctgtgcagtgaattggtcccattgtgaaagatagccattggcatatgagctggtttgttgtgttaagtgaaccaggctcaaagtcattggactcatttgaaccatcaacctcagcctgataaaa

SEQ ID NO: 14676 - DNA, 3905 bp, Zea Mays
ccgaactgcggggcatctcctgttccttcatcagcgagccactcagatctgccgttcctgacccggagcgaacgaggtgagccgaggcggggggacgcgccaccggccatggagcccgggctgagaatcgagtccggttccgccatccgcgtcgcggtggtccccgtgggcggcccgatcccgccgccgcgcctgcgcgaatacgcggcgctggtggcgcgcaacgcgcgcgtcgacctcgcctcggtccgcacctactacgcggagcaccagaagagcccattccagcaccagccctgggagaccggatgtctccgccttaagttcgtgctcggcggctgcgtgccttcaccctgggaagacttccagtcctcgcgcaaggtgcttgccgtgatcggcatctgccacctgccgtcctcgaccgcgtagcggcagacttcatagacgctgcgcggtcgtacccgtcagcgctcgccaaccggtgcttcgccttctgccccacggacgctcaggtgtcatgagtagtgaaatttcagccatctcagcttcatcaaacaccataaaagggataatggcaatgaggatactcaagctcgtgaacactctgatgaggaaatggattctgacgaggaacatgagagtttttgtcattcagagcaaaaattatgtgatgagaacaaagcagctgaagttggaatatattgagatggctataatgtggtgtgtcgggcgatggaagttggtcaacatgcaccagaggttgaggttgctgaagcatcagatgaagatgttgaggcctacatcggcaaagccaccggtgatgagccgggcgatggaagttggtcagcatgcaccagaggttgaggctgctgaagcatcagatgaagatgttgaggcctacatcggcaaagccaccgggaagaagagggacactattattatgttccctccttctgatcagcaatcactggaacttcatatgcttacaatgatccaagatcttgctgcttctttgttgatggagtttgagaagtgggtcttgcgtgcagaatccacaggaactattttgaagaccccattggattcacaatccagtcttggctcagaggaggtaattaaggctaaaaaaagaaggctgggtcgtgcgcaaaagataataggagattattgcctcttgcctggatcacctgtggacgccaatgcacattataccactgctatagagcttgcaagattgactggtgatgttttctggcacgctggagcccttgagggtagtgtctgtgcattagtggtagataggatgggcgaaagtgatcctgttttggaggatgaagtcaaatatcgctattacaccattatccagctatatagaagagccactttacaagataatgctcaaagagtttcgcctgtgagctttgagcttgaagctgccttgaagctggcaagatacttgtgcaggcaagaacttgccaaggaggtctcagatttgttaatgggagcagcagatggtgccaaggctcttattgatgccagtgaccggctcatactatatattgaaattgcaagactttttggtacacttggttataagcgcaaggcggcctttttttcaagacaagttgcacagctgtaccttcagcaagacaatgcatatgctgctatgagtgctatgcaggttctaactatgactacaaacgcataccatgtccaaagccgaaaggctgtgaaaatgaaccatgatttgtccaagtctatagtgtcattgtttgagtcacagtggagtacccttcaaatggtggttctaagagacatactgatgtcatcaattcgggccacggatccactctcatcctggagtgctgcagctcgtcttcttcgatcattttacccactcatcacaccagctggtcagagtggcctagcaagttcacttgctaactctgccggcaagcttccaacaggcacacgctgtgctgatccatgtcttcctggcttttatcaggttgcattctttcccgcttcacccttctcaaagggatatagtaaagcggaatccacataaaaaggagtggtggactggtgcaggtccttcaggacctttcatttacactcctttcagcaaaacaggagcttctgggacttccaagcaagaggttagttggattgttggggagccggttcaagtcatggttgagttagcaaacccttgcagcttcgacctaattgtggagagcatctatctctgtccattcttggaattttgatgcctttccagttagtgttagtcttccacctaacacttcaagattagttttattatctggtattccaacaaaagtcggacaaatatcaattcctgggtgcatcgttcattgctttggtgttattacagaacacctattcaaggaggtcgattgtttgctccttagagctgcacaaggacttgtcctttctgatcctttcagatgctgtggctctagcaagtttaagtgtgtcaactttcctagcatttctgttgttcctcctctgccattgttagttgccaatgttgtgggtggagatggttctattcttctttatgaaggggaaattcgtgatgttctgataacactgacaaatgccagaaccgtaccagttgaagaagcacatgttgcattgtcagggaagaatcaggattctgttatttcgattgcccatagcacatggaaatctgcgcttcctattaaaccgggtggagaagtgacatttgcagtaactctaagagcctggcatctcagctcagcagatttggaaacagatggcagtagatctcctgcaaatccaaggagaatagcaagagaaggaatcaatccattcttggatattcactatgctggtcctgctgcgaatcttgagaatggagatatttctcttccacctggaagacgcctggttgttcccttgaatatctgtgttgtgcagggcatgcgtcttgtaagagcacgcctgttgtccatggaaatacctgctcaatttactgaaacacacataaagcctgtcagtggcaaagacgttaacttattgaaggtcgatccctataaaggaagctgggggttccgccttctggaactcgagcttttcaatcctactgatgtcgttttttatgttgatgttgctgtacatttggatgacgtggatgtgggtgaagaagtaatttcagagggcgatgctgcttgtcacaaaactagaattgatcgcgactactctgccagagtactcgtccctcttgagaacttcaaattacctgtttttgatgcttccttctttgtaaaggaaagtagtagtgatgagcctcttggatccagggccgctaccatagcagaaaggaatgccaaggcagagctaaatgtgtctatcgacaacttgatttcaaaaataaaagtgaaatggcactccgggagaaatagctcaggcgagctgaatattaaagatgctatcctggcagcaatacaggcatctataattgacatattgttgccagatcccctgacgtttagctttaagcttgctaagaatggaactgttaacaatgttgattcttcaaaggattctgacgatgtcctgaggtgcaaagatcctatatctgctcatgaaatgatccatatggaagttcaagtttgcaacaacacaaaggaaattattcggatgaaccttaacatttcatgtaaaggaaagagagggcgcaaaacaaatcgcaagcaaatgaagagtgtgacacgcggatttgttttaccgaggttcggttctcgcaaacctactccccgttgaggaggccacaaaggtcgggtctctttcaacccttaccctctctcaaacggtccctcggaccgagtgagcttctcttctcaaatcaaaaccgg

SEQ ID NO: 14677 - DNA, 842 bp, Zea Mays
ggcggggagccgcccgccgtgggtcgggctggcggcagcggtgtgggtgcaggtggcggcggggagcgcctacgtgttcccgctctactcgcacgccatcaaggaggcgctcgggtacaaccagcaagcgctcaccatgctcggcgtaggcaacgacgtcggcgagaacgtggggctcgtcccgggggtgctcgccaaccgcctcccgccctggctcatcctcgtcatcggctccgcttgcgccttcttcggcttcggcacgctctggctcgtcgtcaccaagaccgtcgccatgccttactgggtgtggtgggtagctttgtgtattggcacgaacagcagtgcatggttgggcactgctgctctagtgaccaacatgaggaatttccctctcagccgaggcactgttgctggtctcatcaagggttatgttgctgttagtgctgctgtctacactgaaacatttacgctccgtttggatcattggaattgaattccattctaataatagtaatttagacatatatcaattaagctaattcggttttatgcaacatatatttgtatactattattagcaagatgtcgaagatatttatgtgctatatttttactatataggagtgagacgaagagtgtcatgtaagttacagagtagaaacaaattctacttatgcataaaatcatttcccaccctccaccccatgaatttgagataggcttatatctgaactttggaaagtggtggaatgtcaaattccaaactaaataagttactttattgagtgaattccaattcttctaaaatgaagggatccaaacgccccgttaatggaatgcta

SEQ ID NO: 14678 - DNA, 1733 bp, Zea Mays
atgacactttatccaaacaaacaaacgaaggaaaattccagcacccttgctccatcttattcaagtgatagcctgtctggtgcagatccagagaactcacaaccacttctgggcagtgcctcaacaacacttgctacaggtaccaatgaatctgatgacagtactgatttggatgttctattggctgagggtgagggagcagtgaatttgaaaaacaaaagagggccaagaagggggggtgatttcacatttcgtgaagccttagtaaaggcggacttctggctactgtttgttgtttacttttgtggagttggcacaggagtcactgttctcaataacctggctcagattggaatgtctgttggtgctaatgatacaactattttgttgtgcctctttggcttctgcaactttgctggccgtatctttggtggatctgtctctgaatatttcgtaagatgatgtgagaggacaaggctatgataatgggtcaaatatgaaaggaaaacatcaaggtgtacaaaggaaacttttggatgtaaatcccagagctttctattctgcttgtggttgtcatagccttaatttaacactttgtgatatggctactaagacttgtggcaaagctaaagacttttttggaatcatccgacgtatctacacaacgttttctaactctactaaaaaatggaagattctaaaagataacataactggattgactctcaagtcagtttcagctacatgatgggagagtcgcattgacagtgttaaagctatcagatttcaatgtgcagacatttgtgaggctctacttgaggtatctgatactgataatgatcaggctaaaggtctagcaaataatgaacttggacaatatgaatttatagtggcggtagtcatttggtatgaggtattgtatgctgttaatttggtaagcaaacaaatgcaagcaaaggatatgcttattgatgttgctattgagaaagtgcaagggcttctttctttctttgagggctattgggaaactggtttcttagaagctttggagtcagccaaaaaaatcgcacttgagatggatattgatacaacatttcctaaaaaagacaaattaaaagaaagagacattacgatgaaaacccagaagacacaaatattgccacaatgtctcgagaggacttatttcgagtagagtattttgtacctctagttgatcaagctattgcctctcttacgacgagatttgagcagtacaaagattaccaaaaaaatttggtttcttatttacttcagaaacattgcagtcgttggatgatcagggcttacagtcttcttgtgataatcttgaggatgtccttaaaaaggatggaacgtctgatattgatgccaaagaactatatatggagttgaagtttctacgagaatttattccaaaagaaagaatgaggcctattgaaattctacggtttttaagggagcatggttgttttcctaatgcaaatattgcatatagagttctattgactattcctgtgacagttgcaacagcagagcgaagcttttctaaattgaaactattaaagacttatttgcgttctacaatgacacaagaaagacttaatgatttggctataatagcacttgaaggcaaaatgttggagaaaattgattatgagcatatcattgaagacttcatttcaaaaaatactaaaagaatgatgctattcaaatag

SEQ ID NO: 14679 - DNA, 2301 bp, Zea Mays
tcgctgctctgcgcctacgtacgccggtacgcattgccgcctcctccccctctttccagtcccgacccgcagcgggcctaatcctcgtcttcctcccgtaaaccacctcgtccctatccgcagcaaccgttcgccgcgccgcgaggcccgctgatcccaccgacctccaccgctatggctcctctgtcccgcgcggctcgcctccttcgatgcgccgtcgggcggctgaggttgccgccgccggcccgggccttctccagcgccgcggcggcgaccgagacgggggcggggaacggacgcgaggccgtgatcgccgctgctgccgtggcgatggccgggtccgggcttgggctgtggctgaaaccgccgtcgcttgccgactccggcgaggcgcccggcggtcagatctcggtcacctgcgctgcttccacggaggcgcaggaggagaaggggaggttcctgttcgcagactcattccgcagaagagtattctttaactatgagaagaggatacggcttctcagccctcctgagaagatatttgagtactttgcttctgtgaggaacccagaaggggaagtttacatgttgcctggggacttgatgagagcagtagtccctgtttttcctccatcagagtccaccatagttcgtgaaggaagattaagaggggagcggagccctggagagttgcattgtgctccatcggagttctttatgctgttagacactaatagtgacggtctcatctcctttgccgagtgtttatctagcacctgttcaggataactgatgtactgtatatatcaataaatcattatgtgacgccacaggtacatcttttttgtgacattgctcagcattcctgagtcacatttcactgcggccttcaaaatgtttgacgttgaccacagtggggtgatagacagagaagagtttaagaaagtaatgtcactgatgcggtcctttaacagacaagggtccactcataaggatggtttacgtattggacttaaagttggccagcctgtggagaatggtggggtggttgagtacttctttgggagtgatgggaacgagcctctacactgtgtcaggttctcaaattttttgaaggagttgcatgacgagattattcgattggagtttagtcattatgatgtcaagtcgtctaaaactataccagcaaaggattttgcattgtccatggttgcttctgctgacatgaaccatatcaacaagctgcttgatagagctgatggtttggtcaaggagccagatctgaaggacatacgcatcacctttgaggagtttaaggcatttgctgacttgcgacaaagattggagccactgtcgatggctatctttgctcatgggaaagtgaatggattattgacaaaggaggatctaaaacgtgcaacacaacatgtttgtggtgtcaacttaactgatagagtggtagacatcattttccatgtgttcgacacaaatcaggatgggaacctgagctcggaagagttcttaagagcattagaaagaagagaaactgctattcgtcaaccaacaataccaggtccatggggttttttgtcttgctggttcagtggtaggaagtgttcacttaaacaggtggtgctctgatttggcccctacttgatcctcactgaatctgtcatccaccttcaattgtcatctcccggtacgtatgtcatctcctgttgcaggaggtaatcacgaagcagtgcctagctgatcggtaaaacgactttgttgtacatgtcgtctccgagtccgaagcttgcctagcagtagcagctgtaattgtaagtagtgtcagccctaggactgaaccttgtgttattctcatatgtaaatcaaaccccatacgatttaaatatatgatatctgttggcgttgactggacgtcaatcactgcgatgagaatcggcggcagtgctctctgcagaggcgtagacggtccgtggccaggggccggacggtccgcgacctggcgtagaggctagggttctgcctgacgagctggatggtctgcgcgtgtgcaggggcggcagatttcgccgctgacgcctatatctcgcctccgggagggaccccgtcgggaaaagagattctaggctttgtcttgggatcggcagaccacccaagacgcctctaatcgacctagagcgacctagagtcagagagaggtgaagatttagggagaggaatctaagtacctgtctactcctaggggcaaaatgtgaagaacgagatatatatggattgattgatcgattgttg

SEQ ID NO: 14680 - DNA, 2282 bp, Zea Mays
tcgctgctctgcgcctacgtacgccggtacgcattgccgcctcctccccctctttccagtcccgacccgcagcgggcctaatcctcgtcttcctcccgtaaaccacctcgtccctatccgcagcaaccgttcgccgcgccgcgaggcccgctgatcccaccgacctccaccgctatggctcctctgtcccgcgcggctcgcctccttcgatgcgccgtcgggcggctgaggttgccgccgccggcccgggccttctccagcgccgcggcggcgaccgagacgggggcggggaacggacgcgaggccgtgatcgccgctgctgccgtggcgatggccgggtccgggcttgggctgtggctgaaaccgccgtcgcttgccgactccggcgaggcgcccggcggtcagatctcggtcacctgcgctgcttccacggaggcgcaggaggagaaggggaggttcctgttcgcagactcattccgcagaagagtattctttaactatgagaagaggatacggcttctcagccctcctgagaagatatttgagtactttgcttctgtgaggaacccagaaggggaagtttacatgttgcctggggacttgatgagagcagtagtccctgtttttcctccatcagagtccaccatagttcgtgaaggaagattaagaggggagcggagccctggagagttgcattgtgctccatcggagttctttatgctgttagacactaatagtgacggtctcatctcctttgccgagtgtttatctagcacctgttcaggataactgatgtactgtatatatcaataaatcattatgtgacgccacaggtacatcttttttgtgacattgctcagcattcctgagtcacatttcactgcggccttcaaaatgtttgacgttgaccacagtggggtgatagacagagaagagtttaagaaagtaatgtcactgatgcggtcctttaacagacaagggtccactcataaggatggtttacgtattggacttaaagttggccagcctgtggagaatggtggggtggttgagtacttctttgggagtgatgggaacgagcctctacactgtgtcaggttctcaaattttttgaaggagttgcatgacgagattattcgattggagtttagtcattatgatgtcaagtcgtctaaaactataccagcaaaggattttgcattgtccatggttgcttctgctgacatgaaccatatcaacaagctgcttgatagagctgatggtttggtcaaggagccagatctgaaggacatacgcatcacctttgaggagtttaaggcatttgctgacttgcgacaaagattggagccactgtcgatggctatctttgctcatgggaaagtgaatggattattgacaaaggaggatctaaaacgtgcaacacaacatgtttgtggtgtcaacttaactgatagagtggtagacatcattttccatgtgttcgacacaaatcaggatgggaacctgagctcggaagagttcttaagagcattagaaagaagagaaactgctattcgtcaaccaacaataccaggtccatggggttttttgtcttgctggttcagtggtaggaagtgttcacttaaacaggtggtgctctgatttggcccctacttgatcctcactgaatctgtcatccaccttcaattgtcatctcccgttgcaggaggtaatcacgaagcagtgcctagctgatcggtaaaacgactttgttgtacatgtcgtctccgagtccgaagcttgcctagcagtagcagctgtaattgtaagtagtgtcagccctaggactgaaccttgtgttattctcatatgtaaatcaaaccccatacgatttaaatatatgatatctgttggcgttgactggacgtcaatcactgcgatgagaatcggcggcagtgctctctgcagaggcgtagacggtccgtggccaggggccggacggtccgcgacctggcgtagaggctagggttctgcctgacgagctggatggtctgcgcgtgtgcaggggcggcagatttcgccgctgacgcctatatctcgcctccgggagggaccccgtcgggaaaagagattctaggctttgtcttgggatcggcagaccacccaagacgcctctaatcgacctagagcgacctagagtcagagagaggtgaagatttagggagaggaatctaagtacctgtctactcctaggggcaaaatgtgaagaacgagatatatatggattgattgatcgattgttg

SEQ ID NO: 14681 - DNA, 2588 bp, Zea Mays
ctcaaggcagccttcctcgtcacttccgcagcgacacaatccaagggcccgtccggcagtggcacaccaacccgccgccccgccacgggcgcgcgcgcgaacactgggccccacctggcagcaattcgcccccggcccccatacaaatatccggcgcgtcgcggcgtcggcgtcggcgtcgtttaccagtcttctcacccggtcgccggtcttgagcgaccgcctcgctacttcctcctaccggcgcaggcacacggtttccgcgccagcaaggggtgcccaccgcaaagatccgatcgatcagatcaaaagggaattcctgaaaaggagagaggagcacccttcctcgccatttccgtccaagtgttttcccgaggagtcgtgcgtgcctgctggcgctggggcggctggacgggagcattgctggccgcggcggagcccggcgctcgagtcccttctctcctctcctctcctctcctctgcggggggcagccttttatttgacaacggtataaagaaatcaagtacaaatgaagaggcacatctctgcccagtatttgatgactgaagataggtagcagtatggtagctgctacaattgcgggaatgtttcttgtgtgttttgagtccctctgcacctgttttggcacaaaaaggaaagatgaaagcgaagaccatgttcttgcagaacattccaattccttgagttcttatcaaatgaggtcggtttctgatagaatttctgcaagctcgcttcgagcacctgcaagtccatctagattttcattgtcttcgccaccaagcagaaatgaacctttaaacatcagtcttgaacatgtggttaaactgacacataacttcgctccgaccttgatgattggtgaaggttactttggaaaggtctacagagcgacactgcgagatgggcgtgtagtagctattaaaagggcaaagaaggtaacttattttggtccaggcaactattctagcaactgtcctagcatggtgccagtttttgtgagttgtattcaaacttatttgaactgtgaccttatcttctactctttcctttatatatacacacaattgctcatctgcactcgcgcacatttgtatgcattgcattgtggggaagcaagattgagctaagagtggcaaattcaggtttaagtatgttttagatttagacccattacttgatccatatttatagagcggtagatgggagctggatgatgaactatgaactcataattccattatttgctccagcagtccatgataatgtttatgtgctggtttttatttttcaatatgcttcttcataaacttccttttgcatgaacaattttcttgtagaccatactttgcggtattgattctgatatggttttatttggcaggaaaattttgtttctttacgtactgaattcagcaacgaagtcgcattactaaaaagtattgaacataagaacttggtccgattgcttggttatattgacaaacccaatgaacgaattctcataacagagtatgtaccaaatggcaatcttagggagcatttggatggtcaacatggcctagttttgggatttaatcagcggcttgaaatagctatagatgttgcccatgggttgacttatctgcatctctatgcagcccataatacatagggatgtgaagtcatcaaacattctactgacagaaggcttcatggccaaagtggctgacttcggatttgcaagaactggtcctactgagccaggccagtcacagattgagactgatgtgagaggaacagcagggtatttagatccagagtatctgagatcaaaccatcttacgatcaagagcgatgtgttctcttatggtgttttgcttctagaaatcctttcaggacgtcgtcctattgaggcaaggaggggtccaacagaaaggattacagtgagatgggccttctataagtacaacagaggaaatgttagggacatactggatccaatgttaacagaagcagtgaacgagaatatactgaatagaatctttgatctggcgttccagtgtgtcgctcctacccgcgaagacagaccatccatgaaagaagttgtggagaggctgtggaagataagaagggatcatacaaaaatacaaaggatagcagaattgactctctgaatccttgaaccagctgatcccggttgccgtttttgcttgagggaacatggatcagttcctagtgaagaccaaaggtcaccacataaaaataatgcaaattttgtggttgtgaacaactggaactttgtacagggttgcaaaattgttgttgtattatgttgtattgtacatggctctatgttcaagagatcaaggtgccgaacaatggcctgtgatcgatgatttccctgtgtagccactagcccgtttatcaacataagctgttcagtgatctgtaaggcacaatgtagcttctgtgtaacacctgcattgttggatgaggcttttaaaacagttagatatgaataaaatctttggctagtttcttctgtatatctatattacttattaaagctataagagatagactgccg

SEQ ID NO: 14682 - DNA, 1964 bp, Zea Mays
ctcaaggcagccttcctcgtcacttccgcagcgacacaatccaagggcccgtccggcagtggcacaccaacccgccgccccgccacgggcgcgcgcgcgaacactgggccccacctggcagcaattcgcccccggcccccatacaaatatccggcgcgtcgcggcgtcggcgtcggcgtcgtttaccagtcttctcacccggtcgccggtcttgagcgaccgcctcgctacttcctcctaccggcgcaggcacacggtttccgcgccagcaaggggtgcccaccgcaaagatccgatcgatcagatcaaaagggaattcctgaaaaggagagaggagcacccttcctcgccatttccgtccaagtgttttcccgaggagtcgtgcgtgcctgctggcgctggggcggctggacgggagcattgctggccgcggcggagcccggcgctcgagtcccttctctcctctcctctcctctcctctgcggggggcagccttttatttgacaacggtataaagaaatcaagtacaaatgaagaggcacatctctgcccagtatttgatgactgaagataggtagcagtatggtagctgctacaattgcgggaatgtttcttgtgtgttttgagtccctctgcacctgttttggcacaaaaaggaaagatgaaagcgaagaccatgttcttgcagaacattccaattcctgttactttggaaaggtctacagagcgacactgcgagatgggcgtgtagtagctattaaaagggcaaagaaggaaaattttgtttctttacgtactgaattcagcaacgaagtcgcattactaaaaagtattgaacataagaacttggtccgattgcttggttatattgacaaacccaatgaacgaattctcataacagagtatgtaccaaatggcaatcttagggagcatttggatggtcaacatggcctagttttgggatttaatcagcggcttgaaatagctatagatgttgcccatgggttgacttatctgcatctctatgcagagaagcccataatacatagggatgtgaagtcatcaaacattctactgacagaaggcttcatggccaaagtggctgacttcggatttgcaagaactggtcctactgagccaggccagtcacagattgagactgatgtgagaggaacagcagggtatttagatccagagtatctgagatcaaaccatcttacgatcaagagcgatgtgttctcttatggtgttttgcttctagaaatcctttcaggacgtcgtcctattgaggcaaggaggggtccaacagaaaggattacagtgagatgggccttctataagtacaacagaggaaatgttagggacatactggatccaatgttaacagaagcagtgaacgagaatatactgaatagaatctttgatctggcgttccagtgtgtcgctcctacccgcgaagacagaccatccatgaaagaagttgtggagaggctgtggaagataagaagggatcatacaaaaatacaaaggatagcagaattgactctctgaatccttgaaccagctgatcccggttgccgtttttgcttgagggaacatggatcagttcctagtgaagaccaaaggtcaccacataaaaataatgcaaattttgtggttgtgaacaactggaactttgtacagggttgcaaaattgttgttgtattatgttgtattgtacatggctctatgttcaagagatcaaggtgccgaacaatggcctgtgatcgatgatttccctgtgtagccactagcccgtttatcaacataagctgttcagtgatctgtaaggcacaatgtagcttctgtgtaacacctgcattgttggatgaggcttttaaaacagttagatatgaataaaatctttggctagtttcttctgtatatctatattacttattaaagctataagagatagactgccg

SEQ ID NO: 14683 - DNA, 1888 bp, Zea Mays
ctcaaggcagccttcctcgtcacttccgcagcgacacaatccaagggcccgtccggcagtggcacaccaacccgccgccccgccacgggcgcgcgcgcgaacactgggccccacctggcagcaattcgcccccggcccccatacaaatatccggcgcgtcgcggcgtcggcgtcggcgtcgtttaccagtcttctcacccggtcgccggtcttgagcgaccgcctcgctacttcctcctaccggcgcaggcacacggtttccgcgccagcaaggggtgcccaccgcaaagatccgatcgatcagatcaaaagggaattcctgaaaaggagagaggagcacccttcctcgccatttccgtccaagtgttttcccgaggagtcgtgcgtgcctgctggcgctggggcggctggacgggagcattgctggccgcggcggagcccggcgctcgagtcccttctctcctctcctctcctctcctctgcggggggcagccttttatttgacaacggtataaagaaatcaagtacaaatgaagaggcacatctctgcccagtatttgatgactgaagataggtagcagtatggtagctgctacaattgcgggaatgtttcttgtgtgttttgagtccctctgcacctgttttggcacaaaaaggaaagatgaaagcgaagaccatgttcttgcagaacattccaattcctgaaaattttgtttctttacgtactgaattcagcaacgaagtcgcattactaaaaagtattgaacataagaacttggtccgattgcttggttatattgacaaacccaatgaacgaattctcataacagagtatgtaccaaatggcaatcttagggagcatttggatggtcaacatggcctagttttgggatttaatcagcggcttgaaatagctatagatgttgcccatgggttgacttatctgcatctctatgcagcccataatacatagggatgtgaagtcatcaaacattctactgacagaaggcttcatggccaaagtggctgacttcggatttgcaagaactggtcctactgagccaggccagtcacagattgagactgatgtgagaggaacagcagggtatttagatccagagtatctgagatcaaaccatcttacgatcaagagcgatgtgttctcttatggtgttttgcttctagaaatcctttcaggacgtcgtcctattgaggcaaggaggggtccaacagaaaggattacagtgagatgggccttctataagtacaacagaggaaatgttagggacatactggatccaatgttaacagaagcagtgaacgagaatatactgaatagaatctttgatctggcgttccagtgtgtcgctcctacccgcgaagacagaccatccatgaaagaagttgtggagaggctgtggaagataagaagggatcatacaaaaatacaaaggatagcagaattgactctctgaatccttgaaccagctgatcccggttgccgtttttgcttgagggaacatggatcagttcctagtgaagaccaaaggtcaccacataaaaataatgcaaattttgtggttgtgaacaactggaactttgtacagggttgcaaaattgttgttgtattatgttgtattgtacatggctctatgttcaagagatcaaggtgccgaacaatggcctgtgatcgatgatttccctgtgtagccactagcccgtttatcaacataagctgttcagtgatctgtaaggcacaatgtagcttctgtgtaacacctgcattgttggatgaggcttttaaaacagttagatatgaataaaatctttggctagtttcttctgtatatctatattacttattaaagctataagagatagactgccg

SEQ ID NO: 14684 - DNA, 2593 bp, Zea Mays
ctcaaggcagccttcctcgtcacttccgcagcgacacaatccaagggcccgtccggcagtggcacaccaacccgccgccccgccacgggcgcgcgcgcgaacactgggccccacctggcagcaattcgcccccggcccccatacaaatatccggcgcgtcgcggcgtcggcgtcggcgtcgtttaccagtcttctcacccggtcgccggtcttgagcgaccgcctcgctacttcctcctaccggcgcaggcacacggtttccgcgccagcaaggggtgcccaccgcaaagatccgatcgatcagatcaaaagggaattcctgaaaaggagagaggagcacccttcctcgccatttccgtccaagtgttttcccgaggagtcgtgcgtgcctgctggcgctggggcggctggacgggagcattgctggccgcggcggagcccggcgctcgagtcccttctctcctctcctctcctctcctctgcggggggcagccttttatttgacaacggtataaagaaatcaagtacaaatgaagaggcacatctctgcccagtatttgatgactgaagataggtagcagtatggtagctgctacaattgcgggaatgtttcttgtgtgttttgagtccctctgcacctgttttggcacaaaaaggaaagatgaaagcgaagaccatgttcttgcagaacattccaattccttgagttcttatcaaatgaggtcggtttctgatagaatttctgcaagctcgcttcgagcacctgcaagtccatctagattttcattgtcttcgccaccaagcagaaatgaacctttaaacatcagtcttgaacatgtggttaaactgacacataacttcgctccgaccttgatgattggtgaaggttactttggaaaggtctacagagcgacactgcgagatgggcgtgtagtagctattaaaagggcaaagaaggtaacttattttggtccaggcaactattctagcaactgtcctagcatggtgccagtttttgtgagttgtattcaaacttatttgaactgtgaccttatcttctactctttcctttatatatacacacaattgctcatctgcactcgcgcacatttgtatgcattgcattgtggggaagcaagattgagctaagagtggcaaattcaggtttaagtatgttttagatttagacccattacttgatccatatttatagagcggtagatgggagctggatgatgaactatgaactcataattccattatttgctccagcagtccatgataatgtttatgtgctggtttttatttttcaatatgcttcttcataaacttccttttgcatgaacaattttcttgtagaccatactttgcggtattgattctgatatggttttatttggcaggaaaattttgtttctttacgtactgaattcagcaacgaagtcgcattactaaaaagtattgaacataagaacttggtccgattgcttggttatattgacaaacccaatgaacgaattctcataacagagtatgtaccaaatggcaatcttagggagcatttggatggtcaacatggcctagttttgggatttaatcagcggcttgaaatagctatagatgttgcccatgggttgacttatctgcatctctatgcagagaagcccataatacatagggatgtgaagtcatcaaacattctactgacagaaggcttcatggccaaagtggctgacttcggatttgcaagaactggtcctactgagccaggccagtcacagattgagactgatgtgagaggaacagcagggtatttagatccagagtatctgagatcaaaccatcttacgatcaagagcgatgtgttctcttatggtgttttgcttctagaaatcctttcaggacgtcgtcctattgaggcaaggaggggtccaacagaaaggattacagtgagatgggccttctataagtacaacagaggaaatgttagggacatactggatccaatgttaacagaagcagtgaacgagaatatactgaatagaatctttgatctggcgttccagtgtgtcgctcctacccgcgaagacagaccatccatgaaagaagttgtggagaggctgtggaagataagaagggatcatacaaaaatacaaaggatagcagaattgactctctgaatccttgaaccagctgatcccggttgccgtttttgcttgagggaacatggatcagttcctagtgaagaccaaaggtcaccacataaaaataatgcaaattttgtggttgtgaacaactggaactttgtacagggttgcaaaattgttgttgtattatgttgtattgtacatggctctatgttcaagagatcaaggtgccgaacaatggcctgtgatcgatgatttccctgtgtagccactagcccgtttatcaacataagctgttcagtgatctgtaaggcacaatgtagcttctgtgtaacacctgcattgttggatgaggcttttaaaacagttagatatgaataaaatctttggctagtttcttctgtatatctatattacttattaaagctataagagatagactgccg

SEQ ID NO: 14685 - DNA, 2669 bp, Zea Mays
ctcaaggcagccttcctcgtcacttccgcagcgacacaatccaagggcccgtccggcagtggcacaccaacccgccgccccgccacgggcgcgcgcgcgaacactgggccccacctggcagcaattcgcccccggcccccatacaaatatccggcgcgtcgcggcgtcggcgtcggcgtcgtttaccagtcttctcacccggtcgccggtcttgagcgaccgcctcgctacttcctcctaccggcgcaggcacacggtttccgcgccagcaaggggtgcccaccgcaaagatccgatcgatcagatcaaaagggaattcctgaaaaggagagaggagcacccttcctcgccatttccgtccaagtgttttcccgaggagtcgtgcgtgcctgctggcgctggggcggctggacgggagcattgctggccgcggcggagcccggcgctcgagtcccttctctcctctcctctcctctcctctgcggggggcagccttttatttgacaacggtataaagaaatcaagtacaaatgaagaggcacatctctgcccagtatttgatgactgaagataggtagcagtatggtagctgctacaattgcgggaatgtttcttgtgtgttttgagtccctctgcacctgttttggcacaaaaaggaaagatgaaagcgaagaccatgttcttgcagaacattccaattccttgagttcttatcaaatgaggtcggtttctgatagaatttctgcaagctcgcttcgagcacctgcaagtccatctagattttcattgtcttcgccaccaagcagaaatgaacctttaaacatcagtcttgaacatgtggttaaactgacacataacttcgctccgaccttgatgattggtgaaggttactttggaaaggtctacagagcgacactgcgagatgggcgtgtagtagctattaaaagggcaaagaaggaaaattttgtttctttacgtactgaattcagcaacgaagtcgcattactaaaaagtattgaacataagaacttggtccgattgcttggttatattgacaaacccaatgaacgaattctcataacagagtatgtaccaaatggcaatcttagggagcatttggatggtcaacatggcctagttttgggatttaatcagcggcttgaaatagctatagatgttgcccatgggttgacttatctgcatctctatgcaggtacactttgcgtacttagttcagcatcaggcaatttagtctttttaaatccaaatcatgttcatgcacttgtgctgcttcaaaactgcagtaaggaagtgaaccagtatgcttaggcactctttttaagataaaaagaattccttttgcatctaaagcttgttataggatgggacgatagaggtccagttccttatgattcagtctgaaatggaactaaatctgaatctgtagagcaaaccacccaatcaagtataagtagttgtgaccaaaactgtatttaatcaaacattttttttccatgatgcaattccacatgtgaactagccccatggatatgtaacaatgtaactctcgtagtgaaaaataagtttccataacacatttatgttcttcagcttttaagtgatgaagtggtatgcacccagataacaagaagactttattttgtcattgttacaaaaaaactgcatacatttttttccaattcatagtttgatgctattcctattttgcctttagagaagcccataatacatagggatgtgaagtcatcaaacattctactgacagaaggcttcatggccaaagtggctgacttcggatttgcaagaactggtcctactgagccaggccagtcacagattgagactgatgtgagaggaacagcagggtatttagatccagagtatctgagatcaaaccatcttacgatcaagagcgatgtgttctcttatggtgttttgcttctagaaatcctttcaggacgtcgtcctattgaggcaaggaggggtccaacagaaaggattacagtgagatgggccttctataagtacaacagaggaaatgttagggacatactggatccaatgttaacagaagcagtgaacgagaatatactgaatagaatctttgatctggcgttccagtgtgtcgctcctacccgcgaagacagaccatccatgaaagaagttgtggagaggctgtggaagataagaagggatcatacaaaaatacaaaggatagcagaattgactctctgaatccttgaaccagctgatcccggttgccgtttttgcttgagggaacatggatcagttcctagtgaagaccaaaggtcaccacataaaaataatgcaaattttgtggttgtgaacaactggaactttgtacagggttgcaaaattgttgttgtattatgttgtattgtacatggctctatgttcaagagatcaaggtgccgaacaatggcctgtgatcgatgatttccctgtgtagccactagcccgtttatcaacataagctgttcagtgatctgtaaggcacaatgtagcttctgtgtaacacctgcattgttggatgaggcttttaaaacagttagatatgaataaaatctttggctagtttcttctgtatatctatattacttattaaagctataagagatagactgccg

SEQ ID NO: 14686 - DNA, 1467 bp, Zea Mays
ctgcgcgttccggcgattggtagcggttcggatatttggggggcagccttttatttgacaacggtataaagaaatcaagtacaaatgaagaggcacatctctgcccagtatttgatgactgaagataggtagcagtatggtagctgctacaattgcgggaatgtttcttgtgtgttttgagtccctctgcacctgttttggcacaaaaaggaaagatgaaagcgaagaccatgttcttgcagaacattccaattcctgttactttggaaaggtctacagagcgacactgcgagatgggcgtgtagtagctattaaaagggcaaagaaggaaaattttgtttctttacgtactgaattcagcaacgaagtcgcattactaaaaagtattgaacataagaacttggtccgattgcttggttatattgacaaacccaatgaacgaattctcataacagagtatgtaccaaatggcaatcttagggagcatttggatggtcaacatggcctagttttgggatttaatcagcggcttgaaatagctatagatgttgcccatgggttgacttatctgcatctctatgcagaaggcttcatggccaaagtggctgacttcggatttgcaagaactggtcctactgagccaggccagtcacagattgagactgatgtgagaggaacagcagggtatttagatccagagtatctgagatcaaaccatcttacgatcaagagcgatgtgttctcttatggtgttttgcttctagaaatcctttcaggacgtcgtcctattgaggcaaggaggggtccaacagaaaggattacagtgagatgggccttctataagtacaacagaggaaatgttagggacatactggatccaatgttaacagaagcagtgaacgagaatatactgaatagaatctttgatctggcgttccagtgtgtcgctcctacccgcgaagacagaccatccatgaaagaagttgtggagaggctgtggaagataagaagggatcatacaaaaatacaaaggatagcagaattgactctctgaatccttgaaccagctgatcccggttgccgtttttgcttgagggaacatggatcagttcctagtgaagaccaaaggtcaccacataaaaataatgcaaattttgtggttgtgaacaactggaactttgtacagggttgcaaaattgttgttgtattatgttgtattgtacatggctctatgttcaagagatcaaggtgccgaacaatggcctgtgatcgatgatttccctgtgtagccactagcccgtttatcaacataagctgttcagtgatctgtaaggcacaatgtagcttctgtgtaacacctgcattgttggatgaggcttttaaaacagttagatatgaataaaatctttggctagtttcttctgtatatctatattacttattaaagctataagagatagactgccg

SEQ ID NO: 14687 - DNA, 2037 bp, Zea Mays
atcgctgtgactgtgagggagagaaaccaaggcagaagggcagagggtcgatgcgctgggacttgcctatgcgcgaagggcatcctcggagcctgaagttcctccgtcgccgcaatgccgcactgcaactgtcaggccccggcactgcgtattcgatggtgagcacggtgagaattctttccgaatttttgcctcgtcgtccactacctatggcaccctcgagagtatagcttagggcgtgggagcgtgtgatcggcgttctccggtgatggcttccgccatggaagtgacgcgccgctgctgtctgtagttgagagagagatgtggtcgcgaccgtcgatcgcggaaccagtggccaagactagaccacgcttaccgttttgtttcatccgattcagaccgtcaatctctgatccgacgggcatcagtgcataccggttcggcgtctcatctcaagcgtcgtatcacgatcgtgcggctctatatgcacgatacctcttcgtgcgatagatctgagtcgttcattttggatcgggcgcgtaggattacatcatgcttcataaaatccgagccatagatcccggatccggcggccacgaaaacgtaccatttcgtcgtgggcgagatctaatcattgtcgtgcgcgcttgatcctgcggcctagactcaaccataccctttcagcctgacattattgcataagagccccacgacttgttcataattaacccgccaaccgattactactgtaaagaaattaatttaggtcctattatttacatattagcgtctaggttcttcggaaccttacaccgccgtccacgaatttcagaataaatacaaaattgaagctgaaatgaatttttagtatacaaacaattccagagatcacgaaaaattcatatcttgtccgtttttacaactctgatttgatctgtttcagttgtgataccccgtaattaaaattgtcgactcattaacaacaacatttgtattatatcacatacttatataatttgatatttgtttaacttatgtttagcagaattaacctgctaatcaaaaatcatatgtctataattataatttgagtaaaaaagtgatctataaattaaagttataacttagattaaagctaaaattagatatttctttagagtatctttattacatggattataatcaatatagaacatagtttaatacctagaactttcgaaaattgtacccgttaaatcgtaactctgattgtagtgcttctcgaacctacactctcgtagcgacgcatagaatgttattgtgtggttcattctcatgtttggtgttatgttatttttatatattccctgcctatctgtatgtattgctacaagtagaggcgaggtgacgagcaacccgaagccaacttttgggtcagcatctagacaacacgttatcacaagtataagacaagttgtgcccttgatcactcttctttacccaataatgttcctattaatcattatgatctgcttaggtgaatcttgatgggacctgttgggggtcttcctcttccgaaggtcctcaaaaacatgactaaccatctgcttctagcataatattgattactatagggagcttcggttcatgatgagagtcttctcctatggcgaaggtatacaagacgaagatatagcccgcggatgataagaatgaacgccgaagctataactgaaaattaacagcttcggtttaaaatggtgacgaagactaagcatggtgctgagccgaaaaggaaaagactagctagtccctaataatctatgttatagttgtgaataaatgttaaggatataaatgtacttttatccgggctgcgtctcgtgcctataaataggtgaacagtgccaccatactgttcacgctgaattgtaattgctttcgcatcaacaccttcgaacaagccgaaggtactaatgtaatctaaattctgttgatgcccatgtgcgtattatgaaatacatatgtatatgagccaacagattgcatgcattgtct

SEQ ID NO: 14688 - DNA, 1359 bp, Zea Mays
actgattaccgaataaatatcgtttccgaccgaaaccgggtgttacacgccgccgccgccgccgccgccgccgacggcgatagatttggggatggatttgggctcgtgctacctcggtgggaacgccgacgcggtggagttctgcccgcaccgcccgttccgccacgtgctggccgccgccacctacacgctgcaggagcaggagcgcgaccgggcgggcagcatatccctcttctcagttgacgttgcctcggaggacgcgtcccggaggctccagctgctgtatactgtggagaccgccggcatcttcgatatgaagtggagccccaagtcgccgctgctcgcgcaggccgacgcccacggccgcctcgcgctccggcgcttggagcaggaggacggctcggacacaggcattctcctcaccgatgtctctgctgaagatatttcttcttcaatgtgcttatatgtggactggaaccaaactgcggagtctctgtctgttggattatcagatggctcactgtctctggtttcagtgagagaggaccggctggagatatcagaacagtggactgcacatcagttcgaagtctggacatgctattttgatcgtacaaggccacacttgctgtacagtggatcagatgactgttgtttcagttgctgggacttgagagaaagcccatcaaacattgtttttcaaaacaaaaaatctcataagatgggtgtctgttgtattacacagaatccgttggaggggaacatgctacttactgggagttatgatgaatttctcagagtttgggacatgagatttatggcaaaacctgtcaatcaaaagttgataaatctaggaggtggtgtgtggaggatgaagtatcatcctagtattgcagatgttgtattggctgcgtgcatgcacaatgggtttgccattgtaaaagtaggttctggagatgctacggtaatggaaacatattgcaagcatgagtccttagcatacggtgcagattggcagaaaagtgaagaggtggagcaaaatggaaattcttcagttgttgctacttgttcgttttatgatcgcctcctccgcgtgtggcaaccagagaatctagctgagctttaaagacctaaagctttttttgaattgaattcaagcatgactaggccatgaatctatttcctgaatgaaccagtataatttcattcaggagcccttgcctgcctgcagcagcgaagcatacagcagttcattccacgtatctggcacgccaggcaagcaccagtggctgcagtcctgcttcttcaccatcgccatccgttcctcctccgtatcacaacgtatccggtagactgacg

SEQ ID NO: 14689 - DNA, 1316 bp, Zea Mays
cgaccgaaaccgggtgttacacgccgccgccgccgccgccgccgccgacggcgatagatttggggatggatttgggctcgtgctacctcggtgggaacgccgacgcggtggagttctgcccgcaccgcccgttccgccacgtgctggccgccgccacctacacgctgcaggagcaggagcgcgaccgggcgggcagcatatccctcttctcagttgacgttgcctcggaggacgcgtcccggaggctccagctgctgtatactgtggagaccgccggcatcttcgatatgaagtggagccccaagtcgccgctgctcgcgcaggccgacgcccacggccgcctcgcgctccggcgcttggagcaggaggacggctcggacacaggcattctcctcaccgatgtctctgctgaagatatttcttcttcaatgtgcttatatgtggactggaaccaaactgcggagtctctgtctgttggattatcagatggctcactgtctctggtttcagtgagagaggaccggctggagatatcagaacagtggactgcacatcagttcgaagtctggacatgctattttgatcgtacaaggccacacttgctgtacagtggatcagatgactgttgtttcagttgctgggacttgagagaaagcccatcaaacattgtttttcaaaacaaaaaatctcataagatgggtgtctgttgtattacacagaatccgttggaggggaacatgctacttactgggagttatgatgaatttctcagagtttgggacatgagatttatggcaaaacctgtcaatcaaaagttgataaatctaggaggtggtgtgtggaggatgaagtatcatcctagtattgcagatgttgtattggctgcgtgcatgcacaatgggtttgccattgtaaaagtaggttctggagatgctacggtaatggaaacatattgcaagcatgagtccttagcatacggtgcagattggcagaaaagtgaagaggtggagcaaaatggaaattcttcagttgttgctacttgttcgttttatgatcgcctcctccgcgtgtggcaaccagagaatctagctgagctttaaagacctaaagctttttttgaattgaattcaagcatgactaggccatgaatctatttcctgaatgaaccagtataatttcattcagctgctctagtcaaataactggaagaccttgtcgtaaaaaaagctggaaagcctctagttctgctaatgctccgtttaaatggtgatattggaggacattaaattgaattgggttcgccatggtattgaaat

SEQ ID NO: 14690 - DNA, 1407 bp, Zea Mays
ccgggtgttacacgccgccgccgccgccgccgccgccgacggcgatagatttggggatggatttgggctcgtgctacctcggtgggaacgccgacgcggtggagttctgcccgcaccgcccgttccgccacgtgctggccgccgccacctacacgctgcaggagcaggagcgcgaccgggcgggcagcatatccctcttctcagttgacgttgcctcggaggacgcgtcccggaggctccagctgctgtatactgtggagaccgccggcatcttcgatatgaagtggagccccaagtcgccgctgctcgcgcaggccgacgcccacggccgcctcgcgctccggcgcttggagcaggaggacggctcggacacaggcattctcctcaccgatgtctctgctgaagatatttcttcttcaatgtgcttatatgtggactggaaccaaactgcggagtctctgtctgttggattatcagatggctcactgtctctggtttcagtgagagaggaccggctggagatatcagaacagtggactgcacatcagttcgaagtctggacatgctattttgatcgtacaaggccacacttgctgtacagtggatcagatgactgttgtttcagttgctgggacttgagagaaagcccatcaaacattgtttttcaaaacaaaaaatctcataagatgggtgtctgttgtattacacagaatccgttggaggggaacatgctacttactgggagttatgatgaatttctcagagtttgggacatgagatttatggcaaaacctgtcaatcaaaagttgataaatctaggaggtggtgtgtggaggatgaagtatcatcctagtattgcagatgttgtattggctgcgtgcatgcacaatgggtttgccattgtaaaagtaggttctggagatgctacggtaatggaaacatattgcaagcatgagtccttagcatacggtgcagattggcagaaaagtgaagaggtggagcaaaatggaaattcttcagttgttgctacttgttcgttttatgatcgcctcctccgcgtgtggcaaccagagaatctagctgagctttaaagacctaaagctttttttgaattgaattcaagcatgactaggccatgaatctatttcctgaatgaaccagtataatttcattcaggttgtctttggtgtaacctatgctcaggtaaagaagaagaaggtgtcgaggtggatctccaggagttctaggacttcaaagagttcgaggattaggctagcgacctccctcagtcatctgcctttggtgggtttgtttatgttggctacgtttctattatgtatactttgatatatattatgtaaatgactctagcctgtaatattattacttactctttaataatattcg

SEQ ID NO: 14691 - DNA, 567 bp, Zea Mays
cgattttttacgctaaaaaaaaggaaacagaagtccacgcatatccggaagaccggaagcttcttcctcctcgcctctgacatggccggcggcaacctattcggtcgagcgctgagctacgttgtcaacgagttcttcgtccagggcctcgccaacaaccgtgcagtccagaggtttgctgtgaagaccaacaagactcttgagagcctatcgtctaaagccaaggaaatgagggaggagttatcggaacaattcaaggatgctcgtggccagaaagatcacttcaagcagtgaagccgatccccaaagttgattcaacgacacgaatctagctatgagttttttctagttctcgtccgggtcctatttatgaatggcatttgaagggatttcttggtgtcgttcaatggacggatccgttgtataaagtttatctgcacttagattagtagatatattggtagacacatcactttctgctgcccctttttcataaatacatatatctcgatctctactgtattagcaaaactacctcagtttctaccgttttcgtgctctacacaa

SEQ ID NO: 14692 - DNA, 3183 bp, Zea Mays
ctcaccactcgaagtctctcgaacagacgagcggcgagcgcttctcctcgctagaagcgacagcgaagtgaacataaccaaaacgacggcaatcgccgagtccatatggcctcgatcagtgctcccgcagtagcatgccgcgtcgcgccggcgcgcgcaacaacctcggttcttcccgcgcactcgcggcggccgggatgcaggtcggtggtgtggcggtgctgggccgcgacgagggggagacggaggcggtgggcagggctgcgggcaaggtgccgcataagctgcgacgtcagccagccgtcagccgtgcagccagattctgagagctctggggagggattggtggcgcaggacgacgggccgcggcggccgccattcgacatcaacctcgccgtcgtgctcgccgggttcgcgtttgaagcctataccagtcctccggcagatgtgggctggcgcgaaactgatgcggctgactgtcagacagtgttcctgtccgatgtgtttcttcgtgaagtatacgatggacggcttgtcgtcaggctgaagaaaggcataaaccttcctgcaatggatccatggggtactagtgatccttatgtaattctacaactgaatggccaaactgcaaaaagccaaattaaatgggcgacaaaggagccaacatggaatgaagatttcacgtttaacattagaaaatctcgtgaaaatcttctgcaggttgcagcttgggatgcaaaccttgttaccccacacaaacgcatgggaaatgctggattataccttgaatcattttgtgatggtaacaatcatggtgttactgttgaattagaaggcctcggtggtggtggaactatagagatagaggtcaaatataagagttatgacgatatcgagcgtgaaaaacaatggtggagaatacctttcgtgtctgactttcttgtgaagagcagcctgggatctgctcttaggatggttcttggatctgaaagtataaatgctagtcagtttgtgaagtctgcatttgggcaactgagttctttcacatacacctatcttccaaagccatcatcattggaaagtggagttgatgtttctaaaagtgatgaagaatcctcagatggcccaactaattcaaatgagcttcaacaacagaatattgattctgaaatcatttcagattctcattctcatagtgaagttcaatctcctactgctgttgttaatagtgaaggaaattcatcgtctgatatgaagaaatcagatgaatatttttggagagctctgaacaatgtactaaaccaaaatgtactacagaactttggattttctctcccggaggtcaagcaattgggtggttttgacctattaagttcacttggtctgaaatcacgcaatattgctgaacaggaatatctagaatctggacttgcaatggcagatacttcaacaaatggtggcagtgaaacaacttctgaaaatacagttggtgttgagaatgaaaatagaacattgacaaccaaagaggaggtgcaatcttcctttccagatataaataaagtatctcgggatgtattgtctcaaacagaaaatatactcggagctctgatgatactttccaaaaatctctcaccacatgatcagtcagtaccgacaactggaacaaatgggaaatatgacatgattagagaagagcaaggtgcttcagctgcagattctgttcaaaaggctgatactgtttcatctgcgttactgtccattgatgcacaggaagcagaggatatgcggcgcttgtttgcaagtgcagagactgccatggaggcatgggctatgcttgccacttcactgggacgtaacagtttcatcaagtcggactttgaaaagatatgttttcttgacaatatttcaacagacacacaagttgccatatggtgcgattcttctcgaagaaggttggttgttgcctttcgtggaaccgaacaatcaaggtggaaggatttgcgaaccgacttaatgcttgtacctgctggactaaaccctgagaggctaggtggtgacttcaaacaagaagttcaagttcacagtggattcttaggtgcatatgactctgttaggaacaggatcatgactctcatcaaatatgccattggatacgatgatgaagaagatgcagaaaacatacctaggtggcatgtttatgtgactggacacagtttaggtggagcactagcgactcttcttgctcttgaactttcatcaagtcaaatggccaaaaagtaaaggacagttggagaattgtcaaccaccgggatatcattccaacagtgccacgtcttatgggctattgccatgtggaagcaccagtttatcttaaatttggggacgcaaaagatgcaccggtaaataacagcattctagatgatgaagaccaaggtgacgtgataggggagtacacacctgatgttcttgttactgaatttatgaaaggcgagaagcaacttgtggaaaaactactgcaaacagaaataaatttactccgctcaatcagggatggttcggctcttatgcagcacatggaagacttctactatgtcacccttcttgagaatgtgagatcaagttatcaagtggcagatactgccaatgatgaataccaattgacagcgtgatcctagtaaaactgcacagctgaacatcatggactgtgtttccctgcaaaaacttcatttctgaaggacactgaatggggctatgaaagtgtgcaatccttactcttagtggaaacatgaacaggcagaacagccttggacctcagtcaggatagaggaaatgaaactggtttcactggcggatatacttgtagcaccgtgtcaattggtagatatgttgtttgagctattttccgttgatgtagctagcacactttggaatatattgtatgatgtttgaaattctagaaaagttcatagacacctgggagaataactcaagaaatatccaagtccgttttggccaatattttttttcatggagaaacttgcacaccgtggtaggctaccggctacccaagggctgatagggtgtgttaatcgagtgtacgacctagataaaaatgttcaatgtgatggaactatatatcttgcatggaataaagtagcatcatgtaatttcggcattttttct

SEQ ID NO: 14693 - DNA, 3261 bp, Zea Mays
ccactcgaagtctctcgaacagacgagcggcgagcgcttctcctcgctagaagcgacagcgaagtgaacataaccaaaacgacggcaatcgccgagtccatatggcctcgatcagtgctcccgcagtagcatgccgcgtcgcgccggcgcgcgcaacaacctcggttcttcccgcgcactcgcggcggccgggatgcaggtcggtggtgtggcggtgctgggccgcgacgagggggagacggaggcggtgggcagggctgcgggcaaggtgccgcataagctgcgacgtcagccagccgtcagccgtgcagccagattctgagagctctggggagggattggtggcgcaggacgacgggccgcggcggccgccattcgacatcaacctcgccgtcgtgctcgccgggttcgcgtttgaagcctataccagtcctccggcagatgtgggctggcgcgaaactgatgcggctgactgtcagacagtgttcctgtccgatgtgtttcttcgtgaagtatacgatggacggcttgtcgtcaggctgaagaaaggcataaaccttcctgcaatggatccatggggtactagtgatccttatgtaattctacaactgaatggccaaactgcaaaaagccaaattaaatgggcgacaaaggagccaacatggaatgaagatttcacgtttaacattagaaaatctcgtgaaaatcttctgcaggttgcagcttgggatgcaaaccttgttaccccacacaaacgcatgggaaatgctggattataccttgaatcattttgtgatggtaacaatcatggtgttactgttgaattagaaggcctcggtggtggtggaactatagagatagaggtcaaatataagagttatgacgatatcgagcgtgaaaaacaatggtggagaatacctttcgtgtctgactttcttgtgaagagcagcctgggatctgctcttaggatggttcttggatctgaaagtataaatgctagtcagtttgtgaagtctgcatttgggcaactgagttctttcacatacacctatcttccaaagccatcatcattggaaagtggagttgatgtttctaaaagtgatgaagaatcctcagatggcccaactaattcaaatgagcttcaacaacagaatattgattctgaaatcatttcagattctcattctcatagtgaagttcaatctcctactgctgttgttaatagtgaaggaaattcatcgtctgatatgaagaaatcagatgaatatttttggagagctctgaacaatgtactaaaccaaaatgtactacagaactttggattttctctcccggaggtcaagcaattgggtggttttgacctattaagttcacttggtctgaaatcacgcaatattgctgaacaggaatatctagaatctggacttgcaatggcagatacttcaacaaatggtggcagtgaaacaacttctgaaaatacagttggtgttgagaatgaaaatagaacattgacaaccaaagaggaggtgcaatcttcctttccagatataaataaagtatctcgggatgtattgtctcaaacagaaaatatactcggagctctgatgatactttccaaaaatctctcaccacatgatcagtcagtaccgacaactggaacaaatgggaaatatgacatgattagagaagagcaaggtgcttcagctgcagattctgttcaaaaggctgatactgtttcatctgcgttactgtccattgatgcacaggaagcagaggatatgcggcgcttgtttgcaagtgcagagactgccatggaggcatgggctatgcttgccacttcactgggacgtaacagtttcatcaagtcggactttgaaaagatatgttttcttgacaatatttcaacagacacacaagttgccatatggtgcgattcttctcgaagaaggttggttgttgcctttcgtggaaccgaacaatcaaggtggaaggatttgcgaaccgacttaatgcttgtacctgctggactaaaccctgagaggctaggtggtgacttcaaacaagaagttcaagttcacagtggattcttaggtgcatatgactctgttaggaacaggatcatgactctcatcaaatatgccattggatacgatgatgaagaagatgcagaaaacatacctaggtggcatgtttatgtgactggacacagtttaggtggagcactagcgactcttcttgctcttgaactttcatcaagtcaaatggccaaaaatggtgccatatttgtgacaatgtacaattttggctctcctagagtgggaaatagaagattcgccgaagtctacaatgcgaaagtaaaggacagttggagaattgtcaaccaccgggatatcattccaacagtgccacgtcttatgggctattgccatgtggaagcaccagtttatcttaaatttggggacgcaaaagatgcaccggtaaataacagcattctagatgatgaagaccaaggtgacgtgataggggagtacacacctgatgttcttgttactgaatttatgaaaggcgagaagcaacttgtggaaaaactactgcaaacagaaataaatttactccgctcaatcagggatggttcggctcttatgcagcacatggaagacttctactatgtcacccttcttgagaatgtgagatcaagttatcaagtggcagatactgccaatgatgaataccaattgacagcgtgatcctagtaaaactgcacagctgaacatcatggactgtgtttccctgcaaaaacttcatttctgaaggacactgaatggggctatgaaagtgtgcaatccttactcttagtggaaacatgaacaggcagaacagccttggacctcagtcaggatagaggaaatgaaactggtttcactggcggatatacttgtagcaccgtgtcaattggtagatatgttgtttgagctattttccgttgatgtagctagcacactttggaatatattgtatgatgtttgaaattctagaaaagttcatagacacctgggagaataactcaagaaatatccaagtccgttttggccaatattttttttcatggagaaacttgcacaccgtggtaggctaccggctacccaagggctgatagggtgtgttaatcgagtgtacgacctagataaaaatgttcaatgtgatggaactatatatcttgcatggaataaagtagcatcatgtaatttcggcattttttct

SEQ ID NO: 14694 - DNA, 3179 bp, Zea Mays
tcgaagtctctcgaacagacgagcggcgagcgcttctcctcgctagaagcgacagcgaagtgaacataaccaaaacgacggcaatcgccgagtccatatggcctcgatcagtgctcccgcagtagcatgccgcgtcgcgccggcgcgcgcaacaacctcggttcttcccgcgcactcgcggcggccgggatgcaggtcggtggtgtggcggtgctgggccgcgacgagggggagacggaggcggtgggcagggctgcgggcaaggtgccgcataagctgcgacgtcagccagccgtcagccgtgcagccagattctgagagctctggggagggattggtggcgcaggacgacgggccgcggcggccgccattcgacatcaacctcgccgtcgtgctcgccgggttcgcgtttgaagcctataccagtcctccggcagatgtgggctggcgcgaaactgatgcggctgactgtcagacagtgttcctgtccgatgtgtttcttcgtgaagtatacgatggacggcttgtcgtcaggctgaagaaaggcataaaccttcctgcaatggatccatggggtactagtgatccttatgtaattctacaactgaatggccaaactgcaaaaagccaaattaaatgggcgacaaaggagccaacatggaatgaagatttcacgtttaacattagaaaatctcgtgaaaatcttctgcaggttgcagcttgggatgcaaaccttgttaccccacacaaacgcatgggaaatgctggattataccttgaatcattttgtgatggtaacaatcatggtgttactgttgaattagaaggcctcggtggtggtggaactatagagatagaggtcaaatataagagttatgacgatatcgagcgtgaaaaacaatggtggagaatacctttcgtgtctgactttcttgtgaagagcagcctgggatctgctcttaggatggttcttggatctgaaagtataaatgctagtcagtttgtgaagtctgcatttgggcaactgagttctttcacatacacctatcttccaaagccatcatcattggaaagtggagttgatgtttctaaaagtgatgaagaatcctcagatggcccaactaattcaaatgagcttcaacaacagaatattgattctgaaatcatttcagattctcattctcatagtgaagttcaatctcctactgctgttgttaatagtgaaggaaattcatcgtctgatatgaagaaatcagatgaatatttttggagagctctgaacaatgtactaaaccaaaatgtactacagaactttggattttctctcccggaggtcaagcaattgggtggttttgacctattaagttcacttggtctgaaatcacgcaatattgctgaacaggaatatctagaatctggacttgcaatggcagatacttcaacaaatggtggcagtgaaacaacttctgaaaatacagttggtgttgagaatgaaaatagaacattgacaaccaaagaggaggtgcaatcttcctttccagatataaataaagtatctcgggatgtattgtctcaaacagaaaatatactcggagctctgatgatactttccaaaaatctctcaccacatgatcagtcagtaccgacaactggaacaaatgggaaatatgacatgattagagaagagcaaggtgcttcagctgcagattctgttcaaaaggctgatactgtttcatctgcgttactgtccattgatgcacaggaagcagaggatatgcggcgcttgtttgcaagtgcagagactgccatggaggcatgggctatgcttgccacttcactgggacgtaacagtttcatcaagtcggactttgaaaagatatgttttcttgacaatatttcaacagacacacaagttgccatatggtgcgattcttctcgaagaagactaaaccctgagaggctaggtggtgacttcaaacaagaagttcaagttcacagtggattcttaggtgcatatgactctgttaggaacaggatcatgactctcatcaaatatgccattggatacgatgatgaagaagatgcagaaaacatacctaggtggcatgtttatgtgactggacacagtttaggtggagcactagcgactcttcttgctcttgaactttcatcaagtcaaatggccaaaaatggtgccatatttgtgacaatgtacaattttggctctcctagagtgggaaatagaagattcgccgaagtctacaatgcgaaagtaaaggacagttggagaattgtcaaccaccgggatatcattccaacagtgccacgtcttatgggctattgccatgtggaagcaccagtttatcttaaatttggggacgcaaaagatgcaccggtaaataacagcattctagatgatgaagaccaaggtgacgtgataggggagtacacacctgatgttcttgttactgaatttatgaaaggcgagaagcaacttgtggaaaaactactgcaaacagaaataaatttactccgctcaatcagggatggttcggctcttatgcagcacatggaagacttctactatgtcacccttcttgagaatgtgagatcaagttatcaagtggcagatactgccaatgatgaataccaattgacagcgtgatcctagtaaaactgcacagctgaacatcatggactgtgtttccctgcaaaaacttcatttctgaaggacactgaatggggctatgaaagtgtgcaatccttactcttagtggaaacatgaacaggcagaacagccttggacctcagtcaggatagaggaaatgaaactggtttcactggcggatatacttgtagcaccgtgtcaattggtagatatgttgtttgagctattttccgttgatgtagctagcacactttggaatatattgtatgatgtttgaaattctagaaaagttcatagacacctgggagaataactcaagaaatatccaagtccgttttggccaatattttttttcatggagaaacttgcacaccgtggtaggctaccggctacccaagggctgatagggtgtgttaatcgagtgtacgacctagataaaaatgttcaatgtgatggaactatatatcttgcatggaataaagtagcatcatgtaatttcggcattttttct

SEQ ID NO: 14695 - DNA, 3096 bp, Zea Mays
cgaagtctctcgaacagacgagcggcgagcgcttctcctcgctagaagcgacagcgaagtgaacataaccaaaacgacggcaatcgccgagtccatatggcctcgatcagtgctcccgcagtagcatgccgcgtcgcgccggcgcgcgcaacaacctcggttcttcccgcgcactcgcggcggccgggatgcaggtcggtggtgtggcggtgctgggccgcgacgagggggagacggaggcggtgggcagggctgcgggcaaggtgccgcataagctgcgacgtcagccagccgtcagccgtgcagccagattctgagagctctggggagggattggtggcgcaggacgacgggccgcggcggccgccattcgacatcaacctcgccgtcgtgctcgccgggttcgcgtttgaagcctataccagtcctccggcagatgtgggctggcgcgaaactgatgcggctgactgtcagacagtgttcctgtccgatgtgtttcttcgtgaagtatacgatggacggcttgtcgtcaggctgaagaaaggcataaaccttcctgcaatggatccatggggtactagtgatccttatgtaattctacaactgaatggccaaactgcaaaaagccaaattaaatgggcgacaaaggagccaacatggaatgaagatttcacgtttaacattagaaaatctcgtgaaaatcttctgcaggttgcagcttgggatgcaaaccttgttaccccacacaaacgcatgggaaatgctggattataccttgaatcattttgtgatggtaacaatcatggtgttactgttgaattagaaggcctcggtggtggtggaactatagagatagaggtcaaatataagagttatgacgatatcgagcgtgaaaaacaatggtggagaatacctttcgtgtctgactttcttgtgaagagcagcctgggatctgctcttaggatggttcttggatctgaaagtataaatgctagtcagtttgtgaagtctgcatttgggcaactgagttctttcacatacacctatcttccaaagccatcatcattggaaagtggagttgatgtttctaaaagtgatgaagaatcctcagatggcccaactaattcaaatgagcttcaacaacagaatattgattctgaaatcatttcagattctcattctcatagtgaagttcaatctcctactgctgttgttaatagtgaaggaaattcatcgtctgatatgaagaaatcagatgaatatttttggagagctctgaacaatgtactaaaccaaaatgtactacagaactttggattttctctcccggaggtcaagcaattgggtggttttgacctattaagttcacttggtctgaaatcacgcaatattgctgaacaggaatatctagaatctggacttgcaatggcagatacttcaacaaatggtggcagtgaaacaacttctgaaaatacagttggtgttgagaatgaaaatagaacattgacaaccaaagaggaggtgcaatcttcctttccagatataaataaagtatctcgggatgtattgtctcaaacagaaaatatactcggagctctgatgatactttccaaaaatctctcaccacatgatcagtcagtaccgacaactggaacaaatgggaaatatgacatgattagagaagagcaaggtgcttcagctgcagattctgttcaaaaggctgatactgtttcatctgcgttactgtccattgatgcacaggaagcagaggatatgcggcgcttgtttgcaagtgcagagactgccatggaggcatgggctatgcttgccacttcactgggacgtaacagtttcatcaagtcggactttgaaaagatatgttttcttgacaatatttcaacagacacacaagttgccatatggtgcgattcttctcgaagaagactaaaccctgagaggctaggtggtgacttcaaacaagaagttcaagttcacagtggattcttaggtgcatatgactctgttaggaacaggatcatgactctcatcaaatatgccattggatacgatgatgaagaagatgcagaaaacatacctaggtggcatgtttatgtgactggacacagtttaggtggagcactagcgactcttcttgctcttgaactttcatcaagtcaaatggccaaaaagtaaaggacagttggagaattgtcaaccaccgggatatcattccaacagtgccacgtcttatgggctattgccatgtggaagcaccagtttatcttaaatttggggacgcaaaagatgcaccggtaaataacagcattctagatgatgaagaccaaggtgacgtgataggggagtacacacctgatgttcttgttactgaatttatgaaaggcgagaagcaacttgtggaaaaactactgcaaacagaaataaatttactccgctcaatcagggatggttcggctcttatgcagcacatggaagacttctactatgtcacccttcttgagaatgtgagatcaagttatcaagtggcagatactgccaatgatgaataccaattgacagcgtgatcctagtaaaactgcacagctgaacatcatggactgtgtttccctgcaaaaacttcatttctgaaggacactgaatggggctatgaaagtgtgcaatccttactcttagtggaaacatgaacaggcagaacagccttggacctcagtcaggatagaggaaatgaaactggtttcactggcggatatacttgtagcaccgtgtcaattggtagatatgttgtttgagctattttccgttgatgtagctagcacactttggaatatattgtatgatgtttgaaattctagaaaagttcatagacacctgggagaataactcaagaaatatccaagtccgttttggccaatattttttttcatggagaaacttgcacaccgtggtaggctaccggctacccaagggctgatagggtgtgttaatcgagtgtacgacctagataaaaatgttcaatgtgatggaactatatatcttgcatggaataaagtagcatcatgtaatttcggcattttttct

SEQ ID NO: 14696 - DNA, 3125 bp, Zea Mays
ctcgaacagacgagcggcgagcgcttctcctcgctagaagcgacagcgaagtgaacataaccaaaacgacggcaatcgccgagtccatatggcctcgatcagtgctcccgcagtagcatgccgcgtcgcgccggcgcgcgcaacaacctcggttcttcccgcgcactcgcggcggccgggatgcaggtcggtggtgtggcggtgctgggccgcgacgagggggagacggaggcggtgggcagggctgcgggcaaggtgccgcataagctgcgacgtcagccagccgtcagccgtgcagccagattctgagagctctggggagggattggtggcgcaggacgacgggccgcggcggccgccattcgacatcaacctcgccgtcgtgctcgccgggttcgcgtttgaagcctataccagtcctccggcagatgtgggctggcgcgaaactgatgcggctgactgtcagacagtgttcctgtccgatgtgtttcttcgtgaagtatacgatggacggcttgtcgtcaggctgaagaaaggcataaaccttcctgcaatggatccatggggtactagtgatccttatgtaattctacaactgaatggccaaactgcaaaaagccaaattaaatgggcgacaaaggagccaacatggaatgaagatttcacgtttaacattagaaaatctcgtgaaaatcttctgcaggttgcagcttgggatgcaaaccttgttaccccacacaaacgcatgggaaatgctggattataccttgaatcattttgtgatggtaacaatcatggtgttactgttgaattagaaggcctcggtggtggtggaactatagagatagaggtcaaatataagagttatgacgatatcgagcgtgaaaaacaatggtggagaatacctttcgtgtctgactttcttgtgaagagcagcctgggatctgctcttaggatggttcttggatctgaaagtataaatgctagtcagtttgtgaagtctgcatttgggcaactgagttctttcacatacacctatcttccaaagccatcatcattggaaagtggagttgatgtttctaaaagtgatgaagaatcctcagatggcccaactaattcaaatgagcttcaacaacagaatattgattctgaaatcatttcagattctcattctcatagtgaagttcaatctcctactgctgttgttaatagtgaaggaaattcatcgtctgatatgaagaaatcagatgaatatttttggagagctctgaacaatgtactaaaccaaaatgtactacagaactttggattttctctcccggaggtcaagcaattgggtggttttgacctattaagttcacttggtctgaaatcacgcaatattgctgaacaggaatatctagaatctggacttgcaatggcagatacttcaacaaatggtggcagtgaaacaacttctgaaaatacagttggtgttgagaatgaaaatagaacattgacaaccaaagaggaggtgcaatcttcctttccagatataaataaagtatctcgggatgtattgtctcaaacagaaaatatactcggagctctgatgatactttccaaaaatctctcaccacatgatcagtcagtaccgacaactggaacaaatgggaaatatgacatgattagagaagagcaaggtgcttcagctgcagattctgttcaaaaggctgatactgtttcatctgcgttactgtccattgatgcacaggaagcagaggatatgcggcgcttgtttgcaagtgcagagactgccatggaggcatgggctatgcttgccacttcactgggacgtaacagtttcatcaagtcggactttgaaaagatatgttttcttgacaatatttcaacagacacacaagttgccatatggtgcgattcttctcgaagaagactaaaccctgagaggctaggtggtgacttcaaacaagaagttcaagttcacagtggattcttaggtgcatatgactctgttaggaacaggatcatgactctcatcaaatatgccattggatacgatgatgaagaagatgcagaaaacatacctaggtggcatgtttatgtgactggacacagtttaggtggagcactagcgactcttcttgctcttgaactttcatcaagtcaaatggccaaagtgggaaatagaagattcgccgaagtctacaatgcgaaagtaaaggacagttggagaattgtcaaccaccgggatatcattccaacagtgccacgtcttatgggctattgccatgtggaagcaccagtttatcttaaatttggggacgcaaaagatgcaccggtaaataacagcattctagatgatgaagaccaaggtgacgtgataggggagtacacacctgatgttcttgttactgaatttatgaaaggcgagaagcaacttgtggaaaaactactgcaaacagaaataaatttactccgctcaatcagggatggttcggctcttatgcagcacatggaagacttctactatgtcacccttcttgagaatgtgagatcaagttatcaagtggcagatactgccaatgatgaataccaattgacagcgtgatcctagtaaaactgcacagctgaacatcatggactgtgtttccctgcaaaaacttcatttctgaaggacactgaatggggctatgaaagtgtgcaatccttactcttagtggaaacatgaacaggcagaacagccttggacctcagtcaggatagaggaaatgaaactggtttcactggcggatatacttgtagcaccgtgtcaattggtagatatgttgtttgagctattttccgttgatgtagctagcacactttggaatatattgtatgatgtttgaaattctagaaaagttcatagacacctgggagaataactcaagaaatatccaagtccgttttggccaatattttttttcatggagaaacttgcacaccgtggtaggctaccggctacccaagggctgatagggtgtgttaatcgagtgtacgacctagataaaaatgttcaatgtgatggaactatatatcttgcatggaataaagtagcatcatgtaatttcggcattttttct

SEQ ID NO: 14697 - DNA, 3249 bp, Zea Mays
gaacagacgagcggcgagcgcttctcctcgctagaagcgacagcgaagtgaacataaccaaaacgacggcaatcgccgagtccatatggcctcgatcagtgctcccgcagtagcatgccgcgtcgcgccggcgcgcgcaacaacctcggttcttcccgcgcactcgcggcggccgggatgcaggtcggtggtgtggcggtgctgggccgcgacgagggggagacggaggcggtgggcagggctgcgggcaaggtgccgcataagctgcgacgtcagccagccgtcagccgtgcagccagattctgagagctctggggagggattggtggcgcaggacgacgggccgcggcggccgccattcgacatcaacctcgccgtcgtgctcgccgggttcgcgtttgaagcctataccagtcctccggcagatgtgggctggcgcgaaactgatgcggctgactgtcagacagtgttcctgtccgatgtgtttcttcgtgaagtatacgatggacggcttgtcgtcaggctgaagaaaggcataaaccttcctgcaatggatccatggggtactagtgatccttatgtaattctacaactgaatggccaaactgcaaaaagccaaattaaatgggcgacaaaggagccaacatggaatgaagatttcacgtttaacattagaaaatctcgtgaaaatcttctgcaggttgcagcttgggatgcaaaccttgttaccccacacaaacgcatgggaaatgctggattataccttgaatcattttgtgatggtaacaatcatggtgttactgttgaattagaaggcctcggtggtggtggaactatagagatagaggtcaaatataagagttatgacgatatcgagcgtgaaaaacaatggtggagaatacctttcgtgtctgactttcttgtgaagagcagcctgggatctgctcttaggatggttcttggatctgaaagtataaatgctagtcagtttgtgaagtctgcatttgggcaactgagttctttcacatacacctatcttccaaagccatcatcattggaaagtggagttgatgtttctaaaagtgatgaagaatcctcagatggcccaactaattcaaatgagcttcaacaacagaatattgattctgaaatcatttcagattctcattctcatagtgaagttcaatctcctactgctgttgttaatagtgaaggaaattcatcgtctgatatgaagaaatcagatgaatatttttggagagctctgaacaatgtactaaaccaaaatgtactacagaactttggattttctctcccggaggtcaagcaattgggtggttttgacctattaagttcacttggtctgaaatcacgcaatattgctgaacaggaatatctagaatctggacttgcaatggcagatacttcaacaaatggtggcagtgaaacaacttctgaaaatacagttggtgttgagaatgaaaatagaacattgacaaccaaagaggaggtgcaatcttcctttccagatataaataaagtatctcgggatgtattgtctcaaacagaaaatatactcggagctctgatgatactttccaaaaatctctcaccacatgatcagtcagtaccgacaactggaacaaatgggaaatatgacatgattagagaagagcaaggtgcttcagctgcagattctgttcaaaaggctgatactgtttcatctgcgttactgtccattgatgcacaggaagcagaggatatgcggcgcttgtttgcaagtgcagagactgccatggaggcatgggctatgcttgccacttcactgggacgtaacagtttcatcaagtcggactttgaaaagatatgttttcttgacaatatttcaacagacacacaagttgccatatggtgcgattcttctcgaagaaggttggttgttgcctttcgtggaaccgaacaatcaaggtggaaggatttgcgaaccgacttaatgcttgtacctgctggactaaaccctgagaggctaggtggtgacttcaaacaagaagttcaagttcacagtggattcttaggtgcatatgactctgttaggaacaggatcatgactctcatcaaatatgccattggatacgatgatgaagaagatgcagaaaacatacctaggtggcatgtttatgtgactggacacagtttaggtggagcactagcgactcttcttgctcttgaactttcatcaagtcaaatggccaagtagaaatggtgccatatttgtgacaatgtacaattttggctctcctagagtgggaaatagaagattcgccgaagtctacaatgcgaaagtaaaggacagttggagaattgtcaaccaccgggatatcattccaacagtgccacgtcttatgggctattgccatgtggaagcaccagtttatcttaaatttggggacgcaaaagatgcaccggtaaataacagcattctagatgatgaagaccaaggtgacgtgataggggagtacacacctgatgttcttgttactgaatttatgaaaggcgagaagcaacttgtggaaaaactactgcaaacagaaataaatttactccgctcaatcagggatggttcggctcttatgcagcacatggaagacttctactatgtcacccttcttgagaatgtgagatcaagttatcaagtggcagatactgccaatgatgaataccaattgacagcgtgatcctagtaaaactgcacagctgaacatcatggactgtgtttccctgcaaaaacttcatttctgaaggacactgaatggggctatgaaagtgtgcaatccttactcttagtggaaacatgaacaggcagaacagccttggacctcagtcaggatagaggaaatgaaactggtttcactggcggatatacttgtagcaccgtgtcaattggtagatatgttgtttgagctattttccgttgatgtagctagcacactttggaatatattgtatgatgtttgaaattctagaaaagttcatagacacctgggagaataactcaagaaatatccaagtccgttttggccaatattttttttcatggagaaacttgcacaccgtggtaggctaccggctacccaagggctgatagggtgtgttaatcgagtgtacgacctagataaaaatgttcaatgtgatggaactatatatcttgcatggaataaagtagcatcatgtaatttcggcattttttct

SEQ ID NO: 14698 - DNA, 2940 bp, Zea Mays
atggcctcgatcagtgctcccgcagtagcatgccgcgtcgcgccggcgcgcgcaacaacctcggttcttcccgcgcactcgcggcggccgggatgcaggtcggtggtgtggcggtgctgggccgcgacgagggggagacggaggcggtgggcagggctgcgggcaaggtgccgcataagctgcgacgtcagccagccgtcagccgtgcagccagattctgagagctctggggagggattggtggcgcaggacgacgggccgcggcggccgccattcgacatcaacctcgccgtcgtgctcgccgggttcgcgtttgaagcctataccagtcctccggcagatgtgggctggcgcgaaactgatgcggctgactgtcagacagtgttcctgtccgatgtgtttcttcgtgaagtatacgatggacggcttgtcgtcaggctgaagaaaggcataaaccttcctgcaatggatccatgggtaacaatcatggtgttactgttgaattagaaggcctcggtggtggtggaactatagagatagaggtcaaatataagagttatgacgatatcgagcgtgaaaaacaatggtggagaatacctttcgtgtctgactttcttgtgaagagcagcctgggatctgctcttaggatggttcttggatctgaaagtataaatgctagtcagtttgtgaagtctgcatttgggcaactgagttctttcacatacacctatcttccaaagccatcatcattggaaagtggagttgatgtttctaaaagtgatgaagaatcctcagatggcccaactaattcaaatgagcttcaacaacagaatattgattctgaaatcatttcagattctcattctcatagtgaagttcaatctcctactgctgttgttaatagtgaaggaaattcatcgtctgatatgaagaaatcagatgaatatttttggagagctctgaacaatgtactaaaccaaaatgtactacagaactttggattttctctcccggaggtcaagcaattgggtggttttgacctattaagttcacttggtctgaaatcacgcaatattgctgaacaggaatatctagaatctggacttgcaatggcagatacttcaacaaatggtggcagtgaaacaacttctgaaaatacagttggtgttgagaatgaaaatagaacattgacaaccaaagaggaggtgcaatcttcctttccagatataaataaagtatctcgggatgtattgtctcaaacagaaaatatactcggagctctgatgatactttccaaaaatctctcaccacatgatcagtcagtaccgacaactggaacaaatgggaaatatgacatgattagagaagagcaaggtgcttcagctgcagattctgttcaaaaggctgatactgtttcatctgcgttactgtccattgatgcacaggaagcagaggatatgcggcgcttgtttgcaagtgcagagactgccatggaggcatgggctatgcttgccacttcactgggacgtaacagtttcatcaagtcggactttgaaaagatatgttttcttgacaatatttcaacagacacacaagttgccatatggtgcgattcttctcgaagaaggttggttgttgcctttcgtggaaccgaacaatcaaggtggaaggatttgcgaaccgacttaatgcttgtacctgctggactaaaccctgagaggctaggtggtgacttcaaacaagaagttcaagttcacagtggattcttaggtgcatatgactctgttaggaacaggatcatgactctcatcaaatatgccattggatacgatgatgaagaagatgcagaaaacatacctaggtggcatgtttatgtgactggacacagtttaggtggagcactagcgactcttcttgctcttgaactttcatcaagtcaaatggccaaaaatggtgccatatttgtgacaatgtacaattttggctctcctagagtgggaaatagaagattcgccgaagtctacaatgcgaaagtaaaggacagttggagaattgtcaaccaccgggatatcattccaacagtgccacgtcttatgggctattgccatgtggaagcaccagtttatcttaaatttggggacgcaaaagatgcaccggtaaataacagcattctagatgatgaagaccaaggtgacgtgataggggagtacacacctgatgttcttgttactgaatttatgaaaggcgagaagcaacttgtggaaaaactactgcaaacagaaataaatttactccgctcaatcagggatggttcggctcttatgcagcacatggaagacttctactatgtcacccttcttgagaatgtgagatcaagttatcaagtggcagatactgccaatgatgaataccaattgacagcgtgatcctagtaaaactgcacagctgaacatcatggactgtgtttccctgcaaaaacttcatttctgaaggacactgaatggggctatgaaagtgtgcaatccttactcttagtggaaacatgaacaggcagaacagccttggacctcagtcaggatagaggaaatgaaactggtttcactggcggatatacttgtagcaccgtgtcaattggtagatatgttgtttgagctattttccgttgatgtagctagcacactttggaatatattgtatgatgtttgaaattctagaaaagttcatagacacctgggagaataactcaagaaatatccaagtccgttttggccaatattttttttcatggagaaacttgcacaccgtggtaggctaccggctacccaagggctgatagggtgtgttaatcgagtgtacgacctagataaaaatgttcaatgtgatggaactatatatcttgcatggaataaagtagcatcatgtaatttcggcattttttct

SEQ ID NO: 14699 - DNA, 3179 bp, Zea Mays
atggcctcgatcagtgctcccgcagtagcatgccgcgtcgcgccggcgcgcgcaacaacctcggttcttcccgcgcactcgcggcggccgggatgcaggtcggtggtgtggcggtgctgggccgcgacgagggggagacggaggcggtgggcagggctgcgggcaaggtgccgcataagctgcgacgtcagccagccgtcagccgtgcagccagattctgagagctctggggagggattggtggcgcaggacgacgggccgcggcggccgccattcgacatcaacctcgccgtcgtgctcgccgggttcgcgtttgaagcctataccagtcctccggcagatgtgggctggcgcgaaactgatgcggctgactgtcagacagtgttcctgtccgatgtgtttcttcgtgaagtatacgatggacggcttgtcgtcaggctgaagaaaggcataaaccttcctgcaatggatccatggggtactagtgatccttatgtaattctacaactgaatggccaaactgcaaaaagccaaattaaatgggcgttgcagcttgggatgcaaaccttgttaccccacacaaacgcatgggaaatgctggattataccttgaatcattttgtgatggtaacaatcatggtgttactgttgaattagaaggcctcggtggtggtggaactatagagatagaggtcaaatataagagttatgacgatatcgagcgtgaaaaacaatggtggagaatacctttcgtgtctgactttcttgtgaagagcagcctgggatctgctcttaggatggttcttggatctgaaagtataaatgctagtcagtttgtgaagtctgcatttgggcaactgagttctttcacatacacctatcttccaaagccatcatcattggaaagtggagttgatgtttctaaaagtgatgaagaatcctcagatggcccaactaattcaaatgagcttcaacaacagaatattgattctgaaatcatttcagattctcattctcatagtgaagttcaatctcctactgctgttgttaatagtgaaggaaattcatcgtctgatatgaagaaatcagatgaatatttttggagagctctgaacaatgtactaaaccaaaatgtactacagaactttggattttctctcccggaggtcaagcaattgggtggttttgacctattaagttcacttggtctgaaatcacgcaatattgctgaacaggaatatctagaatctggacttgcaatggcagatacttcaacaaatggtggcagtgaaacaacttctgaaaatacagttggtgttgagaatgaaaatagaacattgacaaccaaagaggaggtgcaatcttcctttccagatataaataaagtatctcgggatgtattgtctcaaacagaaaatatactcggagctctgatgatactttccaaaaatctctcaccacatgatcagtcagtaccgacaactggaacaaatgggaaatatgacatgattagagaagagcaaggtgcttcagctgcagattctgttcaaaaggctgatactgtttcatctgcgttactgtccattgatgcacaggaagcagaggatatgcggcgcttgtttgcaagtgcagagactgccatggaggcatgggctatgcttgccacttcactgggacgtaacagtttcatcaagtcggactttgaaaagatatgttttcttgacaatatttcaacagacacacaagttgccatatggtgcgattcttctcgaagaaggttggttgttgcctttcgtggaaccgaacaatcaaggtggaaggatttgcgaaccgacttaatgcttgtacctgctggactaaaccctgagaggctaggtggtgacttcaaacaagaagttcaagttcacagtggattcttaggtgcatatgactctgttaggaacaggatcatgactctcatcaaatatgccattggatacgatgatgaagaagatgcagaaaacatacctaggtggcatgtttatgtgactggacacagtttaggtggagcactagcgactcttcttgctcttgaactttcatcaagtcaaatggccaaaaatggtgccatatttgtgacaatgtacaattttggctctcctagagtgggaaatagaagattcgccgaagtctacaatgcgaaagtaaaggacagttggagaattgtcaaccaccgggatatcattccaacagtgccacgtcttatgggctattgccatgtggaagcaccagtttatcttaaatttggggacgcaaaagatgcaccggtaaataacagcattctagatgatgaagaccaaggtgacgtgataggggagtacacacctgatgttcttgttactgaatttatgaaaggcgagaagcaacttgtggaaaaactactgcaaacagaaataaatttactccgctcaatcagggatggttcggctcttatgcagcacatggaagacttctactatgtcacccttcttgaggtttttgagaactatttctgcttttctcataccaaattgtgtcaaaagctcctcaaggtcagcaactaaataacaattcaatattgcagaatgtgagatcaagttatcaagtggcagatactgccaatgatgaataccaattgacagcgtgatcctagtaaaactgcacagctgaacatcatggactgtgtttccctgcaaaaacttcatttctgaaggacactgaatggggctatgaaagtgtgcaatccttactcttagtggaaacatgaacaggcagaacagccttggacctcagtcaggatagaggaaatgaaactggtttcactggcggatatacttgtagcaccgtgtcaattggtagatatgttgtttgagctattttccgttgatgtagctagcacactttggaatatattgtatgatgtttgaaattctagaaaagttcatagacacctgggagaataactcaagaaatatccaagtccgttttggccaatattttttttcatggagaaacttgcacaccgtggtaggctaccggctacccaagggctgatagggtgtgttaatcgagtgtacgacctagataaaaatgttcaatgtgatggaactatatatcttgcatggaataaagtagcatcatgtaatttcggcattttttct

SEQ ID NO: 14700 - DNA, 1072 bp, Zea Mays
ctagaccctactaatagcagaagaaatggtgccatatttgtgacaatgtacaattttggctctcctagagtgggaaatagaagattcgccgaagtctacaatgcgaaagtaaaggacagttggagaattgtcaaccaccgggatatcattccaacagtgccacgtcttatgggctattgccatgtggaagcaccagtttatcttaaatttggggacgcaaaagatgcaccggtaaataacagcattctagatgatgaagaccaaggtgacgtgataggggagtacacacctgatgttcttgttactgaatttatgaaaggcgagaagcaacttgtggaaaaactactgcaaacagaaataaatttactccgctcaatcagggatggttcggctcttatgcagcacatggaagacttctactatgtcacccttcttgaggtttttgagaactatttctgcttttctcataccaaattgtgtcaaaagctcctcaagaatgtgagatcaagttatcaagtggcagatactgccaatgatgaataccaattgacagcgtgatcctagtaaaactgcacagctgaacatcatggactgtgtttccctgcaaaaacttcatttctgaaggacactgaatggggctatgaaagtgtgcaatccttactcttagtggaaacatgaacaggcagaacagccttggacctcagtcaggatagaggaaatgaaactggtttcactggcggatatacttgtagcaccgtgtcaattggtagatatgttgtttgagctattttccgttgatgtagctagcacactttggaatatattgtatgatgtttgaaattctagaaaagttcatagacacctgggagaataactcaagaaatatccaagtccgttttggccaatattttttttcatggagaaacttgcacaccgtggtaggctaccggctacccaagggctgatagggtgtgttaatcgagtgtacgacctagataaaaatgttcaatgtgatggaactatatatcttgcatggaataaagtagcatcatgtaatttcggcattttttct

SEQ ID NO: 14701 - DNA, 1809 bp, Zea Mays
aaacgattccagcggtccagtcaccaagggctggggcgaaatcggcctggggggatcagcgacccgatcgtgccattcacactgtctgcagttccacctctagggaactgttcgtcttcctcccggccagcggcatcaggaagccgcggcagccccaaatcttctgtcaggatctcctttgccccgcgcccttcaggaagattgattgctccggcggtgcacccaaaagaaccgggggtgatgagtccgattccccaggagcacgcgagactccccccttccatgcggcggctgtggtccaagccggaggtgaaccgaccaccgcctgtcagggaaccgtccggacgccaagaatgaggatccgccgatcccgctcgtcgtgatcatcaaagtccctaggaagatgaccgtccgccggaaggaaaggaggccaggacctcaaggcagcgtccgtattatccgcgagaattacattgacactgataccatatgatagagatctcctctcttcaacctgcaaccctttttccaatatgtgaagcgccaatttccgttgtaatattgctggatcaaagcaccacgctcgcaccacgtaggatgaaagatctttcttcatcagggtatctggatgaacttcttcaatgcaatatgagtccattaggatgacctccgccgaggaacgaaaccaggcatgttctgggatccctcagatcaccacatccactaaatgcgacatgcaagacgaggaagcatgcaaaaatctagaccatcttttgaacagcaagcagaaacgaggttctgtgaacaacttgctaatcttgaccatcttttgaacagcaagcagaaatgagaaagtaaaggacagttggagaattgtcaaccaccgggatatcattccaacagtgccacgtcttatgggctattgccatgtggaagcaccagtttatcttaaatttggggacgcaaaagatgcaccggtatccatgttttactgtaccagacctccagttgtcaccaaaaacataaaattgcatttgtatgtgatacagatgaaaggcgagaagcaacttgtggaaaaactactgcaaacagaaataaatttactccgctcaatcagggatggttcggctcttatgcagcacatggaagacttctactatgtcacccttcttgaggtttttgagaactatttctgcttttctcataccaaattgtgtcaaaagctcctcaagaatgtgagatcaagttatcaagtggcagatactgccaatgatgaataccaattgacagcgtgatcctagtaaaactgcacagctgaacatcatggactgtgtttccctgcaaaaacttcatttctgaaggacactgaatggggctatgaaagtgtgcaatccttactcttagtggaaacatgaacaggcagaacagccttggacctcagtcaggatagaggaaatgaaactggtttcactggcggatatacttgtagcaccgtgtcaattggtagatatgttgtttgagctattttccgttgatgtagctagcacactttggaatatattgtatgatgtttgaaattctagaaaagttcatagacacctgggagaataactcaagaaatatccaagtccgttttggccaatattttttttcatggagaaacttgcacaccgtggtaggctaccggctacccaagggctgatagggtgtgttaatcgagtgtacgacctagataaaaatgttcaatgtgatggaactatatatcttgcatggaataaagtagcatcatgtaatttcggcattttttct

SEQ ID NO: 14702 - DNA, 1799 bp, Zea Mays
gtcaccaagggctggggcgaaatcggcctggggggatcagcgacccgatcgtgccattcacactgtctgcagttccacctctagggaactgttcgtcttcctcccggccagcggcatcaggaagccgcggcagccccaaatcttctgtcaggatctcctttgccccgcgcccttcaggaagattgattgctccggcggtgcacccaaaagaaccgggggtgatgagtccgattccccaggagcacgcgagactccccccttccatgcggcggctgtggtccaagccggaggtgaaccgaccaccgcctgtcagggaaccgtccggacgccaagaatgaggatccgccgatcccgctcgtcgtgatcatcaaagtccctaggaagatgaccgtccgccggaaggaaaggaggccaggacctcaaggcagcgtccgtattatccgcgagaattacattgacactgataccatatgatagagatctcctctcttcaacctgcaaccctttttccaatatgtgaagcgccaatttccgttgtaatattgctggatcaaagcaccacgctcgcaccacgtaggatgaaagatctttcttcatcagggtatctggatgaacttcttcaatgcaatatgagtccattaggatgacctccgccgaggaacgaaaccaggcatgttctgggatccctcagatcaccacatccactaaatgcgacatgcaagacgaggaagcatgcaaaaatctagaccatcttttgaacagcaagcagaaacgaggttctgtgaacaacttgctaatcttgaccatcttttgaacagcaagcagaaatgagaaagtaaaggacagttggagaattgtcaaccaccgggatatcattccaacagtgccacgtcttatgggctattgccatgtggaagcaccagtttatcttaaatttggggacgcaaaagatgcaccggtaaataacagcattctagatgatgaagaccaaggtgacgtgataggggagtacacacctgatgttcttgttactgaatttatgaaaggcgagaagcaacttgtggaaaaactactgcaaacagaaataaatttactccgctcaatcagggatggttcggctcttatgcagcacatggaagacttctactatgtcacccttcttgaggtttttgagaactatttctgcttttctcataccaaattgtgtcaaaagctcctcaagaatgtgagatcaagttatcaagtggcagatactgccaatgatgaataccaattgacagcgtgatcctagtaaaactgcacagctgaacatcatggactgtgtttccctgcaaaaacttcatttctgaaggacactgaatggggctatgaaagtgtgcaatccttactcttagtggaaacatgaacaggcagaacagccttggacctcagtcaggatagaggaaatgaaactggtttcactggcggatatacttgtagcaccgtgtcaattggtagatatgttgtttgagctattttccgttgatgtagctagcacactttggaatatattgtatgatgtttgaaattctagaaaagttcatagacacctgggagaataactcaagaaatatccaagtccgttttggccaatattttttttcatggagaaacttgcacaccgtggtaggctaccggctacccaagggctgatagggtgtgttaatcgagtgtacgacctagataaaaatgttcaatgtgatggaactatatatcttgcatggaataaagtagcatcatgtaatttcggcattttttct

SEQ ID NO: 14703 - DNA, 1670 bp, Zea Mays
ctttcacttccattaatctagcccaaaaataggaatcccctgatttccaaaaggcttgggagagtggtttcgtattcaagtatttattgcagatcagttgttgccaagttccatcagatgtcaaaagtctataaagtcatttacttagcaaagccttgttttgaatatctaggtccctaattcttaagcctccttgatctttgggttggcacataatgttccattttgctagacagtatttcttcttctcttcttagtgccaaaaaaaatctcgaccggaaatataaaaggaaagaaggaagcaggaataattcaaccttccatttgcatttggaaaacaagataccagacattttgttatccatatgcaggagagtggtgttacactcctcggtaagctacgcgtacaccatgctgacacaaatagcaacttgtgagagaagacatccctactatagtactatatgttgacttgatataggcaagttacaattctcaatagagaacattaatgaaatagtttgtttttttggggtacaaggcaatcaaagggcgaatattgtagagagaattgggatgaatttgaggaagtccaattcttattagcatacattacaaatcaaattcaagagtcacatctagtcgtacaacaacagtgacttttgtgtatcttattgatattttccattggtgaagcctatctattgcaattagtgtaataattgttagaatggatgcactaactaattcaaaccaaaagaaagtaaaggacagttggagaattgtcaaccaccgggatatcattccaacagtgccacgtcttatgggctattgccatgtggaagcaccagtttatcttaaatttggggacgcaaaagatgcaccggtaaataacagcattctagatgatgaagaccaaggtgacgtgataggggagtacacacctgatgttcttgttactgaatttatgaaaggcgagaagcaacttgtggaaaaactactgcaaacagaaataaatttactccgctcaatcagggatggttcggctcttatgcagcacatggaagacttctactatgtcacccttcttgagaatgtgagatcaagttatcaagtggcagatactgccaatgatgaataccaattgacagcgtgatcctagtaaaactgcacagctgaacatcatggactgtgtttccctgcaaaaacttcatttctgaaggacactgaatggggctatgaaagtgtgcaatccttactcttagtggaaacatgaacaggcagaacagccttggacctcagtcaggatagaggaaatgaaactggtttcactggcggatatacttgtagcaccgtgtcaattggtagatatgttgtttgagctattttccgttgatgtagctagcacactttggaatatattgtatgatgtttgaaattctagaaaagttcatagacacctgggagaataactcaagaaatatccaagtccgttttggccaatattttttttcatggagaaacttgcacaccgtggtaggctaccggctacccaagggctgatagggtgtgttaatcgagtgtacgacctagataaaaatgttcaatgtgatggaactatatatcttgcatggaataaagtagcatcatgtaatttcggcattttttct

SEQ ID NO: 14704 - DNA, 1069 bp, Zea Mays
ccaattcttattagcatacattacaaatcaaattcaagagtcacatctagtcgtacaacaacagtgacttttgtgtatcttattgatattttccattggtgaagcctatctattgcaattagtgtaataattgttagaatggatgcactaactaattcaaaccaaaagaaagtaaaggacagttggagaattgtcaaccaccgggatatcattccaacagtgccacgtcttatgggctattgccatgtggaagcaccagtttatcttaaatttggggacgcaaaagatgcaccggtatccatgttttactgtaccagacctccagttgtcaccaaaaacataaaattgcatttgtatgtgatacagatgaaaggcgagaagcaacttgtggaaaaactactgcaaacagaaataaatttactccgctcaatcagggatggttcggctcttatgcagcacatggaagacttctactatgtcacccttcttgagaatgtgagatcaagttatcaagtggcagatactgccaatgatgaataccaattgacagcgtgatcctagtaaaactgcacagctgaacatcatggactgtgtttccctgcaaaaacttcatttctgaaggacactgaatggggctatgaaagtgtgcaatccttactcttagtggaaacatgaacaggcagaacagccttggacctcagtcaggatagaggaaatgaaactggtttcactggcggatatacttgtagcaccgtgtcaattggtagatatgttgtttgagctattttccgttgatgtagctagcacactttggaatatattgtatgatgtttgaaattctagaaaagttcatagacacctgggagaataactcaagaaatatccaagtccgttttggccaatattttttttcatggagaaacttgcacaccgtggtaggctaccggctacccaagggctgatagggtgtgttaatcgagtgtacgacctagataaaaatgttcaatgtgatggaactatatatcttgcatggaataaagtagcatcatgtaatttcggcattttttct

SEQ ID NO: 14705 - DNA, 997 bp, Zea Mays
atggatgcactaactaattcaaaccaaaagaaagtaaaggacagttggagaattgtcaaccaccgggatatcattccaacagtgccacgtcttatgggctattgccatgtggaagcaccagtttatcttaaatttggggacgcaaaagatgcaccggtaaataacagcattctagatgatgaagaccaaggtgacgtgataggggagtacacacctgatgttcttgttactgaatttatgaaaggcgagaagcaacttgtggaaaaactactgcaaacagaaataaatttactccgctcaatcagggatggttcggctcttatgcagcacatggaagacttctactatgtcacccttcttgaggtttttgagaactatttctgcttttctcataccaaattgtgtcaaaagctcctcaagaatgtgagatcaagttatcaagtggcagatactgccaatgatgaataccaattgacagcgtgatcctagtaaaactgcacagctgaacatcatggactgtgtttccctgcaaaaacttcatttctgaaggacactgaatggggctatgaaagtgtgcaatccttactcttagtggaaacatgaacaggcagaacagccttggacctcagtcaggatagaggaaatgaaactggtttcactggcggatatacttgtagcaccgtgtcaattggtagatatgttgtttgagctattttccgttgatgtagctagcacactttggaatatattgtatgatgtttgaaattctagaaaagttcatagacacctgggagaataactcaagaaatatccaagtccgttttggccaatattttttttcatggagaaacttgcacaccgtggtaggctaccggctacccaagggctgatagggtgtgttaatcgagtgtacgacctagataaaaatgttcaatgtgatggaactatatatcttgcatggaataaagtagcatcatgtaatttcggcattttttct

SEQ ID NO: 14706 - DNA, 1012 bp, Zea Mays
atggatgcactaactaattcaaaccaaaagaaagtaaaggacagttggagaattgtcaaccaccgggatatcattccaacagtgccacgtcttatgggctattgccatgtggaagcaccagtttatcttaaatttggggacgcaaaagatgcaccggtatccatgttttactgtaccagacctccagttgtcaccaaaaacataaaattgcatttgtatgtgatacaggtaaataacagcattctagatgatgaagaccaaggtgacgtgataggggagtacacacctgatgttcttgttactgaatttatgaaaggcgagaagcaacttgtggaaaaactactgcaaacagaaataaatttactccgctcaatcagggatggttcggctcttatgcagcacatggaagacttctactatgtcacccttcttgagaatgtgagatcaagttatcaagtggcagatactgccaatgatgaataccaattgacagcgtgatcctagtaaaactgcacagctgaacatcatggactgtgtttccctgcaaaaacttcatttctgaaggacactgaatggggctatgaaagtgtgcaatccttactcttagtggaaacatgaacaggcagaacagccttggacctcagtcaggatagaggaaatgaaactggtttcactggcggatatacttgtagcaccgtgtcaattggtagatatgttgtttgagctattttccgttgatgtagctagcacactttggaatatattgtatgatgtttgaaattctagaaaagttcatagacacctgggagaataactcaagaaatatccaagtccgttttggccaatattttttttcatggagaaacttgcacaccgtggtaggctaccggctacccaagggctgatagggtgtgttaatcgagtgtacgacctagataaaaatgttcaatgtgatggaactatatatcttgcatggaataaagtagcatcatgtaatttcggcattttttct

SEQ ID NO: 14707 - DNA, 506 bp, Zea Mays
atggatccactgcgctcggcgcaggagctcttcgcgcgcgttgctctcctccatggatccactgtgctcggtgcaggagctcttcacgcgcgcacctcgcctttccttctcctgttgttggggaatgttgagggtgacaagttcaatgatttttctaatcaggacacatttatttggcatgagcatattgcatctttgtttccccatgtttactttgccagctcgggttaccctgtggacctaacagatcctgagtatgatcacaagtctatatttgggaggacacattttgttgtggcattcttgccaaattcaaaagctggtaaaaagaagaacttgctaggagattcagaagagcctaaagagcaagcaccacataaggttgttattttcatcctttgtcatcaagtactagctttcagggacataaacgctcaagctccaacacacatcctcatcatccccaaagtcaaggatggactaactggtctgtcaaaggaaaggat

SEQ ID NO: 14708 - DNA, 3646 bp, Zea Mays
cgttatttatgtatgcttgctactggcctccgtaaggagacctttttttctagaatacgcaggagagctgcacatctttgtattaatagaagaaaagaaaggggggagagaaccccaatacagcacacacaccactagagactaactacggatcaccgactaaaacatggaggaaacacgacccacaccgctgttttaagccagcaactcatcgacttggaggaaggacaaggccttggcaccagtcatggaccagagcaccgcctcttccctaaccatcctaagggccgtgaccaagctgggatttttgtattggtcttttaagaccaccccttttttctgcttaatatataatggggcgcagttctcctgcacgttcgagaaaaaaagaacggtgttggttttctatcccctaagggctggtttggtgacaagggaattggaagggatccatgggggaggggggatttgaatagcgagggatttcccctaagggctactttgggaacctcaaatccctttcgggattggaggggattgaggttgaaatgaactaatttcctctccaatccccttcaatcccgaagggatttgagtttccaaactagccctaaggggttgctaacctctcagggatttgaattcctttcttttttcttaatgaaatgacacgcagttctcctgtgtggttcgagagaaaaaaggagctgcaagatggctattatgacacacaaagggctttaagacctttttttgtttgttttctttctcaaccactgaggcatatgccttaacttttttttctcgatgccttaacttattttgcatgggatatttgatattgtactcctgcatgttaaaaaaaatgcaacactaagtcccaagccacaacgtgggtctgtttataaatagtcgtgacaaaaatcataatttaaacttttgccatcttgtgcttgaggttcaaccgttcaaccaaccatgtcaatagcacaaggacaagcacattggatgtcttctacaataagatagtatgaaataactgctataaatatataaaacttagcataaaataaatattgggatcatcgatacaatcaactcacctgcaaatttcttctaattgataactcatacaaattcgaattactcactatatcagaacgtctcctggtcaactgaccttcatcaagtccctcatatgaaataaagttatgacgcccaactacatacttcaagaaagcatcacctaggacttctaatcgctccaaagagatcctctctaaacacctttcagtagtcaatgattcaaggatctgtaatgaatgtcataaatcacaattacttcagcatagatagcaaaatcaaactagaagtttcagcctcaacagtgcaaaagttagtattacttacacccgaggcactaatttgagaagcctctgggaaataagatgacatgacatccttcaactcaatagccaccaacaaattctccaagcgatacattagagatggtagcaaggacaaagaactgcccatatcttttgagaacccaattatcttcaaagagcatagctctggaggtaactccacaaagtgctccatcaattcacgagcctcagattcttataagaaacagtaaagacataatatcaaaagtattgtataaggatcagaaccatcaaagaatcacagcaatcatccctttttttccatcaaagaatcacagcaatcatcttttttttctcgaacacgcaagagagctgtgtataattatattaagaagaatatattaggggaaagaacccacacacaccccacaactcctaaacactagtcagccagggggggcagaaatttggaggaaggataagtccttaaccccgtctgaagaccacaccgagacctcatctatcgacagcagcaatattaggagattttccttgaaaaccgcattggtttctatgcttccaaaccatccatgccccaagaatgactggggaattgaaccctcttctagtctgcccttgcactttaaggaagctgttcctccaccactcaccaaaattttgctccttaggctgtggcatcagctcctgcaacttggctctccgcagcaactcaaaccaaacttgcctagaaaatacacaagagacaagtggttgatagtttcttgctgctaatcacaaagggggcagcactccggatgttgtaaaccccttctagtaagtttatccgttgtccaacacctgatatattccaccagccaaatgaaaagacggcatttgttaggagcccaacttttccagattctagtagtcggcttcccaccgctgtgccgcccaccttcccaagcgccgtcgccacgggcgcgccccaggctgaccttccgagcgccaccgccactggggacgtgcccctgtccaccattgtgccgcccaccttcctacagttgactcttgctctccctggcttcgacctggccgccaccggccagtgcctgaccgtgttatcgtctgtggtggtggtggcctagagactctccttggtcctccatctacaactcgtggaccggctgcatcaccatgtggcctagccagtccccgggtgtccctcctccgtgacttcctccgccctagccagctcacttggcgataactagttcaaggtatcccttcgtccaccctacccctgcaccgctagctcctcaaccatcactttgtccactgccaaaccactccactccgtcctggaccccgtggcccaaggggtgggatcaacagtcccttgctagctacctcacgatgaccctcactgctcctgctgtcaccgactgggttgctgattctagtgcctcctaccacaccactctagatgctagtatactctcttatttccacctccatctatcattgtggcaacaggaaccttctccgggccctttcatctttgcaatgttcttgccgccccacatatctcaaaatcttctttttgttcgtcaattcaccaccgataattatcgttctattgagtttgatcttttttcttgtccgtgaaggatctcgctacctgcctcctaggggcgcccctacttcagcttcatcatcgtcctccgcatcctacttcagcttcatcatcgtcctccgcatcctacttcagcttcatcatcgtcctcgccacagccgcacgctctgactacctccactatatccagtacttggcatcatccacccggtcatcctagccctgtcgtgttgtccaagttgtgtagtagctcagtcatttcttgtactaagggcgcccctgagcatctttggcatgcctgtcagcttgtcgtcatgttcgacttcttttatcaagctcctctcaagttgtgcacaattttgatcttatacactgtgacttgtggaccactcctattaccaatgtttagggttatatatattatctagtgattcttgatgactgctctccctcaaacaaaaataatggaaatagggtgtcagatcatttcaaaagagaattacccccttgaagaagactaacctgtgctctctagttgtcggttatgaagcagattacgcagacagaagagttgcttagctttcaaaagcggctgctcaggatgggaaagcttgatatgtaacct

SEQ ID NO: 14709 - DNA, 3511 bp, Zea Mays
gtcaaatttccgagtaaacagcatatccacctcttttgagatgcctagcatagaaccaaccgcccagattactgagtactctctaagttccttaggtaaaccagtgaactgcacccaagccttaggcatctcatattttatttcctctccaagcccctcttccttgacaagcatctgtgcaccaaattttgtatgaacagttccccactcgatcatgcggtgaagttcaccccgggaagggaaacacgtcgagaacacattgttccccacacacttcacacaccagtcccaatcagcagccaccaaccttttaagctcattcaaaatctgctcttcattcatggaaccctccacaatagacactgttccaatgcagccaccttgcctctgcttcgggcagacgcatcctccgccatcgttcgcccgcccgcgtcgcgttgcgctccaaccaatctcagtggtcctctcccctctccgtcctctctcgcctatcccttcgtcctctcttattttgtgtgtttgtttttccaattggatcattgttgtgctcttgccaacagggtgttatgtgattaagaaagaaaatgctgactgtttgatcagtggcttggattttggaaaattgcccatatttggttcaagtccattctttgatgtggcaattggagcataattaactaatatttcaggatatctatactcagtgagttttttcttccaacctccccaatgtatagttgtggaatatgtacatgtcttcaacagtaacaaaggattaaaaaatcatgttttggcatttcaagttgaacgcgtgtatgcatacaactggagccctttatccatgtggagggtagacattgttttgtatgtaccatccttggattcatctgccagtttgaatctgaagaagtgtatcacagtatcagggtggctaccattatcttcatggcggcggcggccgcggcgcctcccatccccacccctaaccccaccgatgactgggtggacggctcgtgaacgatggactgttcctgcggcgtcacgttcgacgacagcgaggagatggtcagctgcgacgagtgcagtgtgtgggtgcacacgcggtgtgcacgctatgtccgcggtgtccacacatccttctgccacaaatgccggaggtccaagcgcgtgccttcctccaccgacgaggccgaggttgctgagctcctcgccgagctgccaacccaccgcccgcctccgctgtaccgccgctaggccgaggtctcgctcccagcccacatcctaactcctaggagcaagcgagtctcgccctgatctggtatgattcattgttttgttcagtgtgccagatatactcttctttggcacagggcttactagcatatactgtttgttcagatgttaacaggacataaggaaaatgcggaatttgcgcttgccatgtgtccagcagaaccatatgtcctatcaggaggttagcctattttcatcttgtatgtttgtgttttcctactattttgggagtcaactatttatccagtttgtttgaacatctcgagcacaagacttgggtccacctaacttccattcaatggcaatatgtttctttattgcattggcaagtgtccttccccttaggatgccatggcaactttaagacacatggagaatatttggagtggaaccttagtcaccgctacaccatctcagcctatgtaataaccatgtgtaaagttcagtttggacataagatgatttgtttgaacttttggggctataaaattctgttttcagctcaactagaagaactattcgttttcagaagttattgattattgtgcttttgataaataataacatgtgttttgttcaaatacaaaacttaaataggaaaggacaaatctattgtcttgtggagcatccaagaccatatatctagatgttcattgttaaaacacgtctatttgtttaatgatgttattgttaattaaactaggatcattggccttctctgtgaatgtctatgttgacacatgccttatttttatttttatttatattaataccctatattgttttttttatttagggatgaagtgcgcatgagttttgtagtgtgggtgatgatgcttgtcttattctgtgggatgcttgaactggcactgccccagctgttaaggtgacagttctcttgttctatatctaattggataaactatgtttttagccaaaattgagtcaatgaatgcaatgcggcttcttttgtaataatataacttcacttaaagaggtgatgggctgttggtttttaatgagaccattgcaatcacatggagctatttattttgtcaaattggcctgagatactttacttgttacatgataattgtgtttctaattttatttcttgaatgattgttcattttcattaacttaactgatataatgtgttgagaaattgatcatgactgatttattggtcgaaagtattttgttcagttttttacttgttccaaatagggtgacattatatttctttcctaatgtggtgtacctttagttttttttcaagatatggagtttgtaaatgcagcatggactatgatgttaaaaattatttattatttatttccaggttgagaaagctcacagtggagatgttcattgtgttgattggaatccccttgatgttaactatatcttaactgggtatgatggcattaaggttcaattcagcataatcattgaaacaaattcgatctctgtcagttccttatacgttcaagtaatgaatctttcaattgattaaaataacaaaatttatgtatggctacgatcacaaatggactacaaaactttttctcgtaacgctataacacacatttatacataagttatcgtgttattacatgtttccgttgcaacgcacgggcattcacctagtagaatatataatttcaacaatgtggcaaataagtaggggtgtaatcctgttaacgacacaccaatatcggaacccaggtattgtgttaaaagggcaagggctaggttggcacccctcggtgatatgttgtgtcgtgatctgagcacaatgtcaagtgagcaacaatcagatcgttgcttccttagtggtgtgctacattgacgtctaagtgagtaggtgtaaagaaaaacatgtgagagtcttcacatcatcagcgggtgcgaagagtatggaagctagtcgaacctgttagaatacccgtttagggtttggggtttaccccgcgtatttaccttctcacccctgtgtaatgggcaagacccaactaactcagtctattaatacatcacccaacaccatgttagggttagagtttcccacatggtatagagctaggtttacttttttttcctgtcacctctcctcccacctaatcgccaccccttccagccagcaaaccccgctaccggcgccggcactccccttgctccggcgcccctccctccctctcccctcatggaagccggc

SEQ ID NO: 14710 - DNA, 771 bp, Zea Mays
cgtctccccaagatccatcggctcacgcactgacgcacatccattaccttctataatacgtctgcggtgtcaaaatttccctctcagccgtgttgctcgccgccgccccgccgtgttgctcgccgacaccgccccgccggcagccaaaatgccgttcaagaggttcgtggagatcgggcgagtggcccttgtaaactacggcaaggagtatggccgcctcgtcgtcatcgtcgacgtcgtcgaccagaacagggctcttgttgatgcccccgacatggttcgttgccaaatgaacttcaagcggctttccctgactgacatcaagattgacattaaacgtgtcccaaagaagactacactgatcaaggcaatggaggaagctgatgtgaaaagcaagtgggagaatagctcatggggcaagaagctgattgttcagaagaggagagcatcactcaatgactttgacaggttcaaggtcatgttggcgaagatcaagaggggcggtgccattaggcaagagcttgctaagcttaaaaaggtggctgctgctgcttagattgctttggtggttcctctattcgatctcttgaaatgtaatgcacgaattactttgacagttagcttgtcaagatgtcaattttaaactggcttatttagatattttgtccaaaatgctattctgaatctgagatagtgttgtattctgatatctatcaagtgttgcattgttgttacattcaacgttgttgccggctggctttcaaaaaaaat

SEQ ID NO: 14711 - DNA, 1916 bp, Zea Mays
acccatgttcctgttcccacactcgactgtcatcctgtgatatccgctcgccagtcgccactccgtttcggcattccgcctcctcccgacacacctctttaactcgcttccgtttccaaaaaaatgctccagttaatttaatccagacgaggaatcgcctcgccgcggatctctccgctcgccgacaagacccgctatcggctccggcgggaagactcgcactacggtggggcgcgtcgccgccgctcggcacgtggctcgtcggttcgacgttcgcttgtggaggtcgtcggggccagcggtgccggggcaatgcggcgtgaacatgcagagtgacgaggaggtggctgtcaaactggaatcggtcaaatcacgacatccccagcttcactatgaatcaaaactctacatgcttttgcagggtggaactgggattccacatcttaagtggtttggggtggagagggagtacaatgtcatggtgattgatctgcttggcccaagtatggaggacttatttaactactgcagcagaaagttctcccttaaaacagtactaatgcttgctgatcagatgatcagtagggtagaatacatgcacacaagggggtttctacatcgtgatatcaagcctgataatttcctcatgggtttaggacgtaaagcaaaccaggtatttgtcatcgactatggccttgcgaaaaagtatcgagatctccaaactcataagcacataccatacagggaaaacaaaaatctcacaggaacagcacgatatgccagtgtaaatacccatcttggagtagagcaaagcagaagagatgatctggaatctcttggttatgtgctgatgtatttcttaagaggaagtcttccttggcaaggcctgaaagctggcacaaagaagcaaaagtatgatataatcagtgaaaagaaaatgcttacaccagttgaggtcctctgtaaatcgcatccatcagagttcactgcatactttcattactgtagatcactacgatttgaagataaaccagattactcctatttgaagagactcttccgtgacttatttctccgcaaggggtaccaactagattatgtatttgactggaccattatgaagtatcctcagtttagagataaaaacaaatttcagtctagcggcaagactagtgggttggcaggcccttctgcagaaaggaccaatagaactgcagctgaagctttgtttagaagaactagatccggttccggtcacaatcgagaacacaccaagcacagaagtcttctagagtcactgatgccatccaaggtgactgttgattcggataaaataaggccatcgtcatcatcgcgcaatggaagcacgtcaagaagagctgtgctttcatcaagcaaaccaagctcttctggagatccaagcgacccaaaccgcgtgggcggcttggccccgagtagcagcatacgcccattgagtgcccaaagggcacatcattcaggtggaacagagatcaaatcattatcttggtcaaaaatgggaaggtcttcacatgatgacgctatcaggaacttcgagttgctctcactttgtgctgacaagagaaaaataaggaactaacgaaatgggctaggatctggactctggatgatgacgattgattgctgggggtattatgagcaggcagctccagtatttctatgttggaaaatgttcttttaaaaataaaaaatgatttaacttatgagattgttttcctccagtctaaataagctcttcccaaaggggatataattctagcatagcatctagtcaaaccattttgaattcgaccaaaatttatatataaaaaggtatctatatttatgataccaaataagggctcgtgtgtttgccttgatctgggtggtatatcctg

SEQ ID NO: 14712 - DNA, 1250 bp, Zea Mays
ggttggtttgcataagcaggccaggggcagcccacgacactcagaacaatgtgtgtagaaagttaataataaaaatagggaaaacaaaaatctcacaggaacagcacgatatgccagtgtaaatacccatcttggagtagagcaaagcagaagagatgatctggaatctcttggttatgtgctgatgtatttcttaagaggaagtcttccttggcaaggcctgaaagctggcacaaagaagcaaaagtatgatataatcagtgaaaagaaaatgcttacaccagttgaggtcctctgtaaatcgcatccatcagagttcactgcatactttcattactgtagatcactacgatttgaagataaaccagattactcctatttgaagagactcttccgtgacttatttctccgcaaggggtaccaactagattatgtatttgactggaccattatgaagtatcctcagtttagagataaaaacaaatttcagtctagcggcaagactagtgggttggcaggcccttctgcagaaaggaccaatagaactgcagctgaagctttgtttagaagaactagatccggttccggtcacaatcgagaacacaccaagcacagaagtcttctagagtcactgatgccatccaaggtgactgttgattcggataaaataaggccatcgtcatcatcgcgcaatggaagcacgtcaagaagagctgtgctttcatcaagcaaaccaagctcttctggagatccaagcgacccaaaccgcgtgggcggcttggccccgagtagcagcatacgcccattgagtgcccaaagggcacatcattcaggtggaacagagatcaaatcattatcttggtcaaaaatgggaaggtcttcacatgatgacgctatcaggaacttcgagttgctctcactttgtgctgacaagagaaaaataaggaactaacgaaatgggctaggatctggactctggatgatgacgattgattgctgggggtattatgagcaggcagctccagtatttctatgttggaaaatgttcttttaaaaataaaaaatgatttaacttatgagattgttttcctccagtctaaataagctcttcccaaaggggatataattctagcatagcatctagtcaaaccattttgaattcgaccaaaatttatatataaaaaggtatctatatttatgataccaaataagggctcgtgtgtttgccttgatctgggtggtatatcctg

SEQ ID NO: 14713 - DNA, 1202 bp, Zea Mays
acaatgtgtgtagaaagttaataataaaaatagggaaaacaaaaatctcacaggaacagcacgatatgccagtgtaaatacccatcttggagtagagcaaagcagaagagatgatctggaatctcttggttatgtgctgatgtatttcttaagaggaagtcttccttggcaaggcctgaaagctggcacaaagaagcaaaagtatgatataatcagtgaaaagaaaatgcttacaccagttgaggtcctctgtaaatcgcatccatcagagttcactgcatactttcattactgtagatcactacgatttgaagataaaccagattactcctatttgaagagactcttccgtgacttatttctccgcaaggggtaccaactagattatgtatttgactggaccattatgaagtatcctcagtttagagataaaaacaaatttcagtctagcggcaagactagtgggttggcaggcccttctgcagaaaggaccaatagaactgcagctgaagctttgtttagaagaactagatccggttccggtcacaatcgagaacacaccaagcacagaagtcttctagagtcactgatgccatccaagactgttgattcggataaaataaggccatcgtcatcatcgcgcaatggaagcacgtcaagaagagctgtgctttcatcaagcaaaccaagctcttctggagatccaagcgacccaaaccgcgtgggcggcttggccccgagtagcagcatacgcccattgagtgcccaaagggcacatcattcaggtggaacagagatcaaatcattatcttggtcaaaaatgggaaggtcttcacatgatgacgctatcaggaacttcgagttgctctcactttgtgctgacaagagaaaaataaggaactaacgaaatgggctaggatctggactctggatgatgacgattgattgctgggggtattatgagcaggcagctccagtatttctatgttggaaaatgttcttttaaaaataaaaaatgatttaacttatgagattgttttcctccagtctaaataagctcttcccaaaggggatataattctagcatagcatctagtcaaaccattttgaattcgaccaaaatttatatataaaaaggtatctatatttatgataccaaataagggctcgtgtgtttgccttgatctgggtggtatatcctg

SEQ ID NO: 14714 - DNA, 693 bp, Zea Mays
caccacgttcctgatggctagctacagccatcagcgcggccggctcgtgcctggcctgaagcccctgttcggatgtctggaaagcacaggcatgttcgaggcagcgggccgggaggtggccgcgttccttcgcgtcaagtcgaattggagcaaagctcgaaatggcccgggacagcctgcgggccgtcgagacgacggtcaggatgcaggtcacggcggaggaggacaagctgaacgtctgtggtcctcaggtgcaggtgtggctcaagcgcgtccacgagctttgcctggacaccatcgacgaggattacgtcgccgcgcctcgatctgcaagcctgttgtggacgagctggaggaggtgaacagactgaccgaggaagggaggcggtttaggacatttgggttcaagccaccgccgagggccgtcagtcggttaccccaaaccgagaccgttgggttggagcccatgttgactcgactccatgatttgcttgagaagggtgaatcaagcataatcgatgtgtggggtcaagaaggcatcggcaagacgactctcctacacacaccttcaacaatgatctcgaaaagaaatatcacaattatcaggctgaagaacatcacatgggtcctgaagcttggaatgctcgagaggctcgtcataacccattgcgatgggttgctgaagattgttga

SEQ ID NO: 14715 - DNA, 4457 bp, Zea Mays
gcaaaaggcatcaggttctttgctacttccaacacattcttacaccaattcattacagtatattttaatacaattccaaaaaaggtcagaaaacacacaatgaacaagttcatttttcacctgagctcctccatcttcagttctaggtcattcttcccctcatttttcacatcagctcatccatcttcagttctaggtcattcttcccctccaagcactaattctttagcaaggtctctcataagacttaatgctagtgtgttatgccatatgaaaagagtacgggtatctggaaattttcgccgaaggtcctacacataaattatgaagagtttcagtatatctgaaacaaagaagcaatattaatgaggatggcacaacattgcaactataactggtataggaaccgtcattccaaactattcacttaacctaccttgaaacactgtggtcccaattttctgagagctaatcattagtcctagtaatgcaaggaactaaagctaatccaaggtgaaaaaggatgtgacatcacagagatgcctcttgcacaacaagattgatttctatggatacgaatggttcacaaaaagattgattgtattttacaataacatcttgcacaataatattgaaacaaagggagagggaacaaagcacttaccatgcctcttgactgtattaaaaacatgacagatgacgatggtggtacacgtgagcatatgtgaagtatatatatctgtgtatgcgagcatcattattcaattatcttataaaatcaatacatcctgaagtcatatctaatatgtacacagtacacccaccaggtacattatgagtacattatgaacgtgcaaaaaaagggctatggactcatcctgtgttctatcctaactcctactggaactgtagacacaagccaaaagaatgtgatactatcgcactatacgtaactcaatacatggtaaaccaagttttaactaaaatcaatcatatctgttgatttggtttttgaaaagattgtcatggggagttgaggtgatcaaaggattacgaggaacagcagagcagcgatgacgaggacgtttctgttgcaatgcagcttcggcgaaaaacttgcagaaggttgcaagacattgacttgggtgccattcggtgaggcacccttggtagcttcaggagtgagtgtagctgttcggtcccaagccaggggcagggggaacaccagaaggatttgggttcactggaaggttgcttcttgagttgcccacgctgtaacctggcatggcatgttagcagccacaacatgtaacgacattgctctagtttgaagctcttgtaaatttaatctgtaaaaaacatctagatggatatgatggtgcttacaatcaaagtttttccagcccaagaccttcctctctcgatcaaacacgaccttcagcccagacataaaattatctgcatataaaatgaccagccaaggtaagaatgttcaagagtttagttgaaacacaaggttgaagagtttgaatgcagaagcgtgcgcacacacacacgcacgcacacacacagagaccatgaactaaccagtgaggtagtgaccatatataaaaggaaaagcatgaagcagatcatgaactcaccagtccatcagtcatcagatattaaaggaagatcaggaaaaaacaaacctcaaggagcataagtttgatattttaaccatagtgaattggattgtgaacaggactagtgatttgctcctgaattgagtctcatctattttgtcgattagggtacaaatagcatgcaatagatcaaaggaatgaaaaaatctcacacaacactaatcttcttttgtccattgtggcaacaggcatgtaccaaggtagtgtctcctttatcctcctaagtaaaatggcaaaggaaccaattcaaccgagggcaattaatttcactggacggcaatgaataagaagtatcatgtgagcagattaaaagaaccacgcaagaccaaaaatctcatctgatctgctttccgcctctagtgatgagattgaggagaggaggtgagaagcatgaaacgtagagcaacagaggacgatgaccgtggggtggaactggagcctggatgaggtcaactctgtaggctcactcactctagtagatctaggcaacggaggagccctagacagttcatggttttgtctgctagatctaaaaacatgtcacgatatccggcaggaacaatccacacatctcatgaatccaacggatccaatccctccccagcacccacgaaccattcgtcacgacagggatctgaagggtgaagcttcacctggtatcagtggcggaacaaacctgcaaccgtggatcaaggcaaacaaagtacttcaaaccgtttataccatgctccagttccacaatagccttttctaaagcaggctcacatcttccagatttatgtttcagtttctcaagcatcttttctgaagcaacctaaacaagtataatcggtttgtcaagtttccaaacgacgacatgcataatacatctactttggctacataaataaaatggaaaactcaacctgagaaccatacaagaacattgctgtaaactaacctcactggagctgatttggttagtggctgagaagaatgaaataaatatgttcattccttaccgttccaagcaagaaagcctcactggagctggtaccttctgtgtcaaagttcccttgttgtgaagaactccgagattcttctgttgaaagaataaaattgtcacaaaattgcatcagagcaagaaatcattcactaaaacagtaaaaactcttcacctcttatattgatatcaagctgaatatccttattctctaatgtgatcttgctcaactcttccgtttcttcactttgccctatggtagctgtccattcagtgtttaggcactgagatacaagctttgaatactccaaactctttaatctatgaaatccgtatggtatacatactgtaaatggccaactgagtgataatttatatccattcaagctctactgttattttattttagagaatttgatattcttcaattgtatttttcaaattattacttaattatcattactaagccttatttgtccaccacttgtcctccctcaatttgcttcgctctccagcacggatccagtccactccacattgacctcctctaaaataatgctcctttgtttgagaaacggattttctatcaagactttgcatctgtttgtatttgtacatatttcatgaaccatttactaacaaagcaagggagttcggcaaattggcatcataccaaccaatagttatacagtcagcaaacaattagatgtcagcccattttattgagcacaaaaagctactccaatgtgaatgagaaaaaattcatgattaaggaataaacaagcacattcaattaagtagcttataaggctacaatatttatacctaacactgccttctcaagaggaaaatcctagtgaattacaatcatcaggtaatttatagttttcaaatggaagcagggagaacacaatgaaataataccagtaagttcacctattttattctactcaaatgatggacacataagttcctgagtggtagtcataaactaacagaaatacatcttggccgctaacaaatgaaatgtgaaatcacaagctataaccaacccacacaagtggataatatagaagagaaaaaagtcaattagcatataaaaaaagagaatcaagcaaatataaaaactttaaccattgtaatacggaatgtggtggacctggttcttgaagaaaagctcgagcaatggatatgttgatgatgaattcaacttgttagctacgtaaagcgcgcggcaggcatagaatgcatatgtgtggtatctgtagttgaacatcagaggggggaaagtgagaatcagtagtaaggaacttattgctaataataaataacagggccgaacagttttatatagttaaaaagtctatgatatgaagcatttttcgttatacaaaattgtactgccaacgaaaaaaagaatgtctgcgatcaagcatagagaagaaactacaacacctggcacctggaagcatgcatgggaccatgtatgacgagatttggtaaagaaaaacaattgacatgataggcaatccgtgcctctaaatagcacgacctcagcataaaaaattggagcacccagcttaattatagatcccgttctatattatttagttagcggcaactgagaatagttttaagcagtccaggggcaaccgattgcaggaaatgaaacagtacatctccctccggccgaccagaactacgttgctctcatctcaagaaaggcgaaggaagatgcggcacagacacagaggatagagagcgtaatcaaaggcacagtggtccaaaag

SEQ ID NO: 14716 - DNA, 514 bp, Zea Mays
gtcaagtgccacatcttggatgccacaccgccacgtggtgcacagatcgctgaggtcggggagctgtcagagctgttcatgtggaaaggggaggtgcgcaagggcctcgcggactgggacgaggcggagaaggagcacctcggcgaggagctctccgacgtgctgctctacctggtccgcctctccgacatgtgcggcgtcgacctcggcgacgccgccctcaggaagatcgtcaagaacgccgtcaagtacccggcgccgtccaaggaacaaggcgcctgatgatgacgaacaataccacctgtgatgctttctttgatgcttttgggatagctggtgcctggtagaaccaggcagcgagatatatgaactgattcttggacccttcacccccctcccccccctcccccccccccccccccttttttttttgcggtgcatgcagcatgctcgaaggttaataattgatacaattattgctcggctgatagctttttttttttgccttttgaaa

SEQ ID NO: 14717 - DNA, 1803 bp, Zea Mays
cagtgcctcctcgtcaggcgatcaggccgatccggagcgcgcgggcggagcagttctcgtgccgcaagcatatatgaggcatggcaacacgccgtcgatcagtggcgttgggaattggaatcttccacctcagcctgtaggcgcaccccagccccaggagatagctagaggatagcgacggagcttattgcctggcatgacacaggcacagcgcacgccacagctagcgatcccgcgtcgtcgtcctggcttcctccctataaaaggatccggccggagacgcagccacgctcaagagtcaagatacatcagagtagctcattgcatagtttcagtgtgtaattatatatttgtctcctctagtgcagtactagagtctagtctagctagtttagattgagtctgcttgttcatctagcgcgtgttttggggtaggtagctagctagctagacacgcgcacccggacaaacgcacgcagcagacaccaagcaggaatcatcggcggcaggcggagggatggggctgagggagattgagtcgacattgccgccggggttcaggttctatcccagcgacgaggagctggtatgccattacctctacaggaaggtggccaacgagcgctccgtgcaggggacgctggtggaggtcgacctgcacgcgcgggaaccatgggagcttccagcttcagggaccgcaagtacgcgaccgggccgcgcacgaaccgcgccaccaagacgggctactggaaggccaccggcaaggaccgcgaggtgcgcgacccggccgcccgcgccgtcgtcgtcggcatgcggaagacgctcgtcttctaccagggccgtgcccccagcggcgtcaagtcatgctgggtcatgcacgagttccgcctcgactcgccgcgtacgacgacgacgccaccgaaggaggactgggtgctgtgcagggtgttccagaagcggaaagtcgacggcagcgagcaagacaacggcgtctccccctcgccgccggtctttgccggcgcatcgcagtcgcagggggtcgtcctgccgccggaccagccctgcgtggtggacgcgtacgtcgtggtagaccagccgggctcttcttccgtcggactcgcgccgccgcaggagaacctcggtagcggcctggacgcgttgctgacgaacggagcgatgtggcagtacacctcgtcggtcttcggtcacttgttgccgcaggaggcgaccagctccccgccggtgatggacctaggctccaggggaggagaaggaggagactacgggtgcagcttcttctacgacagcagcttcgaggacatggccaacatcgggttccgacaagggtggatgggctgatccaggaccaggaagcacacgtacgtgcgtgcagtcatgcgatatggaatgtgcatttgtgaaggaagtgattgaattaattgattccattagtagtagcaccctctagtgttgtacagtaggtacgtatatagtgtgagattagattattattgggaattgttagagtgcaccggcctctcaaatccaaagaagtaacagcggaaagaaaagctagtagctagagcacacatgtatatatttgcacaaggtagatggtttgatcaaccgcatgacacggcaattgtatatatgtatctctccacccctactataccatgtttgtaaataaatcaatataaatcaattcaaggacatgcatgtgtatggcacaccaactccctactaccatcttcatatgagggggacatattccgtgtacaagatcaacttaatatgagaagg

SEQ ID NO: 14718 - DNA, 1664 bp, Zea Mays
tggatctcgagacttctgtgtgctgcgattgcgacgaattaaagaaacagcggtgccggtgcagcgctagctgcagttgggttgcggccgcagagcagcagcaggaaggatggcgaccaaggtggtggtggacctgcggtccgacacggtcaccaagccttccgaggccatgcgcgcgtccatggccgcggccgacgtcgacgacgacgtccggggcgcggacccgaccgcgcgccgcttccaggaggagatggcggcgctcatgggcaaggaggccgcgctcttcgtcccgtcggggaccatgggcaacctcgtgtccgtcctcgcgcactgcgacgtccgcggcagcgaggtcatcctcggcgacgactcgcacatccacctctacgagaacggcggcatctccaccctcggcggcgtgcaccctaagaccgtcagaaacaactccgacggcaccatggacatcgacagcatcgtcgctgcaatcaggcctcccggcggtggcctgtattacccgaccaccaggctcatctgcttggagaacacacatgggaattccggagggaagtgtttatccgcagaatacactgaaaaggttggcgaaattgccaagagtcatggcctgaagcttcatatcgatggagctcgcattttcaacgcctctgtggcacttggagttcctgtggacagacttgtgagagctgcagattcagtttcggtatgcatttctaaaggtttaggcgcccccgttggatcagttattgttggctcgaaggccttcatcgacaaggccaaaattctccggaagaccctaggtggtggaatgaggcaggttggagttctctgtgctgctgctcatgttgccgttcgtgacaatgtgggaaagcttgcagatgaccacagaaaggctaaagctttggcagacggactgaataaaatcgaacagttcagagtggattcagcatcagtccagaccaatatggtattcttggacatcgtggattcacgcatatcatctaacaagctgtgccaggttctgggaacgcacaatgtgctcgcaagtccaaggagtccaaaaagtgtcaggcttgtccttcattaccaaatttcagatgatgatgttcaatatgcactgacgtgttttaagaaagctgctgaacagctactaatgggcagtactgaactcgagcatttggctgaacagctactgatgggcactaccaagaactcgtacgggcaatagggcaccctgatgcataagctcggtgtggtcttatctgtaatcagctcgaaatattgtagccgcaccaaacctttgctgaataactgttgcttctcacttgtttattggatgtgttcgttcctgtgctttggcctgtttggtttaacttttctctgaccggtttttctgagaatctggttgtgcaaaaaatcctgctatagagagaatctagtatcatggggattacgagtggaggaagatgaaggtgttcataaggttcaggatctagaaataaatggatttctactatttcaaagactcggctgattatgtgtttatgtcaattttagatatattaccaaatcggttcttatagaagctagccgaaaagctgagtgtttggcagtccgcaacagcttttggtggctagaaaatgaaaaaa

SEQ ID NO: 14719 - DNA, 1649 bp, Zea Mays
aaagaaacaggtctgtagtagcaactagcaagtgcagtccgcatcatcgtcctcattgatcatcgtggtcgtcatcatcataccatacagagaatatgcatgcggtgccggtgcagcgctagctgcagttgggttgcggccgcagagcagcagcaggaaggatggcgaccaaggtggtggtggacctgcggtccgacacggtcaccaagccttccgaggccatgcgcgcgtccatggccgcggccgacgtcgacgacgacgtccggggcgcggacccgaccgcgcgccgcttccaggaggagatggcggcgctcatgggcaaggaggccgcgctcttcgtcccgtcggggaccatgggcaacctcgtgtccgtcctcgcgcactgcgacgtccgcggcagcgaggtcatcctcggcgacgactcgcacatccacctctacgagaacggcggcatctccaccctcggcggcgtgcaccctaagaccgtcagaaacaactccgacggcaccatggacatcgacagcatcgtcgctgcaatcaggcctcccggcggtggcctgtattacccgaccaccaggctcatctgcttggagaacacacatgggaattccggagggaagtgtttatccgcagaatacactgaaaaggttggcgaaattgccaagagtcatggcctgaagcttcatatcgatggagctcgcattttcaacgcctctgtggcacttggagttcctgtggacagacttgtgagagctgcagattcagtttcggtatgcatttctaaaggtttaggcgcccccgttggatcagttattgttggctcgaaggccttcatcgacaaggccaaaattctccggaagaccctaggtggtggaatgaggcaggttggagttctctgtgctgctgctcatgttgccgttcgtgacaatgtgggaaagcttgcagatgaccacagaaaggctaaagctttggcagacggactgaataaaatcgaacagttcagagtggattcagcatcagtccagaccaatatggtattcttggacatcgtggattcacgcatatcatctaacaagctgtgccaggttctgggaacgcacaatgtgctcgcaagtccaaggagtccaaaaagaaagctgctgaacagctactaatgggcagtactgaactcgagcatttggctgaacagctactgatgggcactaccaagaactcgtacgggcaatagggcaccctgatgcataagctcggtgtggtcttatctgtaatcagctcgaaatattgtagccgcaccaaacctttgctgaataactgttgcttctcacttgtttattggatgtgttcgttcctgtgctttggcctgtttggtttaacttttctctgaccggtttttctgagaatctggttgtgcaaaaaatcctgctatagagagaatctagtatcatggggattacgagtggaggaagatgaaggtgttcataaggttcaggatctagaaataaatggatttctactatttcaaagactcggctgattatgtgtttatgtcaattttagatatattaccaaatcggttcttatagaagctagccgaaaagctgagtgtttggcagtccgcaacagcttttggtggctagaaaatgaaaaaa

SEQ ID NO: 14720 - DNA, 1710 bp, Zea Mays
aaagaaacaggtctgtagtagcaactagcaagtgcagtccgcatcatcgtcctcattgatcatcgtggtcgtcatcatcataccatacagagaatatgcatgcggtgccggtgcagcgctagctgcagttgggttgcggccgcagagcagcagcaggaaggatggcgaccaaggtggtggtggacctgcggtccgacacggtcaccaagccttccgaggccatgcgcgcgtccatggccgcggccgacgtcgacgacgacgtccggggcgcggacccgaccgcgcgccgcttccaggaggagatggcggcgctcatgggcaaggaggccgcgctcttcgtcccgtcggggaccatgggcaacctcgtgtccgtcctcgcgcactgcgacgtccgcggcagcgaggtcatcctcggcgacgactcgcacatccacctctacgagaacggcggcatctccaccctcggcggcgtgcaccctaagaccgtcagaaacaactccgacggcaccatggacatcgacagcatcgtcgctgcaatcaggcctcccggcggtggcctgtattacccgaccaccaggctcatctgcttggagaacacacatgggaattccggagggaagtgtttatccgcagaatacactgaaaaggttggcgaaattgccaagagtcatggcctgaagcttcatatcgatggagctcgcattttcaacgcctctgtggcacttggagttcctgtggacagacttgtgagagctgcagattcagtttcggtatgcatttctaaaggtttaggcgcccccgttggatcagttattgttggctcgaaggccttcatcgacaaggccaaaattctccggaagaccctaggtggtggaatgaggcaggttggagttctctgtgctgctgctcatgttgccgttcgtgacaatgtgggaaagcttgcagatgaccacagaaaggctaaagctttggcagacggactgaataaaatcgaacagttcagagtggattcagcatcagtccagaccaatatggtattcttggacatcgtggattcacgcatatcatctaacaagctgtgccaggttctgggaacgcacaatgtgctcgcaagtccaaggagtccaaaaaggcttgtccttcattaccaaatttcagatgatgatgttcaatatgcactgacgtgttttaagaaagctgctgaacagctactaatgggcagtactgaactcgagcatttggctgaacagctactgatgggcactaccaagaactcgtacgggcaatagggcaccctgatgcataagctcggtgtggtcttatctgtaatcagctcgaaatattgtagccgcaccaaacctttgctgaataactgttgcttctcacttgtttattggatgtgttcgttcctgtgctttggcctgtttggtttaacttttctctgaccggtttttctgagaatctggttgtgcaaaaaatcctgctatagagagaatctagtatcatggggattacgagtggaggaagatgaaggtgttcataaggttcaggatctagaaataaatggatttctactatttcaaagactcggctgattatgtgtttatgtcaattttagatatattaccaaatcggttcttatagaagctagccgaaaagctgagtgtttggcagtccgcaacagcttttggtggctagaaaatgaaaaaa

SEQ ID NO: 14721 - DNA, 510 bp, Zea Mays
atttaatcaacgaattggaagaggccgagacgccgagtgcgtttctggtgctcatcactactgttacatggaaatccgcatccgcgtgcagaagaattcctctcaaaatgggtagcatatataggtttcgatcaccgatatcttgtcgatcgatcgatctttatatacaagaaggcaaacaagagatagatgcaatggcatgtcgcgttgtttcttcctaatctcgtcgtggtcctcaacacacacacccctctattaattagctgctattgtgactgtcccctccgaattccgattgcaagacgtgcagggagagagaaagaacgatgaatcaattagccagggaactgaaaattctcgggcgcgcgtgcgcgctctaaacctgcggcagttgttggtgcgcgtcgccggacttcatgaacactccgagccagtagtccaagtcggcgtcggcgccaacggacgacgaggaggaggaggcgacgccggcgcggtggtggccggggcgac

SEQ ID NO: 14722 - DNA, 2166 bp, Zea Mays
ctttcctcctcccccgatccaatctgtcgtccagacatcagcgaaatgacgacctgcttgccgtctgccgctctgagaactccaatttggacgcgccgtttgaccgaatactgatctccgcattccaacgctcaaacaccacccgggcggctgcgcccccaactccccccgtccgcccaacgcccatcccccaaaaggctccgatctgattccgagccccgccaggcgccagccttctcccgccgcgtcgcacgtgcgccccaccccatactcacgctcgagccgcgatcccatccgggggttccgatgcggtcgccggcgctcctggccgccgccctagccgcggtggcactcctagctgccggtgccggattcgcggtggccgcgacggaggaggcctacgtcacgctactgtacggcgacgagttcgtgctcggcgcgcgcgtccttgggaagtccctccgcgacaccggcacgcggcgcgacatggttgtgctcgtctccgacggcgtttccgagtactcgcggaagctcctacaggcagacggttggatcgtgaatcgtataacgttactggctaatcctaatcaatttaggccaaagaggttttggggcgtctacaccaagctgaagatatttaacatgacaagctacaaaaaagttgtttaccttgacgcagatactatagttgtgaaaagtatcgaggatcttttcaagtgtggcaagttttgtggaaacttgaagcattctgaaagaatgaattctggtgtgatggttgttgaaccctctgaaactcttttcaatgatatgatcaaaaaaatggatcaattgccttcttacacaggaggggaccaaggttttctaaattcatattattctgattttgccaactcccgtgtctatgagccagactcgcctttaactcctgaaccagcgacacaacgcctttctaccttgtataatgctgatgttggtctttacatgctagcaaacaagtggatggttgatgaaaaggaattaagaatcatccattacacactgggtcccctaaaaccctgggactggttcacagcgtggcttgtaaaacctgttgaaacatggcaggatattaggcaaaaacttgaagaatctcttccaggaactggtgggggaaggaaccctcatgaccagctggttgtcaaaatattgttcattctcccattttgcttgctgctatttggttattaccaatcatgttttcagacagacaaggagttggtaagtataagatctctatgtgcttttgctagaagagctcgccataaatacaagtctgaagagtcacttccatcttattcagtgttatcaaatggacatttgaaactaccttcttattttggggcaattgcggtgttagtctgcttcgtgtctgctggtttctctcttgcatttgctttcgctatcattccacggcaggttatgccatggacaggtttgctactgatgcttgagtggacctttgtggcattcttcttattgtttgggagttatctccgttttgtctaccggtggggaagtatcagtgcaaaccatgtgggatttagcaattctgactcatcggagaatcatatgggtccaggccatcagcgaaatatgtctgactgcgacatggatgcaacattttactggatagggatggcatctatagctactattactgtactgttaccgactatcttgggcataactgcattgttcacaaagctaggattaatggtcgctggtggtattgtgctggcatcttttatgacatacgcagcggagcatcttgcaatctcagtcttcaacaagggtcaaaaatacaggaatgcgtcaagaactcgaagcttttgtttttaacgtttaagtaaaaaatccttgttgtattgtaggtagttttgtacacaaaaagaatgatgattcatttttaacacgtggcttcctgcccatggcccctttttttgtagcgctgatgtcacgccaacttgtggtaaataggtttccgacattgtttctgtagcacagttggcatgaagattacagacatgttttgggatcgtgacccgcttttactcgcttatattgatgtttatggtgagattgtagtatatcagaaaaaagttacattactgcaataatcgataagtg

SEQ ID NO: 14723 - DNA, 2153 bp, Zea Mays
tcccccgatccaatctgtcgtccagacatcagcgaaatgacgacctgcttgccgtctgccgctctgagaactccaatttggacgcgccgtttgaccgaatactgatctccgcattccaacgctcaaacaccacccgggcggctgcgcccccaactccccccgtccgcccaacgcccatcccccaaaaggctccgatctgattccgagccccgccaggcgccagccttctcccgccgcgtcgcacgtgcgccccaccccatactcacgctcgagccgcgatcccatccgggggttccgatgcggtcgccggcgctcctggccgccgccctagccgcggtggcactcctagctgccggtgccggattcgcggtggccgcgacggaggaggcctacgtcacgctactgtacggcgacgagttcgtgctcggcgcgcgcgtccttgggaagtccctccgcgacaccggcacgcggcgcgacatggttgtgctcgtctccgacggcgtttccgagtactcgcggaagctcctacagacggttggatcgtgaatcgtataacgttactggctaatcctaatcaatttaggccaaagaggttttggggcgtctacaccaagctgaagatatttaacatgacaagctacaaaaaagttgtttaccttgacgcagatactatagttgtgaaaagtatcgaggatcttttcaagtgtggcaagttttgtggaaacttgaagcattctgaaagaatgaattctggtgtgatggttgttgaaccctctgaaactcttttcaatgatatgatcaaaaaaatggatcaattgccttcttacacaggaggggaccaaggttttctaaattcatattattctgattttgccaactcccgtgtctatgagccagactcgcctttaactcctgaaccagcgacacaacgcctttctaccttgtataatgctgatgttggtctttacatgctagcaaacaagtggatggttgatgaaaaggaattaagaatcatccattacacactgggtcccctaaaaccctgggactggttcacagcgtggcttgtaaaacctgttgaaacatggcaggatattaggcaaaaacttgaagaatctcttccaggaactggtgggggaaggaaccctcatgaccagctggttgtcaaaatattgttcattctcccattttgcttgctgctatttggttattaccaatcatgttttcagacagacaaggagttggtaagtataagatctctatgtgcttttgctagaagagctcgccataaatacaagtctgaagagtcacttccatcttattcagtgttatcaaatggacatttgaaactaccttcttattttggggcaattgcggtgttagtctgcttcgtgtctgctggtttctctcttgcatttgctttcgctatcattccacggcaggttatgccatggacaggtttgctactgatgcttgagtggacctttgtggcattcttcttattgtttgggagttatctccgttttgtctaccggtggggaagtatcagtgcaaaccatgtgggatttagcaattctgactcatcggagaatcatatgggtccaggccatcagcgaaatatgtctgactgcgacatggatgcaacattttactggatagggatggcatctatagctactattactgtactgttaccgactatcttgggcataactgcattgttcacaaagctaggattaatggtcgctggtggtattgtgctggcatcttttatgacatacgcagcggagcatcttgcaatctcagtcttcaacaagggtcaaaaatacaggaatgcgtcaagaactcgaagcttttgtttttaacgtttaagtaaaaaatccttgttgtattgtaggtagttttgtacacaaaaagaatgatgattcatttttaacacgtggcttcctgcccatggcccctttttttgtagcgctgatgtcacgccaacttgtggtaaataggtttccgacattgtttctgtagcacagttggcatgaagattacagacatgttttgggatcgtgacccgcttttactcgcttatattgatgtttatggtgagattgtagtatatcagaaaaaagttacattactgcaataatcgataagtg

SEQ ID NO: 14724 - DNA, 2140 bp, Zea Mays
tcccccgatccaatctgtcgtccagacatcagcgaaatgacgacctgcttgccgtctgccgctctgagaactccaatttggacgcgccgtttgaccgaatactgatctccgcattccaacgctcaaacaccacccgggcggctgcgcccccaactccccccgtccgcccaacgcccatcccccaaaaggctccgatctgattccgagccccgccaggcgccagccttctcccgccgcgtcgcacgtgcgccccaccccatactcacgctcgagccgcgatcccatccgggggttccgatgcggtcgccggcgctcctggccgccgccctagccgcggtggcactcctagctgccggtgccggattcgcggtggccgcgacggaggaggcctacgtcacgctactgtacggcgacgagttcgtgctcggcgcgcgcgtccttgggaagtccctccgcgacaccggcacgcggcgcgacatggttgtgctcgtctccgacggcgtttccgagtactcgcggaagctcctacaggccaaagaggttttggggcgtctacaccaagctgaagatatttaacatgacaagctacaaaaaagttgtttaccttgacgcagatactatagttgtgaaaagtatcgaggatcttttcaagtgtggcaagttttgtggaaacttgaagcattctgaaagaatgaattctggtgtgatggttgttgaaccctctgaaactcttttcaatgatatgatcaaaaaaatggatcaattgccttcttacacaggaggggaccaaggttttctaaattcatattattctgattttgccaactcccgtgtctatgagccagactcgcctttaactcctgaaccagcgacacaacgcctttctaccttgtataatgctgatgttggtctttacatgctagcaaacaagtggatggttgatgaaaaggaattaagaatcatccattacacactgggtcccctaaaaccctgggactggttcacagcgtggcttgtaaaacctgttgaaacatggcaggatattaggcaaaaacttgaagaatctcttccaggaactggtgggggaaggaaccctcatgaccagctggttgtcaaaatattgttcattctcccattttgcttgctgctatttggttattaccaatcatgttttcagacagacaaggagttggtaagtataagatctctatgtgcttttgctagaagagctcgccataaatacaagtctgaagagtcacttccatcttattcagtggtgggttcatcttctgcatttggtatttcaagccaaaggttatcaaatggacatttgaaactaccttcttattttggggcaattgcggtgttagtctgcttcgtgtctgctggtttctctcttgcatttgctttcgctatcattccacggcaggttatgccatggacaggtttgctactgatgcttgagtggacctttgtggcattcttcttattgtttgggagttatctccgttttgtctaccggtggggaagtatcagtgcaaaccatgtgggatttagcaattctgactcatcggagaatcatatgggtccaggccatcagcgaaatatgtctgactgcgacatggatgcaacattttactggatagggatggcatctatagctactattactgtactgttaccgactatcttgggcataactgcattgttcacaaagctaggattaatggtcgctggtggtattgtgctggcatcttttatgacatacgcagcggagcatcttgcaatctcagtcttcaacaagggtcaaaaatacaggaatgcgtcaagaactcgaagcttttgtttttaacgtttaagtaaaaaatccttgttgtattgtaggtagttttgtacacaaaaagaatgatgattcatttttaacacgtggcttcctgcccatggcccctttttttgtagcgctgatgtcacgccaacttgtggtaaataggtttccgacattgtttctgtagcacagttggcatgaagattacagacatgttttgggatcgtgacccgcttttactcgcttatattgatgtttatggtgagattgtagtatatcagaaaaaagttacattactgcaataatcgataagtg

SEQ ID NO: 14725 - DNA, 1350 bp, Zea Mays
caatacaaacaaacgaagatccgccatccggctccgcttatgtgatagcccggcccaacactacaactgcctctcggccctctcctcggcgacgccactactcctgcctcacgccgccgctcaaaccgcagaagagagaagagaagcacgcccaaaaattccgaggttttcacctcttggagcgcaccaacaccacccggagaccggagcgactcgccaccggcgcggaaaaggtacgaatcagagatatattgccgacccgtgcgggctaaggcctagttgtgcgcctttcacttagggtttttgtttgcctgcaagtttattttttctgatttactagttcctagcttccgtttagcatcaggagggcggaggctcgatggcggatgagaatgctggaaagaaagaggaggaggaatttagcacaggccctctgtcagtcctaatgatgagtgttaagaacaacacccaggtcctcatcaattgccgcaacaacaagaagctgcttggccgtgttcgtgcttttgatcgccactgtaacatggtgctcgagaacgtgcgtgagatgtggacagagatccccaagactggcaagggcaaaaagaaggctctgcctgtgaacaaggatagattcatcagtaagatgttcctcaggggcgactcggtcatcatagtgctgaggaacccgaagtgatcgcccaaccagtcaccttgcagcagttatgccccttctctgggttcacggaatccgtgcctctgttgaaaaaaactgtagcttatgtatgtcttggcggattagctggttatcttgaactgacgttcatgtgacatggcaatggcacatgaacatacgtttcatgagtttggttgttaattggcgcttgcagtactttgatccctgaatgttgagattgcacttctgcttattgtcttgccccattgcgtgacgtggaatacttgctaaatggcttgtatgacaaagtcggtgtggctgcagcattggggcgaacgagcgcagaagggagcaggcgacaaagtggagagcacagaggctggcgctgacggagtctagcgctccttttttgtgtgacttgtgtccgttacagcggtaacataaacagaattagggtctgtttggtttgtggctaaatatgccacactttgcctaaggttagtcgtttgaattgaataactaatcttaggcagaaaagttaggcaaagtgtggcaactgagtcagtgaaccaaacatgcctaggctgttttagggagccgtggagttgaattgttggacgggatgatgtatgtgtgctgcagttttgcctttatatacttactattttttttccaat

SEQ ID NO: 14726 - DNA, 683 bp, Zea Mays
cgtccaatgacaaattaacggttcagattagctatgacccacaagacaagtctgccttcgtcgtcctcaaccctcgtagtcatagagcatcagaggcgccgctcctttcggatctgggcgaggtgagctgcggcgccggacgtcgcggggaagaggatgaactggatcgggcgcaagatccacctctacaatgtcaccatcggcctctacatgctcgattgatattttgatggtttgcctcttctggtacattctccgctatctccttgggttcttccaaagtaatgtgaagactcttttccaagaggggaactaccttgggcaaggcagtacataaccattgtcaaacaagatctgcttatgatcatttgccccatgtaattccatgtgtttaattagttgttaactacttaactgaggagctgagaagaagtaatttaagcaagtgttacagtgtagccatcgtctgtatcttccctggaagccaatagtctctagtgttaatttcaatggaataaaaaaaatacgttgtgcaagttttgattaatttttttttttggttagttgtttccttgctttgctggcctgcggactttacttgtaccatctgttgagttgatcactgaagtacgaatcagtaacctgtgatatctgatgtctattgcgttcgtctcaagtttttg

SEQ ID NO: 14727 - DNA, 1804 bp, Zea Mays
gttcagattagctatgacccacaagacaagtctgccttcgtcgtcctcaaccctcgtagtcatagagcatcagaggcgccgctcctttcggatctgggcgaggtgagctgcggcgccggacgtcgcggggaagaggatgaactggatcgggcgcaagatccacctctacaatgtcaccatcggcctctacatgctcgattggtgggagcgctacctcttcagtatccttcttccgattgcttctctcgctccctcccctcctgaaaccagttgattcatttagcacccagctcagtctagttgtcttctcctggttttgctttgctagatctgagaaaggtgtgaggatatatcctgcgatgtgtcgaatttagatatctgtcactgtccgtgcgcattccgtttacaccctttcaaccgcggcaatgtctcatcttcagtttttatagttggcaaccagaatactagagcctcctttgaggaatttttagtaataagattatagtttcgttttcgtagcactaaaacattcagatattatgaatttcctagcaatttttatattacctaggaagttcaggaaattaagattgccctgcagacgtttgtctgccaatcattagcagagcttcgtcctagccttgaagtgatccagacttgaagctcaatgttagtaagggggtgttgaatgcactagagctaatagttagtggctaaaattagttagagacatccaaacaccctagctaatagttcaactatgagctatttttagtaaattagttaatagttagctagatatttgttagctagctaatttcactagcaattttttagccaactactccctccgtttctttttattagtcgctgaatagtgcaattttgcactatccagcgactaataaaaagaaacggagggagtaactattaactctagtgcattcaaacaccccctaagtattttgggaattgcagagaaaaacataagaatgcaaaaatatcatagcacaacactgcaatgttggggacatgaaccttgtttaaaacaaattattcctggtgtccctgagtctgtcacactaaccctgtcttgatgattgtgctcaatctgcaactgtggttatccttcagttaagggtgccatgctgcatgttcttcctggtcactttgaacctgcaatgccaagttcttcaaaattcaaatgcttgcattcatgtcccatcatttgcaactttacctccacagtacagacaatttcggcaaacaagacaatgtcattacagtgcccctacttcctcgaccctaaaactgttcaagaaattttacagccttctatttaatattttgatggtttgcctcttctggtacattctccgctatctccttgggttcttccaaagtaatgtgaagactcttttccaagaggggaactaccttgggcaaggcagtacataaccattgtcaaacaagatctgcttatgatcatttgccccatgtaattccatgtgtttaattagttgttaactacttaactgaggagctgagaagaagtaatttaagcaagtgttacagtgtagccatcgtctgtatcttccctggaagccaatagtctctagtgttaatttcaatggaataaaaaaaatacgttgtgcaagttttgattaatttttttttttggttagttgtttccttgctttgctggcctgcggactttacttgtaccatctgttgagttgatcactgaagtacgaatcagtaacctgtgatatctgatgtctattgcgttcgtctcaagtttttg

SEQ ID NO: 14728 - DNA, 772 bp, Zea Mays
gttcagattagctatgacccacaagacaagtctgccttcgtcgtcctcaaccctcgtagtcatagagcatcagaggcgccgctcctttcggatctgggcgaggtgagctgcggcgccggacgtcgcggggaagaggatgaactggatcgggcgcaagatccacctctacaatgtcaccatcggcctctacatgctcgattggtgggagcgctacctcttcaacaatttcggcaaacaagacaatgtcattacagtgcccctacttcctcgaccctaaaactgttcaagaaattttacagccttctatttaatattttgatggtttgcctcttctggtacattctccgctatctccttgggttcttccaaagtaatgtgaagactcttttccaagaggggaactaccttgggcaaggcagtacataaccattgtcaaacaagatctgcttatgatcatttgccccatgtaattccatgtgtttaattagttgttaactacttaactgaggagctgagaagaagtaatttaagcaagtgttacagtgtagccatcgtctgtatcttccctggaagccaatagtctctagtgttaatttcaatggaataaaaaaaatacgttgtgcaagttttgattaatttttttttttggttagttgtttccttgctttgctggcctgcggactttacttgtaccatctgttgagttgatcactgaagtacgaatcagtaacctgtgatatctgatgtctattgcgttcgtctcaagtttttg

SEQ ID NO: 14729 - DNA, 752 bp, Zea Mays
gttcagattagctatgacccacaagacaagtctgccttcgtcgtcctcaaccctcgtagtcatagagcatcagaggcgccgctcctttcggatctgggcgaggtgagctgcggcgccggacgtcgcggggaagaggatgaactggatcgggcgcaagatccacctctacaatgtcaccatcggcctctacatgctcgattgacaatttcggcaaacaagacaatgtcattacagtgcccctacttcctcgaccctaaaactgttcaagaaattttacagccttctatttaatattttgatggtttgcctcttctggtacattctccgctatctccttgggttcttccaaagtaatgtgaagactcttttccaagaggggaactaccttgggcaaggcagtacataaccattgtcaaacaagatctgcttatgatcatttgccccatgtaattccatgtgtttaattagttgttaactacttaactgaggagctgagaagaagtaatttaagcaagtgttacagtgtagccatcgtctgtatcttccctggaagccaatagtctctagtgttaatttcaatggaataaaaaaaatacgttgtgcaagttttgattaatttttttttttggttagttgtttccttgctttgctggcctgcggactttacttgtaccatctgttgagttgatcactgaagtacgaatcagtaacctgtgatatctgatgtctattgcgttcgtctcaagtttttg

SEQ ID NO: 14730 - DNA, 757 bp, Zea Mays
gttcagattagctatgacccacaagacaagtctgccttcgtcgtcctcaaccctcgtagtcatagagcatcagaggcgccgctcctttcggatctgggcgaggtgagctgcggcgccggacgtcgcggggaagaggatgaactggatcgggcgcaagatccacctctacaatgtcaccatcggcctctacatgctcgattgtacagacaatttcggcaaacaagacaatgtcattacagtgcccctacttcctcgaccctaaaactgttcaagaaattttacagccttctatttaatattttgatggtttgcctcttctggtacattctccgctatctccttgggttcttccaaagtaatgtgaagactcttttccaagaggggaactaccttgggcaaggcagtacataaccattgtcaaacaagatctgcttatgatcatttgccccatgtaattccatgtgtttaattagttgttaactacttaactgaggagctgagaagaagtaatttaagcaagtgttacagtgtagccatcgtctgtatcttccctggaagccaatagtctctagtgttaatttcaatggaataaaaaaaatacgttgtgcaagttttgattaatttttttttttggttagttgtttccttgctttgctggcctgcggactttacttgtaccatctgttgagttgatcactgaagtacgaatcagtaacctgtgatatctgatgtctattgcgttcgtctcaagtttttg

SEQ ID NO: 14731 - DNA, 1813 bp, Zea Mays
ggcgggtcccaccaccgccggccctgactagtgtatatataaccgcgaagtggtggtgcaaaccgagtgcagtaaagcttgcgacgctgtagtgggatctctctccgttctactgtgctgtgctctgtgcatgccaccattgctgctgcagagaaggtgaacacaaacagggagcgctagtggtagatggacgcagcagaacatcacgtggaggagaccaaggaggaggaagcagcgcaggtgatggagacgacgacggcgcactctcggttcgggaggatctgcgtcttctgcggaagcagccaggggaagaagaagagctaccaggacgctgccgtcgagctcggcgaggagctggtctcgaggaacatcgatctggtctacggtgggggaagtgtcgggctaatgggcctggtctctcgagcggtctacaatggagggaggcacgtcatgggggtgattcccaagaccctcatgccgagagaggtactgtatgtaaccacgctctcacgcctccctaaaacccctgtcattgtttaatcgcatgcaatgattcccatgaattcgacaaagcatggtagatcagattctttaatttgtttttttcctagtacttgtatgttatgtttagttttacaatgcaagtagtttttttttatatttacatgtgaaaatagattttctttctttctctgaaatgaaaataaggatgcaggcttaattatcttctctggactgaaagaccacgctgaatgttcagtgaaaatccgggtttccttttcccctggtgatagatgagatcttgtggcatcttgctgatcctgactgctgcttgcctgcttctagtgtctgccccttcgtcctttaagcagataatgacttttgttaacaaaaatagatgtccctcacatttccctttttgtcccccacaacaacaccatgattacttctcctgaacaatgcatgcacacctagggtaaaataaaatactctcagtacagccacccacccttaggctatggagtgtgttgattacattacaggcatgcagcatccgtgtttgcttgtgtgtgcagataacaggtgagacggttggggaggtgaaggctgtggcaggtatgcatcagaggaaagctgagatggccaggcaatctgacgccttcatagcacttcctggagggtatggaacccttgaggagctgctggaagtgatcacctgggcgcagcttggcattcacgacaagccggttggcctgctaaacgtgaacggatactacaactccctgctgtccttcatcgacaaggccgtagaggaagagttcatcagcccgactgctcgccacatcgtcgtcctggcaccgacgccaaaggaactgcttgacaagctagaggagtattccccgcggcacgagaagctaggtcgtgccgaagacgaggtgggagacggagcagctgatgagcaactgcaagagctgcgaggtcccgccggggctcaagctcaaagatgggaagccgatcgtccaggcgcagagagctaggaaccatgctctgaattagtgccagtagcacgcgcctaatgtcgggatatcgactggtcaatgtaatctggtattggctatgtatcagctgtatttattctaggagatgagatttttatgtgcgttatgcaattcgagtttctagtagcagatgcaaatgaggaggtgttactggactatcattagtgtgtgcactgagcgggctggcagtcgataaccgcgtgcagcgctgactcctgaggcagatcagaaagttttcagaagcaaaatgtttc

SEQ ID NO: 14732 - DNA, 1094 bp, Zea Mays
ggcgggtcccaccaccgccggccctgactagtgtatatataaccgcgaagtggtggtgcaaaccgagtgcagtaaagcttgcgacgctgtagtgggatctctctccgttctactgtgctgtgctctgtgcatgccaccattgctgctgcagagaaggtgaacacaaacagggagcgctagtggtagatggacgcagcagaacatcacgtggaggagaccaaggaggaggaagcagcgcaggtgatggagacgacgacggcgcactctcggttcgggaggatctgcgtcttctgcggaagcagccaggggaagaagaagagctaccaggacgctgccgtcgagctcggcgaggagctgataacaggtgagacggttggggaggtgaaggctgtggcaggtatgcatcagaggaaagctgagatggccaggcaatctgacgccttcatagcacttcctggagggtatggaacccttgaggagctgctggaagtgatcacctgggcgcagcttggcattcacgacaagccggttggcctgctaaacgtgaacggatactacaactccctgctgtccttcatcgacaaggccgtagaggaagagttcatcagcccgactgctcgccacatcgtcgtcctggcaccgacgccaaaggaactgcttgacaagctagaggagtattccccgcggcacgagaagctaggtcgtgccgaagacgaggtgggagacggagcagctgatgagcaactgcaagagctgcgaggtcccgccggggctcaagctcaaagatgggaagccgatcgtccaggcgcagagagctaggaaccatgctctgaattagtgccagtagcacgcgcctaatgtcgggatatcgactggtcaatgtaatctggtattggctatgtatcagctgtatttattctaggagatgagatttttatgtgcgttatgcaattcgagtttctagtagcagatgcaaatgaggaggtgttactggactatcattagtgtgtgcactgagcgggctggcagtcgataaccgcgtgcagcgctgactcctgaggcagatcagaaagttttcagaagcaaaatgtttc

SEQ ID NO: 14733 - DNA, 1677 bp, Zea Mays
ggagaacaaccaccgcctctctcccccgtctatctcttcttggagcctggagaagaggaaggatcagggaacgggggaagaggttgctgccacagctcaggtctcaagtttggattcagacaagtagacaaacaccagttggttaagatggcagctggtttccagatcggtgtgatcgggtcacttgcactctctgttgcatcttcagtttccattgtcctctgcaacaaagctctcatcagcacacttggttttccattcgctacaacattaacaagctggcatctgatggtgaccttctgcaccctccatgtggcacagcgcttacgtttcttcgagcccaaggcaattgatggacagacagtcatactctttgggttgctgaatggcacgtcaattggtcttctcaatctgagtttaggattcaactccattggattctaccagatgacaaaattggcgatcatacctttcactgtgctattggagactatcttcttgaagaaaagattcaggtttgagagcagttttctcacaatattgaacctcatttatggtcaaaggaatgatagaaaataacttaagtaaacactaaattcttctggatccattttgttcttttgattcaggagaacaatcaagtttcagatatttccaaataaactcttggatcaactgattgattaaatgtgtgtatgactttctgggcctaaatggtccctgtgatattaactgctatttccactgagctaataccaattcaatgatgtgcagcgagagtatcaagctttctcttctggtcttacttcttggagtaggaattgcttcagttactgatctcaagctaaatctgcttgggtccatcctttctggcctcgccattgccaccacctgtgttggccaaattctcacaaatacaatacagaagaggttgaaggtctcctcaacgcagcttctgtaccaatctgcgccttaccaggcggcaattctgtttgcatctgggccttttgtagatcaactccttactaaccggagtgtctttgcacacaaatactctgctacagttctgggtttcattgtcctctcttgcttgattgcggtgtctgtgaacttcagtacatttcttgtgattggaacaacatccccagtgacgtaccaggtgcttggtcaccttaagacatgtctggttctatcatttggctacactctattacatgatcctttcactctaaggaacatattgggcattctaattgccatatttgggatggcactatactcctatttctctgtaagagagggcaagaagaagtcagcaaatgatgccctgccagtttcacagatgccagataaggaggttgaaccgcttttggcaactaaagacagcaatgacaccgagaaagcaaatggtttatctcacgactgctagggcttttcttgtagtttaggtctagtatgaactgcccttagaatttaatggacttggaaagccattcttttcattcttgatttcctttttaggaaaggaagattttaaaatttgtagagaatgtgtattttgacgttaaagttattgtttgattatattctacacacagcagttccagctgaagttttattagtgcagatctcaaactatactttagcagatgtagttctctaccaagctaatctaac

SEQ ID NO: 14734 - DNA, 1695 bp, Zea Mays
ggagaacaaccaccgcctctctcccccgtctatctcttcttggagcctggagaagaggaaggatcagggaacgggggaagaggttgctgccacagctcaggtctcaagtttggattcagacaagtagacaaacaccagttggttaagatggcagctggtttccagatcggtgtgatcgggtcacttgcactctctgttgcatcttcagtttccattgtcctctgcaacaaagctctcatcagcacacttggttttccattcgctacaacattaacaagctggcatctgatggtgaccttctgcaccctccatgtggcacagcgcttacgtttcttcgagcccaaggcaattgatggacagacagtcatactctttgggttgctgaatggcacgtcaattggtcttctcaatctgagtttaggattcaactccattggattctaccagatgacaaaattggcgatcatacctttcactgtgctattggagactatcttcttgaagaaaagattcagcgagagtatcaagctttctcttctggtcttacttcttggagtaggaattgcttcagttactgatctcaagctaaatctgcttgggtccatcctttctggcctcgccattgccaccacctgtgttggccaaattgtatcctacattaaatttaatagtaatacaattatcaatagtctcaaaactgtcaggtgaaagcaaatcaaacaaatatattttagttctttccaacccacttctcgttgcaatgtacattgataaagtagttcattattaaaaaaacatacaaggacccagtactaaaaatcttctagtttgagccactttatgaatcacttggcatgaatctgccacacgcttcgtataccagtgctacatgctaatccttgaccaaatttttgtttggacgaagctcacaaatacaatacagaagaggttgaaggtctcctcaacgcagcttctgtaccaatctgcgccttaccaggcggcaattctgtttgcatctgggccttttgtagatcaactccttactaaccggagtgtctttgcacacaaatactctgctacagttctgggtttcattgtcctctcttgcttgattgcggtgtctgtgaacttcagtacatttcttgtgattggaacaacatccccagtgacgtaccaggtgcttggtcaccttaagacatgtctggttctatcatttggctacactctattacatgatcctttcactctaaggaacatattgggcattctaattgccatatttgggatggcactatactcctatttctctgtaagagagggcaagaagaagtcagcaaatgatgccctgccagtttcacagatgccagataaggaggttgaaccgcttttggcaactaaagacagcaatgacaccgagaaagcaaatggtttatctcacgactgctagggcttttcttgtagtttaggtctagtatgaactgcccttagaatttaatggacttggaaagccattcttttcattcttgatttcctttttaggaaaggaagattttaaaatttgtagagaatgtgtattttgacgttaaagttattgtttgattatattctacacacagcagttccagctgaagttttattagtgcagatctcaaactatactttagcagatgtagttctctaccaagctaatctaac

SEQ ID NO: 14735 - DNA, 703 bp, Zea Mays
gccttctcattgaccactcgaccccttcccttcatacgtggcttcttcttcttttttgcctcgagctaccacttggtctcgatcttcccggccccacacacaacaaagcggggcgatggaccagcacgaccacgagatggagcagaaggggtgcctctgccggatcaagaactgcgccattgaactcttgtcgatggaggaggacctggagacggacgacgaggagtcgtgggacctcgttgggagggacctccggctcaaggccaccttcctgtgcatcgacctcagccgcttgatcgccttctgccagggcgaagagcacaagaaggcgctcactgtcgtcgccaacaagttcttctactccatggatgagcttggcgacgcagtggagagcagaagcctcccgctgacgcaggtgcgctacggcgacaccgccgacgcgctccgcgaggtggtcgccgtcctcgggccgtccctgtagctgggcggcctgcacgaagcggaggaatagagaaatccagatgagatcacagatgcgtcccccaccccagcacatcttattataggataggattaggatatagacagacaagacagtacggtgaggcgggaaggatgatgagccagcgcggcagaaatgctgtgtgcgatcatcttcacctgtgtggctgtgtatacatgtctcaaatttctgttgccgtct

SEQ ID NO: 14736 - DNA, 1947 bp, Zea Mays
cgcaaatataatacctccagctagcagcatacatcctcaatctagcaatgttacattattagtaacagtagatcaattatctgaaataatatccatgtaactatcttcatcaatcggaacttacaaattcatcaacacatgattttacagcccattgttttttctagttgggagttgtcagcttaagtgttgaattgcactgccacttgtcagttactcagaggaatttggcaaaatgggtcactctaacttgccgctctgcaaaacacaccgcgtctatctgtattcgtaaaaatgggtcgctcaagtctgctcgctcgccagaagaggtcacagacacatttggggcacctggcaagtgggcccgcgaaggcttgtccctattatgcccttacagtaactccacgccgtctgtttcccttcctcttcttctctggacgggaccgagcatttccttctctgtcttcgcagatcggagtaacctacagtatacacaaagccctcctcgcttgcacaggccaaccccatggtctacgatggtggcgaccagcgtgggcggggctcgacgaccaccgtctccagcaccagctcgccggagctcaggccgatgccgcaccttaatctgctctgctttgagggtccagttctgaaagaattcgtcgctgacccatctctgcttaaaaaaatacacaaatagttttggacctgtgatttctttgggtcgaggaccttgttctcctggctgcacagactggaattcggccccttggttccactcttcgacgacctccgtgtcgaatttgagacgaacaatgtctcgatcatctcttcgttcactctactagttgaaggaactttagttaaggtctaatcctcttcacataatcacatttcactaagatttaagttttaagcactgatatttctaaacaacaatttgtttcttgggcctgcttcatttttagtcagtttagaacagcttcatcaggggctaacaaggtgcaggctgcagagcaatcttgcaagaaacagccattttctttgttttagcttaggactataatgggtgctgtgctccttccaattgctcaagaaagacacgagtcgttatttatgtattcagggattggtgtgtattactttattttgtaacattcacgtaattagcatcttgatcttcagtggatcaaatactatgtattcagtaaacatcagtgagattttctttctatttttgtgttgcagtatggtaggctaaccttgaagtatgcattttctgttagatcattttgttgcgcttcatgatctgtgatacagatgttagcagtttcgtttagaaaaaaacttacatcatcataactctatcgacctattaattctacagaagtctgggatagaagtttcaagctgcatagaagtctgggattttctgagtgtggattcacagacatatattttcacagacactctctcagttatccaaacattgtcagtcagtttagatgaaagatcaaatgggaaaaatataaaagcattgaatgaattccatcaggcccgatagtttggacagtctagatttaacaatgaatttctgttttttgtaggcgtcaagcattttgggtagcaaagcaaatactgcaattgggaatgggagacacgtttgatgactggcttgttgacaaaatccaattacttaggtaagggaggataattgcttttgctgttaagcgcattgaacaagtaagtctcagattgtatatttagaaaagagagggagagggagggaggttcagacaaccaacagtctataaagggataaatattatgtgtgcagttaggcagtctcatacctgttatcaatggattttttgtgcaggatcaccccccataatttagtctgtattttctctgcgtacagattctctggcctgatggaattttcatgac

SEQ ID NO: 14737 - DNA, 600 bp, Zea Mays
aacacatccaatggcagtgcctatcacctggctgatgaacatggaccttggcgaggctagagtcaggtacccggtcttgaagtcttgcatcagatcagaagctgttcccacaatgctcatcatgacaccgcatgcagctaacccaacaagcactccgccatgtgaagcccctgcccatgcaccgatgacaaagattgcaagcttgccataggtgctggcgagggaccaatctgttaggccagacccataggcattgcagaaggctagtataggtgcgaagatgtatgccacaaaaatctggtaccacttgatctgagggatgatgagagggaggcagccgatcgatgtagctgccagaacgacatagccacccaatgcaactgtcttgggaatctgatccttaacgaacagctcaatgcgacgcttgtcgtcaaatgactcggtttcaactgtggcaggaggggtcatattgtcagacacaggaagtctgtttgcatgtttcttccaatacattgatattaatgcgcctattgtgtgaccgaatactttcaagaagttgtacaggccgtccccaagaattacggctatggttataaacac

SEQ ID NO: 14738 - DNA, 1968 bp, Zea Mays
cggggagcccagtcgagcgccggggaagacgacgcagacaggcgcggtgcagacagtcggccgtggatccgttctaagaaacggactgccgtaacaacgatttgagcgccgactaaatcttacacagataccgaaattccaaagttcaacggattataatactaaaattccaattacgttgttcgggatatatattttcagaagcccaatgttaatgatatcacgtttccaaaaagctcagccatggcggcacgacgccacctgactccgttgaaagaaacccaccttggccacctctctgccccaccatgcggccccctggtcccatttgtctgacactaccccctacctccccgtcccaacctcgtctaatcgctgcggcgccagtgcccaaatctaaaccctagcgccgccaccgccatgctgcgccgcatcgccgccgtcgccccgcgggccttcttctcctcgtcacccccgcacgccccgtcgcttccggcgtcgggctacatcccgcgccgcgagtacggcctggtgcccatggtgatcgagcacacctcccgcggggagcgcgcctacgacatcttctcgcgccttctcaaggagcgcatcgtctgcatccatggccccatcaccgacgacacggcctccctcgtcgtcgcccagctgctcttcctcgagtccgagaaccccgccaagcccgttcacctctacattaactccccggggggcgtcgtcacggcgggcctcgccatctacgacacaatgcagtacatccgctcccccgtcaccacgctctgcatcggccaggccgcctccatggcgtcgctactcctcgccgcgggggcgagcggagagaggcgggcgctgccgaacgcgcgggtcatgatccaccagccctccggtggcgcgtcggggcaggcctcggacatcgccatccacgccaaggagatcctcaaggtgcgcgaccggctcaataagatctatgccaagcacacgggccaggccatcgaccgcatcgagcagtgtatggagagggacatgttcatggacccggaggaggcacatgaatgggggctcatcgacgaggtcatcgagcaccgccctgtctctcttgtgtctgatgctgttggcagtgatccgccaaacctcggtggaggcggaactgaggtgaataaagggacggacgagccatctccagcgtgatggcattgggcagtcacaagcacttgatagctttctataatgagaagctgatttcatagagttttctaccgagacgggagaactgagtgcagcttgcattttatctctgctatatgggattgagtgttggcggactaagagacgacatatccaacaactaagtgtcgcagagatgcgtatgttgtgttggatatatgggcacacaagattggaccgagtcagaaacgatgacatacacgatcggctagtagtaacgccaattgaaaaaaacttattcaacaccggttgagatggtttgggcatgtccaccagagaccccagaggcaccgctgtatagagacatcataagacgggacaataatgtgaagagaggtagaggtcgaccaaatttgacatgagaggaggcaatcaaaagggacttgaaggaatggattatcccaatggagctgtgtttggatagaggtgcttggaaagaagctatccacgtgcctgaaccgtgattaggtctttttccttttagtgctctcaaaagctttttcccttctctttctttctctttttggtgacatgttgggtttcaactttagcctactctaacttgtttgggactaaaatgctatgttgatgttggaggaactggatactgaattttctgtgtcagaaactaagaagggaccttggcattattatttttaagatagattataaaccatatgtaacattacccaataacaataatctttttaactgcttctcttattccat

SEQ ID NO: 14739 - DNA, 2458 bp, Zea Mays
cggggagcccagtcgagcgccggggaagacgacgcagacaggcgcggtgcagacagtcggccgtggatccgttctaagaaacggactgccgtaacaacgatttgagcgccgactaaatcttacacagataccgaaattccaaagttcaacggattataatactaaaattccaattacgttgttcgggatatatattttcagaagcccaatgttaatgatatcacgtttccaaaaagctcagccatggcggcacgacgccacctgactccgttgaaagaaacccaccttggccacctctctgccccaccatgcggccccctggtcccatttgtctgacactaccccctacctccccgtcccaacctcgtctaatcgctgcggcgccagtgcccaaatctaaaccctagcgccgccaccgccatgctgcgccgcatcgccgccgtcgccccgcgggccttcttctcctcgtcacccccgcacgccccgtcgcttccggcgtcgggctacatcccgcgccgcgagtacggcctggtgcccatggtgatcgagcacacctcccgcggggagcgcgcctacgacatcttctcgcgccttctcaaggagcgcatcgtctgcatccatggccccatcaccgacgacacggcctccctcgtcgtcgcccagctgctcttcctcgagtccgagaaccccgccaagcccgttcacctctacattaactccccggggggcgtcgtcacggcgggcctcgccatctacgacacaatgcagtacatccgctcccccgtcaccacgctctgcatcggccaggccgcctccatggcgtcgctactcctcgccgcgggggcgagcggagagaggcgggcgctgccgaacgcgcgggtcatgatccaccagccctccggtggcgcgtcggggcaggcctcggacatcgccatccacgccaaggagatcctcaaggtgcgcgaccggctcaataagatctatgccaagcacacgggccaggccatcgaccgcatcgagcagtgtatggagagggacatgttcatggacccggaggaggcacatgaatgggggctcatcgacgaggtcatcgagcaccgccctgtctctcttgtgtctgatgctgttggcagtgatccgccaaacctcggtggaggcggaactgaggtgaataaagggacggacgagccatctccagcgtgatggcattgggcagtcacaaggtgcaatccttttttgtgttcctgtagctgtcttattggagttataaggtttaattcgtacatgagggtgaataacttaattttatgtctgctgggctaatccactagcaacactgttgttttgctactttattaattgatctgttgctgataatgagtgctctctggtatgagccctcatcagtggtgatatatgcattgttatagatttgttcgtctgaaatcaaacagtgctgtttaaaggataaaggccacagccttgaaaaattatgttgtattttgtctaaggctaattcagagtgtcatttctgtattcaacaaagattcgaattttctaattatcactgcatgttgtctggtatttttagaattttagcggtgttgtgaatttagcggtatatgatgttaatattttaagttagttgaacagttcatcggtattgtgaaatatctgaataagaggctttctcctacttgttttttttcatagcacttgatagctttctataatgagaagctgatttcatagagttttctaccgagacgggagaactgagtgcagcttgcattttatctctgctatatgggattgagtgttggcggactaagagacgacatatccaacaactaagtgtcgcagagatgcgtatgttgtgttggatatatgggcacacaagattggaccgagtcagaaacgatgacatacacgatcggctagtagtaacgccaattgaaaaaaacttattcaacaccggttgagatggtttgggcatgtccaccagagaccccagaggcaccgctgtatagagacatcataagacgggacaataatgtgaagagaggtagaggtcgaccaaatttgacatgagaggaggcaatcaaaagggacttgaaggaatggattatcccaatggagctgtgtttggatagaggtgcttggaaagaagctatccacgtgcctgaaccgtgattaggtctttttccttttagtgctctcaaaagctttttcccttctctttctttctctttttggtgacatgttgggtttcaactttagcctactctaacttgtttgggactaaaatgctatgttgatgttggaggaactggatactgaattttctgtgtcagaaactaagaagggaccttggcattattatttttaagatagattataaaccatatgtaacattacccaataacaataatctttttaactgcttctcttattccat

SEQ ID NO: 14740 - DNA, 2509 bp, Zea Mays
ctcatactccactcgtccatcccaatccacctgttcccaacttgaacttcccatataatagtcccatctcttggcacccggcccgacgttcggagcctcctgccgcaatttttttttgaggctggtctgtttcgtgacgtcccgcgagaagagaacccccgtggcccctggccgcgacggagcggtcagaagcagcggcggccggcgcggtttcggtttcctggttggcccgagaattccgattcctctcctgatttgtgtacatatagttgcctggaggccccgtcgctgtccccgcgctctctgtctcctcacgcttggctgttcgccgcggcgccaccgtcggaggcagctgctaatcgcgcgtccggtggccgcgttgcagcggcggagcgtctcttgttgtgcagtgctgcagcggattgtcgcggcctgcccgcggtgaggccggcatccctcttcggaaggcgtgctcgggcggggccagcccaaccgccgttcgtgcgctagagttcctcgctcagaaagtggagaaataagatacatagtggaagatgagatcagttgttcggtcacttcgccagctccgccgatttatccagcactatgcagaggggaactcacaagcaaccagattgttcgggctgcagaatgctttaatcatgtgcggatcgacaccccgttcactgagcatgttacgtcgtaatggtgaaattagcagatttgcaagccctggcatggagttgatgaggtccatgttctctaatgtagcggctggttctatcaaagatattggaagaggtggcccgatggtggaatatgagaggagaatagcatcaggagacctagtagatggcgatagctttcaggttgatacaattcaacaattacaagggctctatgaggagttgattgagaatggagaagactgccagctggatagatataagtcatctgagaaatcaggacggtaagagcagtttccgtgcactaagatgacatattttgtattatcttaagcttagtcttttctttggaaaaaaaataactttagtctttgatattgaaggagtcgatggctatggtcccgcctcattactcagccttctagctttgctccagttaagggcctttacctctatggtggtgttggtacagggaagacgatgcttatggacttgttctatgaacagctgccatctaattggagaaaaaaacgtattcactttcatgatttcatgttgaacgtacatagtcgtcttcagatgcataaaggtgtttcagatccccttgatgttgtagcagctgagatttcagatgaggccatcatattatgtcttgatgagtttatggtaactgatgttgctgatgctatgattctgaaccggctgttcagacaattgttcagcaaaggcattataagctttatgaaggtggcttacaacgggaccttttcttgccatttattgacaccttgaaagaaaggtgcatcgtgcaccccattggatctgcggtggactatcgtcaactgggttctgtatgttaccatctgctgcgagctagtagtccttggtttcttgccccttcccttctttgacatttttgaactgatgtctgagcaggctgaacaaggtttctattttgtcggaaagcattacagtacgcttctgaaacagaagctccagtctttaattggagatgaggaacccagcccacaaactgttgaagtaattatgggaaggaaattacaggtttctctgggagcaaatggctgtgcatattttccttttgaagatctctgtgatagacctttaggtgcagcagattactttggactcttcaaaaaatttcacaccctggcacttgatggtgttccaaagtttgggtctagtaacagaacagcagcttatcggttcgtcacactgattgatgttatgtacgagaacaaagcaaggctgttatgtacagccgaggctggaccagtagaactgtttgagaatatcatgactcttgctgaagcacagaaggtttcaccaagatcttcgcgctcacagaaaagtgacgaccctgacctatgtgtggacaatgagcttggatttgccaaggatcgtacgattagcaggttgacagagatcaacagcagagaatatttggaggacttcgaaatgagattagggcaacagcagctgctgcccttgcaagctctagataatggtggtgatgttgtactagcataataagtagaaggcttctgggcctcatttgaaattcttgtattcgcgcccacctggcttacataggcaactgagaagctatgcttttccaaccgtggtgcatgtaaatgtgcaataaagctatgaaagagtattttttgctaataggtgggtgatctataaaatggctcaatctatagggagacgtgtcaatattgatttttttaattgtgttacatatttccaaacctttagagagacataaaactcaaaaacagcaattatcataactgcag

SEQ ID NO: 14741 - DNA, 2194 bp, Zea Mays
ctccactcgtccatcccaatccacctgttcccaacttgaacttcccatataatagtcccatctcttggcacccggcccgacgttcggagcctcctgccgcaatttttttttgaggctggtctgtttcgtgacgtcccgcgagaagagaacccccgtggcccctggccgcgacggagcggtcagaagcagcggcggccggcgcggtttcggtttcctggttggcccgagaattccgattcctctcctgatttgtgcggcggagcgtctcttgttgtgcagtgctgcagcggattgtcgcggcctgcccgcggtgaggccggcatccctcttcggaaggcgtgctcgggcggggccagcccaaccgccgttcgtgcgctagagttcctcgctcagaaagtggagaaataagatacatagtggaagatgagatcagttgttcggtcacttcgccagctccgccgatttatccagcactatgcagaggggaactcacaagcaaccagattgttcgggctgcagaatgctttaatcatgtgcggatcgacaccccgttcactgagcatgttacgtcgtaatggtgaaattagcagatttgcaagccctggcatggagttgatgaggtccatgttctctaatgtagcggctggttctatcaaagatattggaagaggtggcccgatggtggaatatgagaggagaatagcatcaggagacctagtagatggcgatagctttcaggttgatacaattcaacaattacaagggctctatgaggagttgattgagaatggagaagactgccagctggatagatataagtcatctgagaaatcaggacggagtcgatggctatggtcccgcctcattactcagccttctagctttgctccagttaagggcctttacctctatggtggtgttggtacagggaagacgatgcttatggacttgttctatgaacagctgccatctaattggagaaaaaaacgtattcactttcatgatttcatgttgaacgtacatagtcgtcttcagatgcataaaggtgtttcagatccccttgatgttgtagcagctgagatttcagatgaggccatcatattatgtcttgatgagtttatggtaactgatgttgctgatgctatgattctgaaccggctgttcagacaattgttcagcaaaggcattataagctttatgaaggtggcttacaacgggaccttttcttgccatttattgacaccttgaaagaaaggtgcatcgtgcaccccattggatctgcggtggactatcgtcaactgggttctgctgaacaaggtttctattttgtcggaaagcattacagtacgcttctgaaacagaagctccagtctttaattggagatgaggaacccagcccacaaactgttgaagtaattatgggaaggaaattacaggtttctctgggagcaaatggctgtgcatattttccttttgaagatctctgtgatagacctttaggtgcagcagattactttggactcttcaaaaaatttcacaccctggcacttgatggtgttccaaagtttgggtctagtaacagaacagcagcttatcggttcgtcacactgattgatgttatgtacgagaacaaagcaaggctgttatgtacagccgaggctggaccagtagaactgtttgagaatatcatgactcttgctgaagcacagaaggtttcaccaagatcttcgcgctcacagaaaagtgacgaccctgacctatgtgtggacaatgagcttggatttgccaaggatcgtacgattagcaggttgacagagatcaacagcagagaatatttggaggacttcgaaatgagattagggcaacagcagctgctgcccttgcaagctctagataatggtggtgatgttgtactagcataataagtagaaggcttctgggcctcatttgaaattcttgtattcgcgcccacctggcttacataggcaactgagaagctatgcttttccaaccgtggtgcatgtaaatgtgcaataaagctatgaaagagtattttttgctaataggtgggtgatctataaaatggctcaatctatagggagacgtgtcaatattgatttttttaattgtgttacatatttccaaacctttagagagacataaaactcaaaaacagcaattatcataactgcag

SEQ ID NO: 14742 - DNA, 2246 bp, Zea Mays
tcccaatccacctgttcccaacttgaacttcccatataatagtcccatctcttggcacccggcccgacgttcggagcctcctgccgcaatttttttttgaggctggtctgtttcgtgacgtcccgcgagaagagaacccccgtggcccctggccgcgacggagcggtcagaagcagcggcggccggcgcggtttcggtttcctggttggcccgagaattccgattcctctcctgatttgtgaaagtggagaaataagatacatagtggaagatgagatcagttgttcggtcacttcgccagctccgccgatttatccagcactatgcagaggggaactcacaagcaaccagattgttcgggctgcagaatgctttaatcatgtgcggatcgacaccccgttcactgagcatgttacgtcgtaatggtgaaattagcagatttgcaagccctggcatggagttgatgaggtccatgttctctaatgtagcggctggttctatcaaagatattggaagaggtggcccgatggtggaatatgagaggagaatagcatcaggagacctagtagatggcgatagctttcaggttgatacaattcaacaattacaagggctctatgaggagttgattgagaatggagaagactgccagctggatagatataagtcatctgagaaatcaggacggtaagagcagtttccgtgcactaagatgacatattttgtattatcttaagcttagtcttttctttggaaaaaaaataactttagtctttgatattgaaggagtcgatggctatggtcccgcctcattactcagccttctagctttgctccagttaagggcctttacctctatggtggtgttggtacagggaagacgatgcttatggacttgttctatgaacagctgccatctaattggagaaaaaaacgtattcactttcatgatttcatgttgaacgtacatagtcgtcttcagatgcataaaggtgtttcagatccccttgatgttgtagcagctgagatttcagatgaggccatcatattatgtcttgatgagtttatggtaactgatgttgctgatgctatgattctgaaccggctgttcagacaattgttcagcaaaggcattattcttgtttcaacttctaaccgtgctccagataagctttatgaaggtggcttacaacgggaccttttcttgccatttattgacaccttgaaagaaaggtgcatcgtgcaccccattggatctgcggtggactatcgtcaactgggttctgctgaacaaggtttctattttgtcggaaagcattacagtacgcttctgaaacagaagctccagtctttaattggagatgaggaacccagcccacaaactgttgaagtaattatgggaaggaaattacaggtttctctgggagcaaatggctgtgcatattttccttttgaagatctctgtgatagacctttaggtgcagcagattactttggactcttcagtaagtaatgttgctgcctgattattttgaatttgagataacctgttaactaataaccgattcttgccttacagaaaaatttcacaccctggcacttgatggtgttccaaagtttgggtctagtaacagaacagcagcttatcggttcgtcacactgattgatgttatgtacgagaacaaagcaaggctgttatgtacagccgaggctggaccagtagaactgtttgagaatatcatgactcttgctgaagcacagaaggtttcaccaagatcttcgcgctcacagaaaagtgacgaccctgacctatgtgtggacaatgagcttggatttgccaaggatcgtacgattagcaggttgacagagatcaacagcagagaatatttggaggacttcgaaatgagattagggcaacagcagctgctgcccttgcaagctctagataatggtggtgatgttgtactagcataataagtagaaggcttctgggcctcatttgaaattcttgtattcgcgcccacctggcttacataggcaactgagaagctatgcttttccaaccgtggtgcatgtaaatgtgcaataaagctatgaaagagtattttttgctaataggtgggtgatctataaaatggctcaatctatagggagacgtgtcaatattgatttttttaattgtgttacatatttccaaacctttagagagacataaaactcaaaaacagcaattatcataactgcag

SEQ ID NO: 14743 - DNA, 2446 bp, Zea Mays
cttcttgtcacgtgctgctggttgtagttgtaggtgctgatactgtttcgtcttcctcgatctgtagcaagtttcaatctttgagacgcactcgtaacagtactcccatcatcctggagctggcgttacctttagctcgtcgtgcaagaattttcccatctcgggcttacaaatatatatatttaatctgcccatgaaacttgtagccgatcgatggagctgtggtgatactggtcaatttgatacggattacggattcctagttcttctcgggaaactttaagtgctcttttattggtatttattttgaactaattattaattgcagagtagtaggactgtaggagtatgtactagtagctgcgtttcttttcaccgagcaccctttccatgtcattttcttgattaccttttatgatgtcatgctcccacccacatttatttaacttgtttgcttacttttgccgttcccttgtttatgccacatgattgatgcttgtttcgtcacatggccgaaagtggagaaataagatacatagtggaagatgagatcagttgttcggtcacttcgccagctccgccgatttatccagcactatgcagaggggaactcacaagcaaccagattgttcgggctgcagaatgctttaatcatgtgcggatcgacaccccgttcactgagcatgttacgtcgtaatggtgaaattagcagatttgcaagccctggcatggagttgatgaggtccatgttctctaatgtagcggctggttctatcaaagatattggaagaggtggcccgatggtggaatatgagaggagaatagcatcaggagacctagtagatggcgatagctttcaggttgatacaattcaacaattacaagggctctatgaggagttgattgagaatggagaagactgccagctggatagatataagtcatctgagaaatcaggacggtaagagcagtttccgtgcactaagatgacatattttgtattatcttaagcttagtcttttctttggaaaaaaaataactttagtctttgatattgaaggagtcgatggctatggtcccgcctcattactcagccttctagctttgctccagttaagggcctttacctctatggtggtgttggtacagggaagacgatgcttatggacttgttctatgaacagctgccatctaattggagaaaaaaacgtattcactttcatgatttcatgttgaacgtacatagtcgtcttcagatgcataaaggtgtttcagatccccttgatgttgtagcagctgagatttcagatgaggccatcatattatgtcttgatgagtttatggtaactgatgttgctgatgctatgattctgaaccggctgttcagacaattgttcagcaaaggcattattcttgtttcaacttctaaccgtgctccagataagctttatgaaggtggcttacaacgggaccttttcttgccatttattgacaccttgaaagaaaggtgcatcgtgcaccccattggatctgcggtggactatcgtcaactgggttctgctgaacaaggtttctattttgtcggaaagcattacagtacgcttctgaaacagaagctccagtctttaattggagatgaggaacccagcccacaaactgttgaagtaattatgggaaggaaattacaggtttctctgggagcaaatggctgtgcatattttccttttgaagatctctgtgatagacctttaggtgcagcagattactttggactcttcaaaaaatttcacaccctggcacttgatggtgttccaaagtttgggtctagtaacagaacagcagcttatcggttcgtcacactgattgatgttatgtacgagaacaaagcaaggctgttatgtacagccgaggctggaccagtagaactgtttgagaatatcatgactcttgctgaagcacagaaggtttcaccaagatcttcgcgctcacagaaaagtgacgaccctgacctatgtgtggacaatgagcttggatttgccaaggatcgtacgattagcaggttgacagagatcaacagcagagaatatttggaggacttcgaaatgagattagggcaacagcagctgctgcccttgcaagctctagataatggtggtgatgttgtactagcataataagtagaaggcttctgggcctcatttgaaattcttgtattcgcgcccacctggcttacataggcaactgagaagctatgcttttccaaccgtggtgcatgtaaatgtgcaataaagctatgaaagagtattttttgctaataggtgggtgatctataaaatggctcaatctatagggagacgtgtcaatattgatttttttaattgtgttacatatttccaaacctttagagagacataaaactcaaaaacagcaattatcataactgcag

SEQ ID NO: 14744 - DNA, 1930 bp, Zea Mays
atgattgatgcttgtttcgtcacatggccgaaagtggagaaataagatacatagtggaagatgagatcagttgttcggtcacttcgccagctccgccgatttatccagcactatgcagaggggaactcacaagcaaccagattgttcgggctgcagaatgctttaatcatgtgcggatcgacaccccgttcactgagcatgttacgtcgtaatggtgaaattagcagatttgcaagccctggcatggagttgatgaggtccatgttctctaatgtagcggctggttctatcaaagatattggaagaggtggcccgatggtggaatatgagaggagaatagcatcaggagacctagtagatggcgatagctttcaggttgatacaattcaacaattacaagggctctatgaggagttgattgagaatggagaagactgccagctggatagatataagtcatctgagaaatcaggacggtaagagcagtttccgtgcactaagatgacatattttgtattatcttaagcttagtcttttctttggaaaaaaaataactttagtctttgatattgaaggagtcgatggctatggtcccgcctcattactcagccttctagctttgctccagttaagggcctttacctctatggtggtgttggtacagggaagacgatgcttatggacttgttctatgaacagctgccatctaattggagaaaaaaacgtattcactttcatgatttcatgttgaacgtacatagtcgtcttcagatgcataaaggtgtttcagatccccttgatgttgtagcagctgagatttcagatgaggccatcatattatgtcttgatgagtttatggtaactgatgttgctgatgctatgattctgaaccggctgttcagacaattgttcagcaaaggcattataagctttatgaaggtggcttacaacgggaccttttcttgccatttattgacaccttgaaagaaaggtgcatcgtgcaccccattggatctgcggtggactatcgtcaactgggttctgctgaacaaggtttctattttgtcggaaagcattacagtacgcttctgaaacagaagctccagtctttaattggagatgaggaacccagcccacaaactgttgaagtaattatgggaaggaaattacaggtttctctgggagcaaatggctgtgcatattttccttttgaagatctctgtgatagacctttaggtgcagcagattactttggactcttcaaaaaatttcacaccctggcacttgatggtgttccaaagtttgggtctagtaacagaacagcagcttatcggttcgtcacactgattgatgttatgtacgagaacaaagcaaggctgttatgtacagccgaggctggaccagtagaactgtttgagaatatcatgactcttgctgaagcacagaaggtttcaccaagatcttcgcgctcacagaaaagtgacgaccctgacctatgtgtggacaatgagcttggatttgccaaggatcgtacgattagcaggttgacagagatcaacagcagagaatatttggaggacttcgaaatgagattagggcaacagcagctgctgcccttgcaagctctagataatggtggtgatgttgtactagcataataagtagaaggcttctgggcctcatttgaaattcttgtattcgcgcccacctggcttacataggcaactgagaagctatgcttttccaaccgtggtgcatgtaaatgtgcaataaagctatgaaagagtattttttgctaataggtgggtgatctataaaatggctcaatctatagggagacgtgtcaatattgatttttttaattgtgttacatatttccaaacctttagagagacataaaactcaaaaacagcaattatcataactgcag

SEQ ID NO: 14745 - DNA, 2269 bp, Zea Mays
cacgcattatccattccgtttggacccatgagatttttcgctgggatgaccgtgcacgagacgaatcccgttcggtaaccgataccccaagtcaaggcggatcatccgtcagtccgtcaccgcagtccagggagcgagcgacgacgacgccagggtcgtggtgctagttgcggggtcccggcccgtcgagtccgcctccggttctcccccttctcccgttgcggcgactccggcggcggagacagaggagcctaagcaggaggaggcggcggcggcagcagcagcaggtgtgcaggccatggctgtcacggtagtgcgggacgtcgagacgggcctggacgcgagcaccagcgaccgggacggtgacgccggggacaacccttcctggttcacacctaagagactacttgtcatgttctgcattatcaacatgctgaactatattgatcgaggagcaatagcaagtaatggcgtcaatggtacccgcaaaagttgttcgggtggtacatgcacctcaggctcaggaattcaatataatcctttcaggcttattggtgttggcttgttagtgtggactatcgcaacagctggttgtggggtatcatttgatttctggtcaattactatatgccgcatgtttgtgggcgttggcgaagcttcatttataagtcttgcagctccatttattgatgacaatgcaccagtagctcagaaaacagcgtggcttggtatgttctacatgtgtataccaactgggattgcattaggctatgtttatggcggactggttggaaaatacctgaactggcgtgttgctttctggggagagtcaatattgatggttccttttgttattcttggttttgttataaagccactagacctcaaaggatttgctcacaacacaggaaaagaatatggccagatgcttaatcctgaggttcaagatcagataaataataatgggacaaaaaatgttttgcctagtcgaatcgaggatctttcaggaaaggttcggcaaaacttctccttgtccagtttttgccatgttctcatgactgaaattggtcgcttcagcaaagatatgaaacaactattacaagagaaggtttttgtcattgttgtcttaggttatatctcctacaacttcgtcattggtgcttattcctactggggcccaaaggcaggtcaagagatctacaatatggcgagtgcggatattatgtttggtggaattactatagtgtgtggaattgttggaacactagcaggaggtttcatccttgacaagatagggtctactattcctaatgctttcaagcttctttctggtgcgacatttgtaggggcaatattctgctttggtgctttttgtttcaagagcctttatgggttcataccctcctttgcagttggggagctttcagttttcgcaactcaggcacctgtaaattttgtatgccttcacgccgtgaagccacatttgcggccattggcaatggccgtatccactgtttcgatccatatatttggtgatgtcccttcttcacctcttgttgggctgcttcaggacaaaatcaataactggagggagacagctcttatattgacatccatccttttcgctgcagttgtgttctggttcattggcatatttgtccccagcgtcgaccgtttcaacgaagagagcgaatatggccttactgccgctgagagatcaagtatcaggccactgcttggtgaaaacgagccacggacatctgactaaaatctgcgcaatccataaccatttattacttggaagggcaattttaggatatgtttgttttcctcctagattatatgagctggattatagtgaaaataagctaaaataagctcgcattgggtaacttatttcagttgcatgccagttgcaatcttagggtacgaggttacaatatcactttggaaggctaaaataagttatcataatccaacttatgtaatctagaagaaacaaacagggccgtagtccgtagtattatcctctgtctgtgccagcaacatgtgaaatgtaaagttgtatgcccaacatgtgaaatgtaaagttgcatgccagttcaatgtagatgtacatatacgaggtctgtttgccttgcgttttttatctctacaggctacagaaacaagcgagagaacgttacaatttatttttacggatgtaaaacattttggattgtgacatgatataacttactggctacaatattactccctagatactctt

SEQ ID NO: 14746 - DNA, 2351 bp, Zea Mays
cacgcattatccattccgtttggacccatgagatttttcgctgggatgaccgtgcacgagacgaatcccgttcggtaaccgataccccaagtcaaggcggatcatccgtcagtccgtcaccgcagtccagggagcgagcgacgacgacgccagggtcgtggtgctagttgcggggtcccggcccgtcgagtccgcctccggttctcccccttctcccgttgcggcgactccggcggcggagacagaggagcctaagcaggaggaggcggcggcggcagcagcagcaggtgtgcaggccatggctgtcacggtagtgcgggacgtcgagacgggcctggacgcgagcaccagcgaccgggacggtgacgccggggacaacccttcctggttcacacctaagagactacttgtcatgttctgcattatcaacatgctgaactatattgatcgaggagcaatagcaagtaatggcgtcaatggtacccgcaaaagttgttcgggtggtacatgcacctcaggctcaggaattcaaggggacttcgatcttaataatcttgaagatggtacattgtcctcagcatttatggttggactgttggtgtcttcgctgatatttgcatgccttgtaaaaagatataatcctttcaggcttattggtgttggcttgttagtgtggactatcgcaacagctggttgtggggtatcatttgatttctggtcaattactatatgccgcatgtttgtgggcgttggcgaagcttcatttataagtcttgcagctccatttattgatgacaatgcaccagtagctcagaaaacagcgtggcttggtatgttctacatgtgtataccaactgggattgcattaggctatgtttatggcggactggttggaaaatacctgaactggcgtgttgctttctggggagagtcaatattgatggttccttttgttattcttggttttgttataaagccactagacctcaaaggatttgctcacaacacaggaaaagaatatggccagatgcttaatcctgaggttcaagatcagataaataataatgggacaaaaaatgttttgcctagtcgaatcgaggatctttcaggaaaggtccagtttttgccatgttctcatgactgaaattggtcgcttcagcaaagatatgaaacaactattacaagagaaggtttttgtcattgttgtcttaggttatatctcctacaacttcgtcattggtgcttattcctactggggcccaaaggcaggtcaagagatctacaatatggcgagtgcggatattatgtttggtggaattactatagtgtgtggaattgttggaacactagcaggaggtttcatccttgacaagatagggtctactattcctaatgctttcaagcttctttctggtgcgacatttgtaggggcaatattctgctttggtgctttttgtttcaagagcctttatgggttcataccctcctttgcagttggggagctttcagttttcgcaactcaggcacctgtaaattttgtatgccttcacgccgtgaagccacatttgcggccattggcaatggccgtatccactgtttcgatccatatatttggtgatgtcccttcttcacctcttgttgggctgcttcaggacaaaatcaataactggagggagacagctcttatattgacatccatccttttcgctgcagttgtgttctggttcattggcatatttgtccccagcgtcgaccgtttcaacgaagagagcgaatatggccttactgccgctgagagatcaagtatcaggccactgcttggtgaaaacgagccacggacatctgactaaaatctgcgcaatccataaccatttattacttggaagggcaattttaggatatgtttgttttcctcctagattatatgagctggattatagtgaaaataagctaaaataagctcgcattgggtaacttatttcagttgcatgccagttgcaatcttagggtacgaggttacaatatcactttggaaggctaaaataagttatcataatccaacttatgtaatctagaagaaacaaacagggccgtagtccgtagtattatcctctgtctgtgccagcaacatgtgaaatgtaaagttgtatgcccaacatgtgaaatgtaaagttgcatgccagttcaatgtagatgtacatatacgaggtctgtttgccttgcgttttttatctctacaggctacagaaacaagcgagagaacgttacaatttatttttacggatgtaaaacattttggattgtgacatgatataacttactggctacaatattactccctagatactctt

SEQ ID NO: 14747 - DNA, 2253 bp, Zea Mays
cacgcattatccattccgtttggacccatgagatttttcgctgggatgaccgtgcacgagacgaatcccgttcggtaaccgataccccaagtcaaggcggatcatccgtcagtccgtcaccgcagtccagggagcgagcgacgacgacgccagggtcgtggtgctagttgcggggtcccggcccgtcgagtccgcctccggttctcccccttctcccgttgcggcgactccggcggcggagacagaggagcctaagcaggaggaggcggcggcggcagcagcagcaggtgtgcaggccatggctgtcacggtagtgcgggacgtcgagacgggcctggacgcgagcaccagcgaccgggacggtgacgccggggacaacccttcctggttcacacctaagagactacttgtcatgttctgcattatcaacatgctgaactatattgatcgaggagcaatagcaagtaatggcgtcaatggtacccgcaaaagttgttcgggtggtacatgcacctcaggctcaggaattcaaggggacttcgatcttaataatcttgaagatggtacattgtcctcagcatttatggttggactgttggtgtcttcgctgatatttgcatgccttgtaaaaagatataatcctttcaggcttattggtgttggcttgttagtgtggactatcgcaacagctggttgtggggtatcatttgatttctggtcaattactatatgccgcatgtttgtgggcgttggcgaagcttcatttataagtcttgcagctccatttattgatgacaatgcaccagtagctcagaaaacagcgtggcttggtatgttctacatgtgtataccaactgggattgcattaggctatgtttatggcggactggttggaaaatacctgaactggcgtgttgctttctggggagagtcaatattgatggttccttttgttattcttggttttgttataaagccactagacctcaaaggatttgctcacaacacaggaaaagaatatggccagatgcttaatcctgaggttcaagatcagataaataataatgggacaaaaaatgttttgcctagtcgaatcgaggatctttcaggaaaggttatatctcctacaacttcgtcattggtgcttattcctactggggcccaaaggcaggtcaagagatctacaatatggcgagtgcggatattatgtttggtggaattactatagtgtgtggaattgttggaacactagcaggaggtttcatccttgacaagatagggtctactattcctaatgctttcaagcttctttctggtgcgacatttgtaggggcaatattctgctttggtgctttttgtttcaagagcctttatgggttcataccctcctttgcagttggggagctttcagttttcgcaactcaggcacctgtaaattttgtatgccttcacgccgtgaagccacatttgcggccattggcaatggccgtatccactgtttcgatccatatatttggtgatgtcccttcttcacctcttgttgggctgcttcaggacaaaatcaataactggagggagacagctcttatattgacatccatccttttcgctgcagttgtgttctggttcattggcatatttgtccccagcgtcgaccgtttcaacgaagagagcgaatatggccttactgccgctgagagatcaagtatcaggccactgcttggtgaaaacgagccacggacatctgactaaaatctgcgcaatccataaccatttattacttggaagggcaattttaggatatgtttgttttcctcctagattatatgagctggattatagtgaaaataagctaaaataagctcgcattgggtaacttatttcagttgcatgccagttgcaatcttagggtacgaggttacaatatcactttggaaggctaaaataagttatcataatccaacttatgtaatctagaagaaacaaacagggccgtagtccgtagtattatcctctgtctgtgccagcaacatgtgaaatgtaaagttgtatgcccaacatgtgaaatgtaaagttgcatgccagttcaatgtagatgtacatatacgaggtctgtttgccttgcgttttttatctctacaggctacagaaacaagcgagagaacgttacaatttatttttacggatgtaaaacattttggattgtgacatgatataacttactggctacaatattactccctagatactctt

SEQ ID NO: 14748 - DNA, 2107 bp, Zea Mays
ctaattggtctgctttgccatgtctcgggattatgtttctaacttctgagttctggcgatgtccaagtcgtggtgggatctgagcaggccagcggaggtagcagtttcgtagttcaaattggagcaacaaatcattggactacttgtcatgttctgcattatcaacatgctgaactatattgatcgaggagcaatagcaagtaatggcgtcaatggtacccgcaaaagttgttcgggtggtacatgcacctcaggctcaggaattcaaggggacttcgatcttaataatcttgaagatggtacattgtcctcagcatttatggttggactgttggtgtcttcgctgatatttgcatgccttgtaaaaagatataatcctttcaggcttattggtgttggcttgttagtgtggactatcgcaacagctggttgtggggtatcatttgatttctggtcaattactatatgccgcatgtttgtgggcgttggcgaagcttcatttataagtcttgcagctccatttattgatgacaatgcaccagtagctcagaaaacagcgtggcttggtatgttctacatgtgtataccaactgggattgcattaggctatgtttatggcggactggttggaaaatacctgaactggcgtgttgctttctggggagagtcaatattgatggttccttttgttattcttggttttgttataaagccactagacctcaaaggatttgctcacaacacaggaaaagaatatggccagatgcttaatcctgaggttcaagatcagataaataataatgggacaaaaaatgttttgcctagtcgaatcgaggatctttcaggaaaggttcggcaaaacttctccttgtccagtttttgccatgttctcatgactgaaattggtcgcttcagcaaagatatgaaacaactattacaagagaaggtttttgtcattgttgtcttaggttatatctcctacaacttcgtcattggtgcttattcctactggggcccaaaggcaggtcaagagatctacaatatggcgagtgcggatattatgtttggtggaattactatagtgtgtggaattgttggaacactagcaggaggtttcatccttgacaagatagggtctactattcctaatgctttcaagcttctttctggtgcgacatttgtaggggcaatattctgctttggtgctttttgtttcaagagcctttatgggttcataccctcctttgcagttggggagctttcagttttcgcaactcaggcacctgtaaattttgtatgccttcacgccgtgaagccacatttgcggccattggcaatggccgtatccactgtttcgatccatatatttggtgatgtcccttcttcacctcttgttgggctgcttcaggacaaaatcaataactggagggagacagctcttatattgacatccatccttttcgctgcagttgtgttctggttcattggcatatttgtccccagcgtcgaccgtttcaacgaagagagcgaatatggccttactgccgctgagagatcaagtatcaggccactgcttggtgaaaacgagccacggacatctgactaaaatctgcgcaatccataaccatttattacttggaagggcaattttaggatatgtttgttttcctcctagattatatgagctggattatagtgaaaataagctaaaataagctcgcattgggtaacttatttcagttgcatgccagttgcaatcttagggtacgaggttacaatatcactttggaaggctaaaataagttatcataatccaacttatgtaatctagaagaaacaaacagggccgtagtccgtagtattatcctctgtctgtgccagcaacatgtgaaatgtaaagttgtatgcccaacatgtgaaatgtaaagttgcatgccagttcaatgtagatgtacatatacgaggtctgtttgccttgcgttttttatctctacaggctacagaaacaagcgagagaacgttacaatttatttttacggatgtaaaacattttggattgtgacatgatataacttactggctacaatattactccctagatactctt

SEQ ID NO: 14749 - DNA, 1784 bp, Zea Mays
gctagatgcccttcgcacatctctgcatttagatgtgcactgcaatgtgcatgtgcagttgccgatatataatcctttcaggcttattggtgttggcttgttagtgtggactatcgcaacagctggttgtggggtatcatttgatttctggtcaattactatatgccgcatgtttgtgggcgttggcgaagcttcatttataagtcttgcagctccatttattgatgacaatgcaccagtagctcagaaaacagcgtggcttggtatgttctacatgtgtataccaactgggattgcattaggctatgtttatggcggactggttggaaaatacctgaactggcgtgttgctttctggggagagtcaatattgatggttccttttgttattcttggttttgttataaagccactagacctcaaaggatttgctcacaacacaggaaaagaatatggccagatgcttaatcctgaggttcaagatcagataaataataatgggacaaaaaatgttttgcctagtcgaatcgaggatctttcaggaaaggtccagtttttgccatgttctcatgactgaaattggtcgcttcagcaaagatatgaaacaactattacaagagaaggtttttgtcattgttgtcttaggttatatctcctacaacttcgtcattggtgcttattcctactggggcccaaaggcaggtcaagagatctacaatatggcgagtgcggatattatgtttggtggaattactatagtgtgtggaattgttggaacactagcaggaggtttcatccttgacaagatagggtctactattcctaatgctttcaagcttctttctggtgcgacatttgtaggggcaatattctgctttggtgctttttgtttcaagagcctttatgggttcataccctcctttgcagttggggagctttcagttttcgcaactcaggcacctgtaaattttgtatgccttcacgccgtgaagccacatttgcggccattggcaatggccgtatccactgtttcgatccatatatttggtgatgtcccttcttcacctcttgttgggctgcttcaggacaaaatcaataactggagggagacagctcttatattgacatccatccttttcgctgcagttgtgttctggttcattggcatatttgtccccagcgtcgaccgtttcaacgaagagagcgaatatggccttactgccgctgagagatcaagtatcaggccactgcttggtgaaaacgagccacggacatctgactaaaatctgcgcaatccataaccatttattacttggaagggcaattttaggatatgtttgttttcctcctagattatatgagctggattatagtgaaaataagctaaaataagctcgcattgggtaacttatttcagttgcatgccagttgcaatcttagggtacgaggttacaatatcactttggaaggctaaaataagttatcataatccaacttatgtaatctagaagaaacaaacagggccgtagtccgtagtattatcctctgtctgtgccagcaacatgtgaaatgtaaagttgtatgcccaacatgtgaaatgtaaagttgcatgccagttcaatgtagatgtacatatacgaggtctgtttgccttgcgttttttatctctacaggctacagaaacaagcgagagaacgttacaatttatttttacggatgtaaaacattttggattgtgacatgatataacttactggctacaatattactccctagatactctt

SEQ ID NO: 14750 - DNA, 1655 bp, Zea Mays
ctctacaggtgatggctgctttgactcttggtgggagaagagtgccgaggtggtgggcaagcctttgtcggatggtttcaactcgctggtcatattagaaaacagcgtggcttggtatgttctacatgtgtataccaactgggattgcattaggctatgtttatggcggactggttggaaaatacctgaactggcgtgttgctttctggggagagtcaatattgatggttccttttgttattcttggttttgttataaagccactagacctcaaaggatttgctcacaacacaggaaaagaatatggccagatgcttaatcctgaggttcaagatcagataaataataatgggacaaaaaatgttttgcctagtcgaatcgaggatctttcaggaaaggttcggcaaaacttctccttgtccagtttttgccatgttctcatgactgaaattggtcgcttcagcaaagatatgaaacaactattacaagagaaggtttttgtcattgttgtcttaggttatatctcctacaacttcgtcattggtgcttattcctactggggcccaaaggcaggtcaagagatctacaatatggcgagtgcggatattatgtttggtggaattactatagtgtgtggaattgttggaacactagcaggaggtttcatccttgacaagatagggtctactattcctaatgctttcaagcttctttctggtgcgacatttgtaggggcaatattctgctttggtgctttttgtttcaagagcctttatgggttcataccctcctttgcagttggggagctttcagttttcgcaactcaggcacctgtaaattttgtatgccttcacgccgtgaagccacatttgcggccattggcaatggccgtatccactgtttcgatccatatatttggtgatgtcccttcttcacctcttgttgggctgcttcaggacaaaatcaataactggagggagacagctcttatattgacatccatccttttcgctgcagttgtgttctggttcattggcatatttgtccccagcgtcgaccgtttcaacgaagagagcgaatatggccttactgccgctgagagatcaagtatcaggccactgcttggtgaaaacgagccacggacatctgactaaaatctgcgcaatccataaccatttattacttggaagggcaattttaggatatgtttgttttcctcctagattatatgagctggattatagtgaaaataagctaaaataagctcgcattgggtaacttatttcagttgcatgccagttgcaatcttagggtacgaggttacaatatcactttggaaggctaaaataagttatcataatccaacttatgtaatctagaagaaacaaacagggccgtagtccgtagtattatcctctgtctgtgccagcaacatgtgaaatgtaaagttgtatgcccaacatgtgaaatgtaaagttgcatgccagttcaatgtagatgtacatatacgaggtctgtttgccttgcgttttttatctctacaggctacagaaacaagcgagagaacgttacaatttatttttacggatgtaaaacattttggattgtgacatgatataacttactggctacaatattactccctagatactctt

SEQ ID NO: 14751 - DNA, 1561 bp, Zea Mays
gtttcaactcgctggtcatattagaaaacagcgtggcttggtatgttctacatgtgtataccaactgggattgcattaggctatgtttatggcggactggttggaaaatacctgaactggcgtgttgctttctggggagagtcaatattgatggttccttttgttattcttggttttgttataaagccactagacctcaaaggatttgctcacaacacaggaaaagaatatggccagatgcttaatcctgaggttcaagatcagataaataataatgggacaaaaaatgttttgcctagtcgaatcgaggatctttcaggaaaggtccagtttttgccatgttctcatgactgaaattggtcgcttcagcaaagatatgaaacaactattacaagagaaggtttttgtcattgttgtcttaggttatatctcctacaacttcgtcattggtgcttattcctactggggcccaaaggcaggtcaagagatctacaatatggcgagtgcggatattatgtttggtggaattactatagtgtgtggaattgttggaacactagcaggaggtttcatccttgacaagatagggtctactattcctaatgctttcaagcttctttctggtgcgacatttgtaggggcaatattctgctttggtgctttttgtttcaagagcctttatgggttcataccctcctttgcagttggggagctttcagttttcgcaactcaggcacctgtaaattttgtatgccttcacgccgtgaagccacatttgcggccattggcaatggccgtatccactgtttcgatccatatatttggtgatgtcccttcttcacctcttgttgggctgcttcaggacaaaatcaataactggagggagacagctcttatattgacatccatccttttcgctgcagttgtgttctggttcattggcatatttgtccccagcgtcgaccgtttcaacgaagagagcgaatatggccttactgccgctgagagatcaagtatcaggccactgcttggtgaaaacgagccacggacatctgactaaaatctgcgcaatccataaccatttattacttggaagggcaattttaggatatgtttgttttcctcctagattatatgagctggattatagtgaaaataagctaaaataagctcgcattgggtaacttatttcagttgcatgccagttgcaatcttagggtacgaggttacaatatcactttggaaggctaaaataagttatcataatccaacttatgtaatctagaagaaacaaacagggccgtagtccgtagtattatcctctgtctgtgccagcaacatgtgaaatgtaaagttgtatgcccaacatgtgaaatgtaaagttgcatgccagttcaatgtagatgtacatatacgaggtctgtttgccttgcgttttttatctctacaggctacagaaacaagcgagagaacgttacaatttatttttacggatgtaaaacattttggattgtgacatgatataacttactggctacaatattactccctagatactctt

SEQ ID NO: 14752 - DNA, 2681 bp, Zea Mays
gtgtgacgtttcctttagaaacctccattgctggctccccatcctcttcctgcttcatggtttcacctgctgccttctccttcctcgattgccgcagctgctatgggaataccatctttctacaaatgggtcgtcagcaagtacccaagcatcatctcccctgtgaaggacgaaccagaggagtgccctgatggcatcatctacgacaacctctacctcgacatgaattgcatcatccattgctgcttccacccacaggaccagctaacgcatgcagacatagatgtgcgccctccgacgacggccaatgaggtgttcgagtccatgttcgagtacatggaccgcttgttccgcatcgtcaggccaacaagtctgctgtacttggcagtagacggcgttgctccttttgccaaaatgaaccgaatacgaaggggacgtttccactccgccatggaaagacttgctgaggaaccaccgcgagagatttccgaagtttctgaccccaatgtcatcagcccaggtactgagttcatggagaaggtatcagaagccctcgagtactacatccgtgccagatttaacagtgacccctggtggagagacatcatggtaatactctctgatgcgagtgttcctggagaaggagagcacaagatcatgtctttcatccgtgcgcaatgcagcatggaaggctatgatcccaacactcgacactgcttgtttgggcatgatgcggatctgataatgcttgctttggcatctcacgaagtctacttctctattctgcgtgaggatgtgctctaccaaaatcaggaagaaacggaagggaatccgaagaaatcatttctgtttttgaacatgtgggttctgagagagtacttggagattgaattcaagatactggacccagtctgcgagactgatattgagaggctaatagatgacttcatctttatttgtttccttatgggaaacgatttcatcccacatattccgtcacttaagacgcaagagggtgcggttgatcttctcatcgaagtgtacaaaacaaccttcaacaaaatgggagggtatattaccaacacagacaaagtcaaagataagtatggtgcatatctggaagtctcaaggctggaaacattttttcatgaactctccatgtatgaagataaaattttcctcaaaagatatgatctgaaacaggattcgttgctggagacatatcatgaaatgttgcgtgaagctccagaaagcgaaagaccagaactgagacaaaaattagatgatctcctttttaatgaagaaaacccatatgacagtataagactaggcttaccaggatggaagtctcggttcttcagggagcatttcggtgccaaaacttctagtgaaattgggaagctgcagaacgacatggcgcaaaagtacttagaaggactttgttgggtgcttcaatgctatttcgcagacgttccatcatggagctggtactacccgttctatgttgctcctttcgtatctgatctcaaaggtctatctaggatcgagatatctttcactgtggacaaaccattacgaccattcgatcagcttatggcagttttaccgatgcaaagctggggtgctctcccaaaatgttacgagaaaaaaagggacacccctttttactacccgaggttggtgcatgccaaggatgggaaatatttcttgtggaggggcatctctgaggaactgcggctttcggccagcgaaatggtagatagaaagctcacgacccttgaatcgagacggaataccactaggaaagagaaggtgtttctgcacaggagctcgaactctgtgccacacaatggaggctcaagctctctgccacacaacgaggttactgaacaagcatcgcactgttcgatgcagaagcttccgatagattcagctacgagtggaattggagggtggatagcgcctgcttacaatgatggcttctgcgacggtttcttcccctcacccacaccaaacctgcaggacataacgagtgatcagacaatatcaggtatgttcttcaaccctgaggcggcgaacccagttccaagactgcttggcaatgtcagagttcctgacaagactgttacgggagctgacatctccaagaggccactctggcacacgtacccgggatcaaggccgccgcgcatcgttcagaggccggacaccgtgtggaagccgagcacgccggcgtcgccgcgggaagagcacaagaacgccggcacgggctggatcgggcgggggagagggaacgcccttgccgccgccgccgccgccgagacgcaatggaagagcagcagctacagctacaggagagggggtggtttccagcgggcggccatggcacaaagccgaggaagcagcagcagcttcgacggcggcggtgcgtacagtttccggccgcttggaagtgcgccgtggaccgccggggacggcagccgaagcggaggcgccggccatggcgggattgtgcagccacgtggttggtaggaaactagctcaggaatcaaatagcttggtgatctcatcccaccgtgtatattctgtgcccgtgtgccgactgtatatatagcttctacgtttcttttctctaaaaggatgtcctctgttttttaacgtgaaaaatcatgaattagttg

SEQ ID NO: 14753 - DNA, 756 bp, Zea Mays
gtctgaactgagatgtggaattggagggtggatagcgcctgcttacaatgatggcttctgcgacggtttcttcccctcacccacaccaaacctgcaggacataacgagtgatcagacaatatcaggtatgttcttcaaccctgaggcggcgaacccagttccaagactgcttggcaatgtcagagttcctgacaagactgttacgggagctgacatctccaagaggccactctggcacacgtacccgggatcaaggccgccgcgcatcgttcagaggccggacaccgtgtggaagccgagcacgccggcgtcgccgcgggaagagcacaagaacgccggcacgggctggatcgggcgggggagagggaacgcccttgccgccgccgccgccgccgagacgcaatggaagagcagcagctacagctacaggagagggggtggtttccagcgggcggccatggcacaaagccgaggaagcagcagcagcttcgacggcggcggtgcgtacagtttccggccgcttggaagtgcgccgtggaccgccggggacggcagccgaagcggaggcgccggccatggcgggattgtgcagccacgtggttggtaggaaactagctcaggaatcaaatagcttggtgatctcatcccaccgtgtatattctgtgcccgtgtgccgactgtatatatagcttctacgtttcttttctctaaaaggatgtcctctgttttttaacgtgaaaaatcatgaattagttg

SEQ ID NO: 14754 - DNA, 2082 bp, Zea Mays
gtagccgcctctcctcctccttctccttcttccccctctcaaggctcccctcctccacagcctgcagcccagctcacgaggaccaggaggagaagaagttgcatagccgcccatctgcatccacactccaacatgttcgttcgtcgtgctttgtgctgtgcggccgcgttcaggctgcggggacgggggagcaggggtagtggcagcggtcccgttctctgctgctggtggaggctttcggttccgggcgcgggcggtgtggttttctgtggtctcgagaatcccggaaagggagcgagcgcaaagataaactaagcagggcgctgcacgaggatggggtgcggggcgtcgagccagaaggacgccggggcgccgcggaggcggccggtgagcgtcggcgacgtggtcgtcttcctcccgggcctccgcgtgccgagggccgtcgacttggcccaggcgctcggcggctgcctggccaggagcgccgtggaccggctgtcggctctgcgatcgcgggtcgtcgacatggcaatgcgagagtcggcggcggcgctcaagcccaggcggagggcggcggcacggcacgggtctagtacagccaatcttctacaggccctcgaagactacttgccggctctgctaggactggtaaaagaaggtagcgtcttgaggaacaaagtgcacttcacctggagtaaccaggaggataatgctgaggagacggccatgccagacgcctggtacgaggtgctgtccatgctgcatctgatggccatggtctgcctgctgcaggccaacgccctgcttctcccgaggtcatacggcgatggctatgccccaagggtttctgaagagagtcgacgggctactgttgatgtcttcttgaaggcagctggatacctagactgtgcagttcggcatgtactcccgaagatgccactggagctaaggagacaacttccagtagacctggctgaaggaaatctcaaagctctaagcctccaagccctgggtcagggggttgacatgcagcttggtttggctattgatagtccaaaggccactttagcagtaaaacggcgcttagcctgtgagatggtcaaatattggcaacaagttcaagagagcattccagagcttcctatctctgatggatggggtaaaaagcaccggctctttataaagtggaaatatgttgaagctaaggctgcagcatactatttccacggtttgattcttgacgagggaaataccgaaaaatcccatggaatggcaatagctgcactccaagcttcagaggaatttctaaaagaaagcaaaagggtttcagaagccttccatgcaactcctccaacatcgaggagtcccaatccattcggaacagcaaaatatctgtttgacaagatcccaagagatgcttccagcaaggttcgaatcaaccaggacctgtatactcaagaaaaggtcattggagcgccacccccattaccagattttgcattggcgctaacacctgaagaatatgatcttcctccactagatccactttggaacaaagaagacacaagccattaagtgtatatgcagcagaatggttgcttctggcaaaaatattggctctggagagaaaggaaggaccaagatctgccatgtcaagagctgatgtgtaatgaatgaagtgtacaaagtattttcaaacaaaaatacatgttcacaaatttacgcaaggcctgaagacaatctgaagagctttgtacaggcgattcttcttctgacaagggaaatgctatgtcaaagggttccttgatcattgtgcatcttgatgcttgcattttgtcaaaaacagattttcagcaatttatgtagaactgtaaactagcctctgatcgaaagtggcagccttcaaatttttttttgccataaaacatttacatcggcaccttaaaacatgccgtgggacaatcagtttcatctgagcacttaggtgaacaggattttcaaataatcagtggatactgtggcaaagtcagcttccagccattcagtgcatgcatatacagtcataaaattttagttttgaac

SEQ ID NO: 14755 - DNA, 1256 bp, Zea Mays
caactgtttgttaactgcaaatccgagagagtcgacgggctactgttgatgtcttcttgaaggcagctggatacctagactgtgcagttcggcatgtactcccgaagatgccactggagctaaggagacaacttccagtagacctggctgaaggaaatctcaaagctctaagcctccaagccctgggtcagggggttgacatgcagcttggtttggctattgatagtccaaaggccactttagcagtaaaacggcgcttagcctgtgagatggtcaaatattggcaacaagttcaagagagcattccagagcttcctatctctgatggatggggtaaaaagcaccggctctttataaagtggaaatatgttgaagctaaggctgcagcatactatttccacggtttgattcttgacgagggaaataccgaaaaatcccatggaatggcaatagctgcactccaagcttcagaggaatttctaaaagaaagcaaaagggtttcagaagccttccatgcaactcctccaacatcgaggagtcccaatccattcggaacagcaaaatatctgtttgacaagatcccaagagatgcttccagcaaggttcgaatcaaccaggacctgtatactcaagaaaaggtcattggagcgccacccccattaccagattttgcattggcgctaacacctgaagaatatgatcttcctccactagatccactttggaacaaagaagacacaagccattaagtgtatatgcagcagaatggttgcttctggcaaaaatattggctctggagagaaaggaaggaccaagatctgccatgtcaagagctgatgtgtaatgaatgaagtgtacaaagtattttcaaacaaaaatacatgttcacaaatttacgcaaggcctgaagacaatctgaagagctttgtacaggcgattcttcttctgacaagggaaatgctatgtcaaagggttccttgatcattgtgcatcttgatgcttgcattttgtcaaaaacagattttcagcaatttatgtagaactgtaaactagcctctgatcgaaagtggcagccttcaaatttttttttgccataaaacatttacatcggcaccttaaaacatgccgtgggacaatcagtttcatctgagcacttaggtgaacaggattttcaaataatcagtggatactgtggcaaagtcagcttccagccattcagtgcatgcatatacagtcataaaattttagttttgaac

SEQ ID NO: 14756 - DNA, 3680 bp, Zea Mays
gcgtctcgtacagtacataactgggacatcaaactcccaaaacacgccccccaacccaaattgaccgcattcctggcctgtccctgcccttctccttgcactaatccacttccccgaaacggcaggagcggagcggttaccctttcccaagttgtcgcgcccgaccgctccggccgacggctgggtcccatgcccgccaggtttttaacgtaccatccctcgccggagaggccggacgccggaagacgatttgtacctaccgcctgcctgccggacagtaaacagtagccgcgcttggtaaacccccgccaacaacgacgatgcacgcagcgggggagaggatgggctgcctcgcatcaccaccaccgccccaataacaacgacgacggcaccagcgccaaccaccacttttcgaggaaaggcacaggcagccagaggccagagccaggcgcgcggcacggggcaggaaccctggcccgtccgacgagacgacgaaccggccgcgggcctcgtgcccgtggtggtggatatctgactgactgacgccacctgcgcgtagccgcgggcgctttgcttccctcctcgtcgaggcgtgccgacgggacgatttctatccgcggggcggcgctgtgtcgactgtcgactccaactcccaggccggtcaatgagggcgcggagatgagcgccggcggcggggaggaggtgttctacgagtcgcgggacggcgtgctctcctcctcctgctcctccgcctcggacgacgacgacgacgacagcgaccacccgcgacggcggcggcgggacggggccgcctctaccgccgccgcagcggcgctcgacgtgtggacgtccgagccggcgcccgtgcaggagcggcgccggaagctgctccagatgctggggctcgccggggaccccgccctggcgcgcctcgagatgggccgatcggtctcctacgacgacgggcctgtgcccgtccgcccggcgccggcctcgccgcccatctcccgatccagatcagacggcggcgccgtgccggcctcggcgaccaagccgccgctgggagggcggtcgccgggctcctccgaggccacgcccgaaggggaggaggaggaggaggaggaggccgacccgaggtgtctgatccggaacctcgacgacggcagcgagttcgtggtcaaggaagggtccgagctccgcgaggtcggcacgggccggcagctcaccatggaggagttcgttgacctctgcgtcggccgctcgcctatcgtccaggagctcatgcggcggcgcgagaacgttgcgagctccggctcgtccacccccgtccagcgctccaactccgactccagcaacggagcgacgcgccaccggcggcggcggcggcatagcagctggcttcggggcatccggaacgtcgccggctccgtggtggccagctcccgcgaccgccgcagcagcgacgacaaggacacgtgctcggagaaaggcggccgccggtccagctcggccacagacgacagccaggacagcgctggagccgtgcgccacggcccggtgcgcgttaaggtgaggcagtatgggaagtcgtacaaggagctcagtggcctgttcatgaaccaggagatccaggctcacgatggctccatctggagcatcaggtttagtccagatggccggtacctcgcgagtgctggggaagactgcgtgatccatgtctgggaagtgtcagagttcgagaggaaacgcgaggagaacggagcgtgcaatccttttgttgcgatggtgtgcaacggttcgccggagccaacattagccgtggccagcagtgtggatgggagcaatcgtgagaagaagcgtcgggcaaggttcttggagggtcgtaggtctgtgagctcagaccggctaatgctgccagagcatgtgtttgcgctgtcagaaaaaccgattcggaccttcatggggcactcagaagatgtgcttgatctctgctggtccaaatcccagtacttgctttcatcttcaatggataaaacggtgaagttgtggcacatttcgagcacttcctgtctgaaaacattctcacacagtgattatgtgacttgcatccagttcaaccctgttgatgatagatacttcattagtggatcactagatgaaaaagtccgcatatggagcattcaaaaccgtgaaattgttgattggaaagatttgcatgaaatgatcactgctgcttgctataccccagatggacagagcgcactaattggttcccataaaggcagctgccatatttatgatacatctgataatatgcttctccaaaagaaacaaattgacctgcaaaataagaaaaagaagtccagtcagaagaaaatcactggatttcagttccttgaatagttcctcccagggagtacttcaaaggtccttatcacatctgcagattcaagaatcagggttgttgatggccttaatcttgttcacaagtacaaaggtttccgaaacagtaacagccagatttcagccagtttagctgcaaatgggagttatgtgatctcagcaagtgaggattcccacgtgtacatatggagaatcgatgataaccttgaacagggcagaagcaaggggaatgttactgtcaccaattcctatgaatatttccactgccaggatgtgacagttgccgttgcactgccatctaacggctccccagtggtatccagagcaaactcggcgaagcacgatgagcgggattctgtatcggagcattctgcgctgcatgctgcccctgaaaaaccgcaagactcttctgatttccagcctcaaagtggctataccataagcaccggttcaaatgacagtggtgatagagcaacttggcctgaagagctcatgacgccaacaaagcagagccctcggtctagtgccagtcttcccagtggtgctgatcaagctccaggtcggtcagcctgggggaccgtaattgtcacggccggccgtggaggtcagatcagaacatttcagaatttcgggtttcctgctcgaatatagtagctctgaggctgctgcctggtcttggcgtctgccctgccgcaagccgccgggtgattttttgtgtatagataggcgaaagtttgggtgatttgcacagcagtctgggattggattttgttgctcctaggcgcacatgcttgcgaatttcaactaacctggtactcaaggtacggcgagttcgtttgcccggaattgtatatgggaatggagcccgggaaggacgagggggcgtcggccggttggagctagatcttttttaggatcttttgacagacatcttttcatctgtttcctccattgagtccagtttagcttttttttttgtactttatgttttactcgtcattatatattcttgtaagaaatcccagttctacagaaatagaaaagcgaaaaggagttgcatagagtggtgaattcgttgtactggtatagcaggcttgagatgttggtagtacaactggtataataattgagcggctaggaaaatatggagagagaaaaaaaaattgagttctgaagcttttggaccttgcttccggagaagtctggcaggtgcgtttctgatgtgtatctactgtcccaactgtcggttgtccaacaaatttcttattcagtttctg

SEQ ID NO: 14757 - DNA, 3431 bp, Zea Mays
gtccctgcccttctccttgcactaatccacttccccgaaacggcaggagcggagcggttaccctttcccaagttgtcgcgcccgaccgctccggccgacggctgggtcccatgcccgccaggtttttaacgtaccatccctcgccggagaggccggacgccggaagacgatttgtacctaccgcctgcctgccggacagtaaacagtagccgcgcttggtaaacccccgccaacaacgacgatgcacgcagcgggggagaggatgggctgcctcgcatcaccaccaccgccccaataacaacgacgacggcaccagcgccaaccaccacttttcgaggaaaggcacaggcagccagaggccagagccaggcgcgcggcacggggcaggaaccctggcccgtccgacgagacgacgaaccggccgcgggcctcgtgcccgtggtggtggatatctgactgactgacgccacctgcgcgtagccgcgggcgctttgcttccctcctcgtcgaggcgtgccgacgggacgatttctatccgcggggcggcgctgtgtcgactgtcgactccaactcccaggccggtcaatgagggcgcggagatgagcgccggcggcggggaggaggtgttctacgagtcgcgggacggcgtgctctcctcctcctgctcctccgcctcggacgacgacgacgacgacagcgaccacccgcgacggcggcggcgggacggggccgcctctaccgccgccgcagcggcgctcgacgtgtggacgtccgagccggcgcccgtgcaggagcggcgccggaagctgctccagatgctggggctcgccggggaccccgccctggcgcgcctcgagatgggccgatcggtctcctacgacgacgggcctgtgcccgtccgcccggcgccggcctcgccgcccatctcccgatccagatcagacggcggcgccgtgccggcctcggcgaccaagccgccgctgggagggcggtcgccgggctcctccgaggccacgcccgaaggggaggaggaggaggaggaggaggccgacccgaggtgtctgatccggaacctcgacgacggcagcgagttcgtggtcaaggaagggtccgagctccgcgaggtcggcacgggccggcagctcaccatggaggagttcgttgacctctgcgtcggccgctcgcctatcgtccaggagctcatgcggcggcgcgagaacgttgcgagctccggctcgtccacccccgtccagcgctccaactccgactccagcaacggagcgacgcgccaccggcggcggcggcggcatagcagctggcttcggggcatccggaacgtcgccggctccgtggtggccagctcccgcgaccgccgcagcagcgacgacaaggacacgtgctcggagaaaggcggccgccggtccagctcggccacagacgacagccaggacagcgctggagccgtgcgccacggcccggtgcgcgttaaggtgaggcagtatgggaagtcgtacaaggagctcagtggcctgttcatgaaccaggagatccaggctcacgatggctccatctggagcatcaggtttagtccagatggccggtacctcgcgagtgctggggaagactgcgtgatccatgtctgggaagtgtcagagttcgagaggaaacgcgaggagaacggagcgtgcaatccttttgttgcgatggtgtgcaacggttcgccggagccaacattagccgtggccagcagtgtggatgggagcaatcgtgagaagaagcgtcgggcaaggttcttggagggtcgtaggtctgtgagctcagaccggctaatgctgccagagcatgtgtttgcgctgtcagaaaaaccgattcggaccttcatggggcactcagaagatgtgcttgatctctgctggtccaaatcccagtacttgctttcatcttcaatggataaaacggtgaagttgtggcacatttcgagcacttcctgtctgaaaacattctcacacagtgattatgagcgcactaattggttcccataaaggcagctgccatatttatgatacatctgataatatgcttctccaaaagaaacaaattgacctgcaaaataagaaaaagaagtccagtcagaagaaaatcactggatttcagttcctcccagggagtacttcaaaggtccttatcacatctgcagattcaagaatcagggttgttgatggccttaatcttgttcacaagtacaaaggtttccgaaacagtaacagccagatttcagccagtttagctgcaaatgggagttatgtgatctcagcaagtgaggattcccacgtgtacatatggagaatcgatgataaccttgaacagggcagaagcaaggggaatgttactgtcaccaattcctatgaatatttccactgccaggatgtgacagttgccgttgcactgccatctaacggctccccagtggtatccagagcaaactcggcgaagcacgatgagcgggattctgtatcggagcattctgcgctgcatgctgcccctgaaaaaccgcaagactcttctgatttccagcctcaaagtggctataccataagcaccggttcaaatgacagtggtgatagagcaacttggcctgaagagctcatgacgccaacaaagcagagccctcggtctagtgccagtcttcccagtggtgctgatcaagctccaggtcggtcagcctgggggaccgtaattgtcacggccggccgtggaggtcagatcagaacatttcagaatttcgggtttcctgctcgaatatagtagctctgaggctgctgcctggtcttggcgtctgccctgccgcaagccgccgggtgattttttgtgtatagataggcgaaagtttgggtgatttgcacagcagtctgggattggattttgttgctcctaggcgcacatgcttgcgaatttcaactaacctggtactcaaggtacggcgagttcgtttgcccggaattgtatatgggaatggagcccgggaaggacgagggggcgtcggccggttggagctagatcttttttaggatcttttgacagacatcttttcatctgtttcctccattgagtccagtttagcttttttttttgtactttatgttttactcgtcattatatattcttgtaagaaatcccagttctacagaaatagaaaagcgaaaaggagttgcatagagtggtgaattcgttgtactggtatagcaggcttgagatgttggtagtacaactggtataataattgagcggctaggaaaatatggagagagaaaaaaaaattgagttctgaagcttttggaccttgcttccggagaagtctggcaggtgcgtttctgatgtgtatctactgtcccaactgtcggttgtccaacaaatttcttattcagtttctg

SEQ ID NO: 14758 - DNA, 3319 bp, Zea Mays
cgccaacaacgacgatgcacgcagcgggggagaggatgggctgcctcgcatcaccaccaccgccccaataacaacgacgacggcaccagcgccaaccaccacttttcgaggaaaggcacaggcagccagaggccagagccaggcgcgcggcacggggcaggaaccctggcccgtccgacgagacgacgaaccggccgcgggcctcgtgcccgtggtggtggatatctgactgactgacgccacctgcgcgtagccgcgggcgctttgcttccctcctcgtcgaggcgtgccgacgggacgatttctatccgcggggcggcgctgtgtcgactgtcgactccaactcccaggccggtcaatgagggcgcggagatgagcgccggcggcggggaggaggtgttctacgagtcgcgggacggcgtgctctcctcctcctgctcctccgcctcggacgacgacgacgacgacagcgaccacccgcgacggcggcggcgggacggggccgcctctaccgccgccgcagcggcgctcgacgtgtggacgtccgagccggcgcccgtgcaggagcggcgccggaagctgctccagatgctggggctcgccggggaccccgccctggcgcgcctcgagatgggccgatcggtctcctacgacgacgggcctgtgcccgtccgcccggcgccggcctcgccgcccatctcccgatccagatcagacggcggcgccgtgccggcctcggcgaccaagccgccgctgggagggcggtcgccgggctcctccgaggccacgcccgaaggggaggaggaggaggaggaggaggccgacccgaggtgtctgatccggaacctcgacgacggcagcgagttcgtggtcaaggaagggtccgagctccgcgaggtcggcacgggccggcagctcaccatggaggagttcgttgacctctgcgtcggccgctcgcctatcgtccaggagctcatgcggcggcgcgagaacgttgcgagctccggctcgtccacccccgtccagcgctccaactccgactccagcaacggagcgacgcgccaccggcggcggcggcggcatagcagctggcttcggggcatccggaacgtcgccggctccgtggtggccagctcccgcgaccgccgcagcagcgacgacaaggacacgtgctcggagaaaggcggccgccggtccagctcggccacagacgacagccaggacagcgctggagccgtgcgccacggcccggtgcgcgttaaggtgaggcagtatgggaagtcgtacaaggagctcagtggcctgttcatgaaccaggagatccaggctcacgatggctccatctggagcatcaggtttagtccagatggccggtacctcgcgagtgctggggaagactgcgtgatccatgtctgggaagtgtcagagttcgagaggaaacgcgaggagaacggagcgtgcaatccttttgttgcgatggtgtgcaacggttcgccggagccaacattagccgtggccagcagtgtggatgggagcaatcgtgagaagaagcgtcgggcaaggttcttggagggtcgtaggtctgtgagctcagaccggctaatgctgccagagcatgtgtttgcgctgtcagaaaaaccgattcggaccttcatggggcactcagaagatgtgcttgatctctgctggtccaaatcccagtacttgctttcatcttcaatggataaaacggtgaagttgtggcacatttcgagcacttcctgtctgaaaacattctcacacagtgattatgtgacttgcatccagttcaaccctgttgatgatagatacttcattagtggatcactagatgaaaaagtccgcatatggagcattcaaaaccgtgaaattgttgattggaaagatttgcatgaaatgatcactgctgcttgctataccccagatggacagagcgcactaattggttcccataaaggcagctgccatatttatgatacatctgataatatgcttctccaaaagaaacaaattgacctgcaaaataagaaaaagaagtccagtcagaagaaaatcactggatttcagattcaagaatcagggttgttgatggccttaatcttgttcacaagtacaaaggtttccgaaacagtaacagccagatttcagccagtttagctgcaaatgggagttatgtgatctcagcaagtgaggattcccacgtgtacatatggagaatcgatgataaccttgaacagggcagaagcaaggggaatgttactgtcaccaattcctatgaatatttccactgccaggatgtgacagttgccgttgcactgccatctaacggctccccagtggtatccagagcaaactcggcgaagcacgatgagcgggattctgtatcggagcattctgcgctgcatgctgcccctgaaaaaccgcaagactcttctgatttccagcctcaaagtggctataccataagcaccggttcaaatgacagtggtgatagagcaacttggcctgaagagctcatgacgccaacaaagcagagccctcggtctagtgccagtcttcccagtggtgctgatcaagctccaggtcggtcagcctgggggaccgtaattgtcacggccggccgtggaggtcagatcagaacatttcagaatttcgggtttcctgctcgaatatagtagctctgaggctgctgcctggtcttggcgtctgccctgccgcaagccgccgggtgattttttgtgtatagataggcgaaagtttgggtgatttgcacagcagtctgggattggattttgttgctcctaggcgcacatgcttgcgaatttcaactaacctggtactcaaggtacggcgagttcgtttgcccggaattgtatatgggaatggagcccgggaaggacgagggggcgtcggccggttggagctagatcttttttaggatcttttgacagacatcttttcatctgtttcctccattgagtccagtttagcttttttttttgtactttatgttttactcgtcattatatattcttgtaagaaatcccagttctacagaaatagaaaagcgaaaaggagttgcatagagtggtgaattcgttgtactggtatagcaggcttgagatgttggtagtacaactggtataataattgagcggctaggaaaatatggagagagaaaaaaaaattgagttctgaagcttttggaccttgcttccggagaagtctggcaggtgcgtttctgatgtgtatctactgtcccaactgtcggttgtccaacaaatttcttattcagtttctg

SEQ ID NO: 14759 - DNA, 3180 bp, Zea Mays
agccaggcgcgcggcacggggcaggaaccctggcccgtccgacgagacgacgaaccggccgcgggcctcgtgcccgtggtggtggatatctgactgactgacgccacctgcgcgtagccgcgggcgctttgcttccctcctcgtcgaggcgtgccgacgggacgatttctatccgcggggcggcgctgtgtcgactgtcgactccaactcccaggccggtcaatgagggcgcggagatgagcgccggcggcggggaggaggtgttctacgagtcgcgggacggcgtgctctcctcctcctgctcctccgcctcggacgacgacgacgacgacagcgaccacccgcgacggcggcggcgggacggggccgcctctaccgccgccgcagcggcgctcgacgtgtggacgtccgagccggcgcccgtgcaggagcggcgccggaagctgctccagatgctggggctcgccggggaccccgccctggcgcgcctcgagatgggccgatcggtctcctacgacgacgggcctgtgcccgtccgcccggcgccggcctcgccgcccatctcccgatccagatcagacggcggcgccgtgccggcctcggcgaccaagccgccgctgggagggcggtcgccgggctcctccgaggccacgcccgaaggggaggaggaggaggaggaggaggccgacccgaggtgtctgatccggaacctcgacgacggcagcgagttcgtggtcaaggaagggtccgagctccgcgaggtcggcacgggccggcagctcaccatggaggagttcgttgacctctgcgtcggccgctcgcctatcgtccaggagctcatgcggcggcgcgagaacgttgcgagctccggctcgtccacccccgtccagcgctccaactccgactccagcaacggagcgacgcgccaccggcggcggcggcggcatagcagctggcttcggggcatccggaacgtcgccggctccgtggtggccagctcccgcgaccgccgcagcagcgacgacaaggacacgtgctcggagaaaggcggccgccggtccagctcggccacagacgacagccaggacagcgctggagccgtgcgccacggcccggtgcgcgttaaggtgaggcagtatgggaagtcgtacaaggagctcagtggcctgttcatgaaccaggagatccaggctcacgatggctccatctggagcatcaggtttagtccagatggccggtacctcgcgagtgctggggaagactgcgtgatccatgtctgggaagtgtcagagttcgagaggaaacgcgaggagaacggagcgtgcaatccttttgttgcgatggtgtgcaacggttcgccggagccaacattagccgtggccagcagtgtggatgggagcaatcgtgagaagaagcgtcgggcaaggttcttggagggtcgtaggtctgtgagctcagaccggctaatgctgccagagcatgtgtttgcgctgtcagaaaaaccgattcggaccttcatggggcactcagaagatgtgcttgatctctgctggtccaaatcccagtacttgctttcatcttcaatggataaaacggtgaagttgtggcacatttcgagcacttcctgtctgaaaacattctcacacagtgattatgtggatcactagatgaaaaagtccgcatatggagcattcaaaaccgtgaaattgttgattggaaagatttgcatgaaatgatcactgctgcttgctataccccagatggacagagcgcactaattggttcccataaaggcagctgccatatttatgatacatctgataatatgcttctccaaaagaaacaaattgacctgcaaaataagaaaaagaagtccagtcagaagaaaatcactggatttcagttcctcccagggagtacttcaaaggtccttatcacatctgcagattcaagaatcagggttgttgatggccttaatcttgttcacaagtacaaaggtttccgaaacagtaacagccagatttcagccagtttagctgcaaatgggagttatgtgatctcagcaagtgaggattcccacgtgtacatatggagaatcgatgataaccttgaacagggcagaagcaaggggaatgttactgtcaccaattcctatgaatatttccactgccaggatgtgacagttgccgttgcactgccatctaacggctccccagtggtatccagagcaaactcggcgaagcacgatgagcgggattctgtatcggagcattctgcgctgcatgctgcccctgaaaaaccgcaagactcttctgatttccagcctcaaagtggctataccataagcaccggttcaaatgacagtggtgatagagcaacttggcctgaagagctcatgacgccaacaaagcagagccctcggtctagtgccagtcttcccagtggtgctgatcaagctccaggtcggtcagcctgggggaccgtaattgtcacggccggccgtggaggtcagatcagaacatttcagaatttcgggtttcctgctcgaatatagtagctctgaggctgctgcctggtcttggcgtctgccctgccgcaagccgccgggtgattttttgtgtatagataggcgaaagtttgggtgatttgcacagcagtctgggattggattttgttgctcctaggcgcacatgcttgcgaatttcaactaacctggtactcaaggtacggcgagttcgtttgcccggaattgtatatgggaatggagcccgggaaggacgagggggcgtcggccggttggagctagatcttttttaggatcttttgacagacatcttttcatctgtttcctccattgagtccagtttagcttttttttttgtactttatgttttactcgtcattatatattcttgtaagaaatcccagttctacagaaatagaaaagcgaaaaggagttgcatagagtggtgaattcgttgtactggtatagcaggcttgagatgttggtagtacaactggtataataattgagcggctaggaaaatatggagagagaaaaaaaaattgagttctgaagcttttggaccttgcttccggagaagtctggcaggtgcgtttctgatgtgtatctactgtcccaactgtcggttgtccaacaaatttcttattcagtttctg

SEQ ID NO: 14760 - DNA, 1036 bp, Zea Mays
agcgagggcgtccaccacccttaccgtgcccccgctccagccccgcccgcgccgtcttcctccctgcaatcccgccaccgcccgcgcgtcgtcctttcccttcaatctcgccctcgcccgcgccgtcccttccctgcatcccgtccccgtccgtgagccccctccacacgctcccgtccgcgaccccagatcccgtgactgccgccgtgtcttcgcccctagctccatcatcccgtcgtgtcccgccgtgccatcctccgctccgcgaccaccgcctctgctcccctcgtgcccagcgccgcgtccgcgaaccagcacccctcactctctctcccgcccggctctcctcgcccaactctctctcccgcaatcccacggcctcgccccaaatcgccgccccggctctcggtcctcgcccaagctctccatggaaggagatcgaggaatccgcgtccgctgcgcccggctctctctgcgtccgtagtctccctggaaggcgattcctcgatccgcgtctgctcgcttcggctcctccgttcccaaacctcctcaaccagcatctctagggttttcgcagccaccgcccatggctgccactccggaccgcgtcaatgccgaccttcatcgtcgcctcgccgtcgacactccaccgccgccccagggaggaatcgtccaggcactaagcacaaggaacagatggaatgggtactccatggattaccaaggaaaaaacaagctggtttttagcctaactgatccgaaatcatgcacagcacaaggtagagactgtacgatagttgattgcaccagaaaaatagtagcccagatgggtaagaaagagctgatgggaggcaaggacttctaccatgtggaagtacagtcaggatatgaccaagctttcatcattggggtgatggcaattcttgacagcatacatggagaaagacatgggacaaatagaagacatctaaagctttccaaggcagatgcctccagaggatatctactctctggtcatatgatcgatgcatagatc

SEQ ID NO: 14761 - DNA, 1117 bp, Zea Mays
agcgagggcgtccaccacccttaccgtgcccccgctccagccccgcccgcgccgtcttcctccctgcaatcccgccaccgcccgcgcgtcgtcctttcccttcaatctcgccctcgcccgcgccgtcccttccctgcatcccgtccccgtccgtgagccccctccacacgctcccgtccgcgaccccagatcccgtgactgccgccgtgtcttcgcccctagctccatcatcccgtcgtgtcccgccgtgccatcctccgctccgcgaccaccgcctctgctcccctcgtgcccagcgccgcgtccgcgaaccagcacccctcactctctctcccgcccggctctcctcgcccaactctctctcccgcaatcccacggcctcgccccaaatcgccgccccggctctcggtcctcgcccaagctctccatggaaggagatcgaggaatccgcgtccgctgcgcccggctctctctgcgtccgtagtctccctggaaggcgattcctcgatccgcgtctgctcgcttcggctcctccgttcccaaacctcctcaaccagcatctctagggttttcgcagccaccgcccatggctgccactccggaccgcgtcaatgccgaccttcatcgtcgcctcgccgtcgacactccaccgccgccccaggtagccaggaggaatcgtccaggcactaagcacaaggaacagatggaatgggtactccatggattaccaaggaaaaaacaagctggtttttagcctaactgatccgaaatcatgcacagcacaaggttagagttcatgttgattgcacccaagaggcaatgtaaaaactgggatttcgaaattgggggatcttttgcaggtagagactgtacgatagttgattgcaccagaaaaatagtagcccagatgggtaagaaagagctgatgggaggcaaggacttctaccatgtggaagtacagtcaggatatgaccaagctttcatcattggggtgatggcaattcttgacagcatacatggagaaagacatgggacaaatagaagacatctaaagctttccaaggcagatgcctccagaggatatctactctctggtcatatgatcgatgcatagatc

SEQ ID NO: 14762 - DNA, 965 bp, Zea Mays
agcgagggcgtccaccacccttaccgtgcccccgctccagccccgcccgcgccgtcttcctccctgcaatcccgccaccgcccgcgcgtcgtcctttcccttcaatctcgccctcgcccgcgccgtcccttccctgcatcccgtccccgtccgtgagccccctccacacgctcccgtccgcgaccccagatcccgtgactgccgccgtgtcttcgcccctagctccatcatcccgtcgtgtcccgccgtgccatcctccgctccgcgaccaccgcctctgctcccctcgtgcccagcgccgcgtccgcgaaccagcacccctcactctctctcccgcccggctctcctcgcccaactctctctcccgcaatcccacggcctcgccccaaatcgccgccccggctctcggtcctcgcccaagctctccatggaaggagatcgaggaatccgcgtccgctgcgcccggctctctctgcgtccgtagtctccctggaagccaccgcccatggctgccactccggaccgcgtcaatgccgaccttcatcgtcgcctcgccgtcgacactccaccgccgccccaggtagccagagggaggaatcgtccaggcactaagcacaaggaacagatggaatgggtactccatggattaccaaggaaaaaacaagctggtttttagcctaactgatccgaaatcatgcacagcacaaggtagagactgtacgatagttgattgcaccagaaaaatagtagcccagatgggtaagaaagagctgatgggaggcaaggacttctaccatgtggaagtacagtcaggatatgaccaagctttcatcattggggtgatggcaattcttgacagcatacatggagaaagacatgggacaaatagaagacatctaaagctttccaaggcagatgcctccagaggatatctactctctggtcatatgatcgatgcatagatc

SEQ ID NO: 14763 - DNA, 1292 bp, Zea Mays
agcgagggcgtccaccacccttaccgtgcccccgctccagccccgcccgcgccgtcttcctccctgcaatcccgccaccgcccgcgcgtcgtcctttcccttcaatctcgccctcgcccgcgccgtcccttccctgcatcccgtccccgtccgtgagccccctccacacgctcccgtccgcgaccccagatcccgtgactgccgccgtgtcttcgcccctagctccatcatcccgtcgtgtcccgccgtgccatcctccgctccgcgaccaccgcctctgctcccctcgtgcccagcgccgcgtccgcgaaccagcacccctcactctctctcccgcccggctctcctcgcccaactctctctcccgcaatcccacggcctcgccccaaatcgccgccccggctctcggtcctcgcccaagctctccatggaaggagatcgaggaatccgcgtccgctgcgcccggctctctctgcgtccgtagtctccctggaaggcgattcctcgatccgcgtctgctcgcttcggctcctccgttcccaaacctcctcaaccagcatctctagggttttcgcagccaccgcccatggctgccactccggaccgcgtcaatgccgaccttcatcgtcgcctcgccgtcgacactccaccgccgccccaggtagccagagggaggaatcgtccaggcactaagcacaaggaacagatggaatgggtactccatggattaccaaggaaaaaacaagctggtttttagcctaactgatccgaaatcatgcacagcacaaggtagagactgtacgatagttgattgcaccagaaaaatagtagcccagattaaaggcatatcccatgagagcagaaaataatatgtctacatctagatgtctatagacatggtgcatttttttggctaagaaaaatgtataaccgtctctagaaatagtgctaccctgtgatgtacatgtgtttgcaagtacttgtatgaaagtgtagaagtttaagggcagcattacactcatgccaccagcatttgagtgtcagaggggttgagatctaaagacatagtatatgttctgcagatgggtaagaaagagctgatgggaggcaaggacttctaccatgtggaagtacagtcaggatatgaccaagctttcatcattggggtgatggcaattcttgacagcatacatggagaaagacatgggacaaatagaagacatctaaagctttccaaggcagatgcctccagaggatatctactctctggtcatatgatcgatgcatagatc

SEQ ID NO: 14764 - DNA, 1288 bp, Zea Mays
agcgagggcgtccaccacccttaccgtgcccccgctccagccccgcccgcgccgtcttcctccctgcaatcccgccaccgcccgcgcgtcgtcctttcccttcaatctcgccctcgcccgcgccgtcccttccctgcatcccgtccccgtccgtgagccccctccacacgctcccgtccgcgaccccagatcccgtgactgccgccgtgtcttcgcccctagctccatcatcccgtcgtgtcccgccgtgccatcctccgctccgcgaccaccgcctctgctcccctcgtgcccagcgccgcgtccgcgaaccagcacccctcactctctctcccgcccggctctcctcgcccaactctctctcccgcaatcccacggcctcgccccaaatcgccgccccggctctcggtcctcgcccaagctctccatggaaggagatcgaggaatccgcgtccgctgcgcccggctctctctgcgtccgtagtctccctggaaggcgattcctcgatccgcgtctgctcgcttcggctcctccgttcccaaacctcctcaaccagcatctctagggttttcgcagccaccgcccatggctgccactccggaccgcgtcaatgccgaccttcatcgtcgcctcgccgtcgacactccaccgccgccccaggtagccggaggaatcgtccaggcactaagcacaaggaacagatggaatgggtactccatggattaccaaggaaaaaacaagctggtttttagcctaactgatccgaaatcatgcacagcacaaggtagagactgtacgatagttgattgcaccagaaaaatagtagcccagattaaaggcatatcccatgagagcagaaaataatatgtctacatctagatgtctatagacatggtgcatttttttggctaagaaaaatgtataaccgtctctagaaatagtgctaccctgtgatgtacatgtgtttgcaagtacttgtatgaaagtgtagaagtttaagggcagcattacactcatgccaccagcatttgagtgtcagaggggttgagatctaaagacatagtatatgttctgcagatgggtaagaaagagctgatgggaggcaaggacttctaccatgtggaagtacagtcaggatatgaccaagctttcatcattggggtgatggcaattcttgacagcatacatggagaaagacatgggacaaatagaagacatctaaagctttccaaggcagatgcctccagaggatatctactctctggtcatatgatcgatgcatagatc

SEQ ID NO: 14765 - DNA, 742 bp, Zea Mays
accagagaacactcaagtctcccaactgcccgcctgccgaggttggatgtggctccaccagctctgcctccctacttcctctactgctgcggctactgctacatcatctatcgtgcctgtttttctaggaatcttaatggcatcaggctgacattttgttcaactcattagatgcgacaggatcacaagtaggaggagctgcgacgatgctgtagcgagagacatgggtgccgaggtcgttgtgctgcggtggtggcaggacaggaaggaaacgaaaaagcaggagccagggttgttcaacaacgtgaccgagtcgctgaggcgaggaagagtaaggtgaaggcactcgtcgacgcctttgagactgacagagcgtcatctcgctgcaggaaaccagcaagcctgctgctgctccagctatgaaagtaggtgtcgtgccatgagtgcttcttgacctgcagtgtgcatgatcacctttcttggaattttaaactttttttggttgttagtgaccgtaaaagtggcgcttgttgaggtttgctcgttcccatgtaaactgacttttctcatgggagttttcatacttttgtagtgctagaaaaaggaaagtctgtacaggttttgtgtctatgcaaggcttgagaagttggcattgtactgataagtgataagtaaacaagttattgtaatgatttaaactagattgttttgaaaggaaatggaatgcataaagcaaattaaa

SEQ ID NO: 14766 - DNA, 1908 bp, Zea Mays
accagagaacactcaagtctcccaactgcccgcctgccgaggttggatgtggctccaccagctctgcctccctacttcctctactgctgcggctactgctacatcatctatcgtgcctgtttttctaggaatcttaatggcatcaggctgacattttgttcaactcattaggtgcgtcaacactgaaattcactcttacggtcatgttttgttattgcattagagtttgcagcatgaatcagggacatccaatgttgttagatctattaatgcgatgttctctgtcttatttttatcctacaagtcatttcgagatatgtggttgctgatcagatgcgggcaatgtcaattttattattggaattgttaacttgacactcattcaccttctggactgaaaaccaagacagtactgcatctatttagttaaacatatattacttggctgctaacacaactaagagaaatactgaaaatcaatccttcagtctatccttccataggattttaatttgtgcatgatagagagttttacatgtcagaaatttatagatgtcagagagttcattgcagttcatctccttcactgcatcttgcatattttttctctctttcagctggttacagtaacaaggaaccaccattttgatgcaaaggagcagatgcgacaggatcacaagtaggaggagctgcgacgatgctgtagcgagagacatgggtgccgaggtcgttgtgctgcggtggtggcaggacaggaaggaaacgaaaaagcaggagccagggttgttcaacaacgtgaccgagtcgctgaggcgaggaagagtaaggtgaaggcactcgtcgacgcctttgagactgacagagcgtcatctcgctgcaggaaaccagcaagcctgctgctgctccagctatgaaaattggtgtttttgtaaaagcatgcaaggaacagattgatatcctaaagaacaggatccaagaagaagagaagaatggaagtggaaagacatggcttggcactagggatgggagttcccggttggacttgatagctcatcagcatggtgtggttctaattttaagtgagcgtctccactcggtaactgctcaattcgatcgtcttcggtccatgcgttttcaagatgctattaacagagctatgccaaggaagaatcagaagagaccagaaaaaaaacctgctgaaccgtccaagtccagtcttgttctaaaatctgatgtatcaaagattgtagatcaggaagcgtccacagcacctatgagagttcaagaacaactactggatgatgaaacaaaagccctccaggtggagttgacaagtcttcttgatgctgtccaagaaacggagacaaagatgatagaaatgtcagcacttaaccatcttatgtcaacacatgttctacaacaagctcaacaaatccagtatttgtatgaccaggctgttgaagctacgaataacgtggagcgtgggaacaaggagctatcccaggcgatccagcgcaacagcagcagtagaacctttctcctcctcttcttctttgttctcactttctcggttctttttcttgactggtacaacaactgagttagcatatgaagacattgtatgctgttcatgggaaatggttaaattatgaaagctggtctgtcttgaagtccaaaccttttaggtagtctgttactttctaagagtagtgatcaagctgctgttcatctgaatacgccgggatttgtcatttcatttctgacgtgcaagctacagaagcgatgggattgtagagaggacagacagtggtcagggcatcaggccatttccagtcagttgtcaacagcgtcgtcgtcatccagagtaccttaagcattgaagtcgatattttctttgctcttgcgaaa

SEQ ID NO: 14767 - DNA, 2092 bp, Zea Mays
accagagaacactcaagtctcccaactgcccgcctgccgaggttggatgtggctccaccagctctgcctccctacttcctctactgctgcggctactgctacatcatctatcgtgcctgtttttctaggaatcttaatggcatcaggctgacattttgttcaactcattaggtgcgtcaacactgaaattcactcttacggtcatgttttgttattgcattagagtttgcagcatgaatcagggacatccaatgttgttagatctattaatgcgatgttctctgtcttatttttatcctacaagtcatttcgagatatgtggttgctgatcagatgcgggcaatgtcaattttattattggaattgttaacttgacactcattcaccttctggactgaaaaccaagacagtactgcatctatttagttaaacatatattacttggctgctaacacaactaagagaaatactgaaaatcaatccttcagtctatccttccataggattttaatttgtgcatgatagagagttttacatgtcagaaatttatagatgtcagagagttcattgcagttcatctccttcactgcatcttgcatattttttctctctttcagctggttacagtaacaaggaaccaccattttgatgcaaaggtaagcatctgcattttactcgagttacatgtcactgctaccccttaatcccggggtgcctttgatttgcgacatccaggagcagatgcgacaggatcacaagtaggaggagctgcgacgatgctgtagcgagagacatgggtgccgaggtcgttgtgctgcggtggtggcaggacaggaaggaaacgaaaaagcaggagccagggttgttcaacaacgtgaccgagtcgctgaggcgaggaagagtaaggtgaaggcactcgtcgacgcctttgagactgacagagcgtcatctcgctgcaggaaaccagcaagcctgctgctgctccagctatgaaacttgagagcatcagggagctcgagaggttcatagtgaagcataggagggattatgtggacctgcatcgcattaccgagcaagagagggataacattgagcatgaaattggtgtttttgtaaaagcatgcaaggaacagattgatatcctaaagaacaggatccaagaagaagagaagaatggaagtggaaagacatggcttggcactagggatgggagttcccggttggacttgatagctcatcagcatggtgtggttctaattttaagtgagcgtctccactcggtaactgctcaattcgatcgtcttcggtccatgcgttttcaagatgctattaacagagctatgccaaggaagaatcagaagagaccagaaaaaaaacctgctgaaccgtccaagtccagtcttgttctaaaatctgatgtatcaaagattgtagatcaggaagcgtccacagcacctatgagagttcaagaacaactactggatgatgaaacaaaagccctccaggtggagttgacaagtcttcttgatgctgtccaagaaacggagacaaagatgatagaaatgtcagcacttaaccatcttatgtcaacacatgttctacaacaagctcaacaaatccagtatttgtatgaccaggctgttgaagctacgaataacgtggagcgtgggaacaaggagctatcccaggcgatccagcgcaacagcagcagtagaacctttctcctcctcttcttctttgttctcactttctcggttctttttcttgactggtacaacaactgagttagcatatgaagacattgtatgctgttcatgggaaatggttaaattatgaaagctggtctgtcttgaagtccaaaccttttaggtagtctgttactttctaagagtagtgatcaagctgctgttcatctgaatacgccgggatttgtcatttcatttctgacgtgcaagctacagaagcgatgggattgtagagaggacagacagtggtcagggcatcaggccatttccagtcagttgtcaacagcgtcgtcgtcatccagagtaccttaagcattgaagtcgatattttctttgctcttgcgaaa

SEQ ID NO: 14768 - DNA, 2157 bp, Zea Mays
gtcccactggtcgtaggccgcgatgtggcgcctctgtacacgcctacacagaaaagcgtctcccatcttgacgacccgtcttcgacctcgctcccacctcgccgcccgatcccgacgggctggatcgccggcgaccgaccgttgtcgatacgaagtgcagctgtaggctcttcctgccgatcccctgcgtttgcgttccataatagcacgaccagcgcatctcaccggctcaagagcatccgtggatctgaccggaggaggccgcggctgctactgctactgctctctcggcgatgtcgagggttcgggacaggacggaggacttcaaggaggccgtccgagttgccgcgctctcccatggatacacggaggcccaactggctgcgctgatgtcgtctttcatcatccggaagccgtcgcccaaatcgccgttcactaatgccgccatcaagacgcttgagagcatcagggagctcgagaggttcatagtgaagcataggagggattatgtggacctgcatcgcattaccgagcaagagagggataacattgagcatgaaattggtgtttttgtaaaagcatgcaaggaacagattgatatcctaaagaacaggatccaagaagaagagaagaatggaagtggaaagacatggcttggcactagggatgggagttcccggttggacttgatagctcatcagcatggtgtggtatggttattctccttaccattgctgttataagttaaaaggttaatttgttctttgaggtatttagcagtagaactgacctgaatgcattccatttagagatgacgcaaagtaattccttagatacctgttacggtttctacatgtattatgaatttatgatccaagatttctttttattagagccaattgagcaggtcatcctgttgaggattgattgttttcaacatttcctttccaaatttttgagctggatgcatatttcactagctggtagtaggatatcagactttgattggttgatttcatttggtaggataaaaattatacagtgtgatttttagaggacagattgcctagtcaaaacaggtgaacttgaataatatctactttcattttcttgttcagggctgcataggtaagagcatgtacaggcgagtacctacctctatttttctttgttgttcatttttctctaatatccaaatcttagtagcagtcaatcatcagttctaagtctgaactacaatttttttgcagtagtcttaggaattttcttgtgcccagctccagtaagctgtttattctgtgttgaactttaccaggttctaattttaagtgagcgtctccactcggtaactgctcaattcgatcgtcttcggtccatgcgttttcaagatgctattaacagagctatgccaaggaagaatcagaagagaccagaaaaaaaacctgctgaaccgtccaagtccagtcttgttctaaaatctgatgtatcaaagattgtagatcaggaagcgtccacagcacctatgagagttcaagaacaactactggatgatgaaacaaaagccctccaggtggagttgacaagtcttcttgatgctgtccaagaaacggagacaaagatgatagaaatgtcagcacttaaccatcttatgtcaacacatgttctacaacaagctcaacaaatccagtatttgtatgaccaggctgttgaagctacgaataacgtggagcgtgggaacaaggagctatcccaggcgatccagcgcaacagcagcagtagaacctttctcctcctcttcttctttgttctcactttctcggttctttttcttgactggtacaacaactgagttagcatatgaagacattgtatgctgttcatgggaaatggttaaattatgaaagctggtctgtcttgaagtccaaaccttttaggtagtctgttactttctaagagtagtgatcaagctgctgttcatctgaatacgccgggatttgtcatttcatttctgacgtgcaagctacagaagcgatgggattgtagagaggacagacagtggtcagggcatcaggccatttccagtcagttgtcaacagcgtcgtcgtcatccagagtaccttaagcattgaagtcgatattttctttgctcttgcgaaa

SEQ ID NO: 14769 - DNA, 1829 bp, Zea Mays
gtaggccgcgatgtggcgcctctgtacacgcctacacagaaaagcgtctcccatcttgacgacccgtcttcgacctcgctcccacctcgccgcccgatcccgacgggctggatcgccggcgaccgaccgttgtcgatacgaagtgcagctgtaggctcttcctgccgatcccctgcgtttgcgttccataatagcacgaccagcgcatctcaccggctcaagagcatccgtggatctgaccggaggaggccgcggctgctactgctactgctctctcggcgatgtcgagggttcgggacaggacggaggacttcaaggaggccgtccgagttgccgcgctctcccatggatacacggaggcccaactggctgcgctgatgtcgtctttcatcatccggaagccgtcgcccaaatcgccgttcactaatgccgccatcaagacgcttgagagcatcagggagctcgagaggttcatagtgaagcataggagggattatgtggacctgcatcgcattaccgagcaagagagggataacattgagcatgaaattggtgtttttgtaaaagcatgcaaggaacagattgatatcctaaagaacaggatccaagaagaagagaagaatggaagtggaaagacatggcttggcactagggatgggagttcccggttggacttgatagctcatcagcatggtgtggataaaaattatacagtgtgatttttagaggacagattgcctagtcaaaacaggtgaacttgaataatatctactttcattttcttgttcagggctgcataggtaagagcatgtacaggcgagtacctacctctatttttctttgttgttcatttttctctaatatccaaatcttagtagcagtcaatcatcagttctaagtctgaactacaatttttttgcagtagtcttaggaattttcttgtgcccagctccagtaagctgtttattctgtgttgaactttaccaggttctaattttaagtgagcgtctccactcggtaactgctcaattcgatcgtcttcggtccatgcgttttcaagatgctattaacagagctatgccaaggaagaatcagaagagaccagaaaaaaaacctgctgaaccgtccaagtccagtcttgttctaaaatctgatgtatcaaagattgtagatcaggaagcgtccacagcacctatgagagttcaagaacaactactggatgatgaaacaaaagccctccaggtggagttgacaagtcttcttgatgctgtccaagaaacggagacaaagatgatagaaatgtcagcacttaaccatcttatgtcaacacatgttctacaacaagctcaacaaatccagtatttgtatgaccaggctgttgaagctacgaataacgtggagcgtgggaacaaggagctatcccaggcgatccagcgcaacagcagcagtagaacctttctcctcctcttcttctttgttctcactttctcggttctttttcttgactggtacaacaactgagttagcatatgaagacattgtatgctgttcatgggaaatggttaaattatgaaagctggtctgtcttgaagtccaaaccttttaggtagtctgttactttctaagagtagtgatcaagctgctgttcatctgaatacgccgggatttgtcatttcatttctgacgtgcaagctacagaagcgatgggattgtagagaggacagacagtggtcagggcatcaggccatttccagtcagttgtcaacagcgtcgtcgtcatccagagtaccttaagcattgaagtcgatattttctttgctcttgcgaaa

SEQ ID NO: 14770 - DNA, 1487 bp, Zea Mays
gtaggccgcgatgtggcgcctctgtacacgcctacacagaaaagcgtctcccatcttgacgacccgtcttcgacctcgctcccacctcgccgcccgatcccgacgggctggatcgccggcgaccgaccgttgtcgatacgaagtgcagctgtaggctcttcctgccgatcccctgcgtttgcgttccataatagcacgaccagcgcatctcaccggctcaagagcatccgtggatctgaccggaggaggccgcggctgctactgctactgctctctcggcgatgtcgagggttcgggacaggacggaggacttcaaggaggccgtccgagttgccgcgctctcccatggatacacggaggcccaactggctgcgctgatgtcgtctttcatcatccggaagccgtcgcccaaatcgccgttcactaatgccgccatcaagacgcttgagagcatcagggagctcgagaggttcatagtgaagcataggagggattatgtggacctgcatcgcattaccgagcaagagagggataacattgagcatgaagatccaagaagaagagaagaatggaagtggaaagacatggcttggcactagggatgggagttcccggttggacttgatagctcatcagcatggtgtggttctaattttaagtgagcgtctccactcggtaactgctcaattcgatcgtcttcggtccatgcgttttcaagatgctattaacagagctatgccaaggaagaatcagaagagaccagaaaaaaaacctgctgaaccgtccaagtccagtcttgttctaaaatctgatgtatcaaagattgtagatcaggaagcgtccacagcacctatgagagttcaagaacaactactggatgatgaaacaaaagccctccaggtggagttgacaagtcttcttgatgctgtccaagaaacggagacaaagatgatagaaatgtcagcacttaaccatcttatgtcaacacatgttctacaacaagctcaacaaatccagtatttgtatgaccaggctgttgaagctacgaataacgtggagcgtgggaacaaggagctatcccaggcgatccagcgcaacagcagcagtagaacctttctcctcctcttcttctttgttctcactttctcggttctttttcttgactggtacaacaactgagttagcatatgaagacattgtatgctgttcatgggaaatggttaaattatgaaagctggtctgtcttgaagtccaaaccttttaggtagtctgttactttctaagagtagtgatcaagctgctgttcatctgaatacgccgggatttgtcatttcatttctgacgtgcaagctacagaagcgatgggattgtagagaggacagacagtggtcagggcatcaggccatttccagtcagttgtcaacagcgtcgtcgtcatccagagtaccttaagcattgaagtcgatattttctttgctcttgcgaaa

SEQ ID NO: 14771 - DNA, 2040 bp, Zea Mays
gtaggccgcgatgtggcgcctctgtacacgcctacacagaaaagcgtctcccatcttgacgacccgtcttcgacctcgctcccacctcgccgcccgatcccgacgggctggatcgccggcgaccgaccgttgtcgatacgaagtgcagctgtaggctcttcctgccgatcccctgcgtttgcgttccataatagcacgaccagcgcatctcaccggctcaagagcatccgtggatctgaccggaggaggccgcggctgctactgctactgctctctcggcgatgtcgagggttcgggacaggacggaggacttcaaggaggccgtccgagttgccgcgctctcccatggatacacggaggcccaactggctgcgctgatgtcgtctttcatcatccggaagccgtcgcccaaatcgccgttcactaatgccgccatcaagacgattggtgtttttgtaaaagcatgcaaggaacagattgatatcctaaagaacaggatccaagaagaagagaagaatggaagtggaaagacatggcttggcactagggatgggagttcccggttggacttgatagctcatcagcatggtgtggtatggttattctccttaccattgctgttataagttaaaaggttaatttgttctttgaggtatttagcagtagaactgacctgaatgcattccatttagagatgacgcaaagtaattccttagatacctgttacggtttctacatgtattatgaatttatgatccaagatttctttttattagagccaattgagcaggtcatcctgttgaggattgattgttttcaacatttcctttccaaatttttgagctggatgcatatttcactagctggtagtaggatatcagactttgattggttgatttcatttggtaggataaaaattatacagtgtgatttttagaggacagattgcctagtcaaaacaggtgaacttgaataatatctactttcattttcttgttcagggctgcataggtaagagcatgtacaggcgagtacctacctctatttttctttgttgttcatttttctctaatatccaaatcttagtagcagtcaatcatcagttctaagtctgaactacaatttttttgcagtagtcttaggaattttcttgtgcccagctccagtaagctgtttattctgtgttgaactttaccaggttctaattttaagtgagcgtctccactcggtaactgctcaattcgatcgtcttcggtccatgcgttttcaagatgctattaacagagctatgccaaggaagaatcagaagagaccagaaaaaaaacctgctgaaccgtccaagtccagtcttgttctaaaatctgatgtatcaaagattgtagatcaggaagcgtccacagcacctatgagagttcaagaacaactactggatgatgaaacaaaagccctccaggtggagttgacaagtcttcttgatgctgtccaagaaacggagacaaagatgatagaaatgtcagcacttaaccatcttatgtcaacacatgttctacaacaagctcaacaaatccagtatttgtatgaccaggctgttgaagctacgaataacgtggagcgtgggaacaaggagctatcccaggcgatccagcgcaacagcagcagtagaacctttctcctcctcttcttctttgttctcactttctcggttctttttcttgactggtacaacaactgagttagcatatgaagacattgtatgctgttcatgggaaatggttaaattatgaaagctggtctgtcttgaagtccaaaccttttaggtagtctgttactttctaagagtagtgatcaagctgctgttcatctgaatacgccgggatttgtcatttcatttctgacgtgcaagctacagaagcgatgggattgtagagaggacagacagtggtcagggcatcaggccatttccagtcagttgtcaacagcgtcgtcgtcatccagagtaccttaagcattgaagtcgatattttctttgctcttgcgaaa

SEQ ID NO: 14772 - DNA, 2170 bp, Zea Mays
gtaggccgcgatgtggcgcctctgtacacgcctacacagaaaagcgtctcccatcttgacgacccgtcttcgacctcgctcccacctcgccgcccgatcccgacgggctggatcgccggcgaccgaccgttgtcgatacgaagtgcagctgtaggctcttcctgccgatcccctgcgtttgcgttccataatagcacgaccagcgcatctcaccggctcaagagcatccgtggatctgaccggaggaggccgcggctgctactgctactgctctctcggcgatgtcgagggttcgggacaggacggaggacttcaaggaggccgtccgagttgccgcgctctcccatggatacacggaggcccaactggctgcgctgatgtcgtctttcatcatccggaagccgtcgcccaaatcgccgttcactaatgccgccatcaagacgcttgagagcatcagggagctcgagaggttcatagtgaagcataggagggattatgtggacctgcatcgcattaccgagcaagagagggataacattgagcatgaagtaagttgtatactgtgtcgtttggtttgatttgctatcacttttcctgtgatggcgcctgcatgaaatcttaaaatgtgtgtattactcaacccatgtgcttaatgttcataaaagaattgtctagtgtgctgtttgcctgtttggcactgcattacaattctctagcattgtaatatgcttgaagccttcaatgtttgaaaacttcaatggaagcttttatgcctggaggctgaagctcaattgcacaaaagatacctattgttgtagctgtaccatgtcatgtacctttttgtaaattatatacttggctgccaagtttttttcacaactgtacaaatctaatcttggattacaattatcgaagactgcaagccctaaaaaattgcttaagagcctgtatatatatgcacgatcagtatcctccttgatgttcaaacagtcagttaatgtaggctgtgcttctctctgcacactattaatctacgtttggatatagtggaatgttcctcttgtatagactattggcttgacaacctatattcatactggcacgctgcacattgattcatataacctgctttctgttatcaacctagtacttatttctaactactcaatgcatattagattggtgtttttgtaaaagcatgcaaggaacagattgatatcctaaagaacaggatccaagaagaagagaagaatggaagtggaaagacatggcttggcactagggatgggagttcccggttggacttgatagctcatcagcatggtgtggttctaattttaagtgagcgtctccactcggtaactgctcaattcgatcgtcttcggtccatgcgttttcaagatgctattaacagagctatgccaaggaagaatcagaagagaccagaaaaaaaacctgctgaaccgtccaagtccagtcttgttctaaaatctgatgtatcaaagattgtagatcaggaagcgtccacagcacctatgagagttcaagaacaactactggatgatgaaacaaaagccctccaggtggagttgacaagtcttcttgatgctgtccaagaaacggagacaaagatgatagaaatgtcagcacttaaccatcttatgtcaacacatgttctacaacaagctcaacaaatccagtatttgtatgaccaggctgttgaagctacgaataacgtggagcgtgggaacaaggagctatcccaggcgatccagcgcaacagcagcagtagaacctttctcctcctcttcttctttgttctcactttctcggttctttttcttgactggtacaacaactgagttagcatatgaagacattgtatgctgttcatgggaaatggttaaattatgaaagctggtctgtcttgaagtccaaaccttttaggtagtctgttactttctaagagtagtgatcaagctgctgttcatctgaatacgccgggatttgtcatttcatttctgacgtgcaagctacagaagcgatgggattgtagagaggacagacagtggtcagggcatcaggccatttccagtcagttgtcaacagcgtcgtcgtcatccagagtaccttaagcattgaagtcgatattttctttgctcttgcgaaa

SEQ ID NO: 14773 - DNA, 1581 bp, Zea Mays
gtaggccgcgatgtggcgcctctgtacacgcctacacagaaaagcgtctcccatcttgacgacccgtcttcgacctcgctcccacctcgccgcccgatcccgacgggctggatcgccggcgaccgaccgttgtcgatacgaagtgcagctgtaggctcttcctgccgatcccctgcgtttgcgttccataatagcacgaccagcgcatctcaccggctcaagagcatccgtggatctgaccggaggaggccgcggctgctactgctactgctctctcggcgatgtcgagggttcgggacaggacggaggacttcaaggaggccgtccgagttgccgcgctctcccatggatacacggaggcccaactggctgcgctgatgtcgtctttcatcatccggaagccgtcgcccaaatcgccgttcactaatgccgccatcaagacggttgccagtatagttgtttgatgggttttgttgatgtgtagcttgagagcatcagggagctcgagaggttcatagtgaagcataggagggattatgtggacctgcatcgcattaccgagcaagagagggataacattgagcatgaaattggtgtttttgtaaaagcatgcaaggaacagattgatatcctaaagaacaggatccaagaagaagagaagaatggaagtggaaagacatggcttggcactagggatgggagttcccggttggacttgatagctcatcagcatggtgtggttctaattttaagtgagcgtctccactcggtaactgctcaattcgatcgtcttcggtccatgcgttttcaagatgctattaacagagctatgccaaggaagaatcagaagagaccagaaaaaaaacctgctgaaccgtccaagtccagtcttgttctaaaatctgatgtatcaaagattgtagatcaggaagcgtccacagcacctatgagagttcaagaacaactactggatgatgaaacaaaagccctccaggtggagttgacaagtcttcttgatgctgtccaagaaacggagacaaagatgatagaaatgtcagcacttaaccatcttatgtcaacacatgttctacaacaagctcaacaaatccagtatttgtatgaccaggctgttgaagctacgaataacgtggagcgtgggaacaaggagctatcccaggcgatccagcgcaacagcagcagtagaacctttctcctcctcttcttctttgttctcactttctcggttctttttcttgactggtacaacaactgagttagcatatgaagacattgtatgctgttcatgggaaatggttaaattatgaaagctggtctgtcttgaagtccaaaccttttaggtagtctgttactttctaagagtagtgatcaagctgctgttcatctgaatacgccgggatttgtcatttcatttctgacgtgcaagctacagaagcgatgggattgtagagaggacagacagtggtcagggcatcaggccatttccagtcagttgtcaacagcgtcgtcgtcatccagagtaccttaagcattgaagtcgatattttctttgctcttgcgaaa

SEQ ID NO: 14774 - DNA, 2459 bp, Zea Mays
atgccccaccaggcaccaggttgctgggtttgggcctcacggtccagcagatgccagccagttgccacgcgtttcatcagcccgacccaaccaaagccagaagacacggtgccgtcagctgtgctcccggcgctcccgcaccacaagcaagcgcgtgcgcgccgtcaagtcgcctctacagcaacttccaccgcgtactccctccctccctcgtctcgtcttcgtctccaggtttcgcgggggccaaggtttctgccggagcagtcgcggtctgcgctgcggcacggcgacgaggtggggatggagtaccgcgacaagctcgtgctggcgcccatggtccgcgtgggcaccttgccatttaggctactggctgctgaatatggtgctgatattacttatggagaagaaattattgatcacaaattcttgaagtgtgagcgtgttacaaatgaatctcttgggactactgattttgtggagaaagggactgacagtgtagttttccgtacatgcccacaagaaaggggcagggttgtattccaaatgggcacatcaaatgctgtgagggcacttaaagctgctcagatcgtgtgccgtgatgtttctgctatagatatcaacatgggttgtccaaagtctttttcacttagtggagggatgggtgctgcattactctccaaacctgagcttatacacgatattctgacaacactgcggaggaacttggacacaactgtgacatgtaaaatccgtcttctgaacacacctaaagacactgtggagttggcacgccggattgagaaaactggtgttcctgctcttgctgtccatggaagaaagattaaagatagaccgagagatcttgccaagtgggatgagatagctgatgttgtgtcagcgctgtcaattccagttatagctaatggagatgtctttgagtatgaggattttaagagaattaaagatgcaacaggtgccgcgtctgttatggttgctagaggtgctatgtggaatgcctccatcttttgtgccaaaggaaaaacaccttgggaggatgtcaaaagagagtatgtaagaaagagcatattgtgggacaacgatgtgaagagcacgaaacataccttgaaagaaatgataatgcactattcttgccttgaacttcctgaggggaaaggcgttataaagtgtgatacatctgaagatttagcgagactatacggggaagaggactactataattttgttgttgcaaataggaaatgaatacaatttgatgttgtgagctctcatgtgtaccagcaaaaccggtgaaacttgcctggaacttgaagaaagatgttcacttgcatgattaaattgcaaatcagaggtacccatggccacaatgtaatttcgaaaggttttttcatcataataaaaaattgcaataattcagtgatcaatgggtaatggagcagaactctcaacttcatgattgattattcgcttcgattaaagccagctgtttggactgctgtagctgcaatccatagagataaaacactgtagaagcaatagaagcctacggattaaagtcaagcaaacaggctagacctctctctttctctgaaaaatgtactaccaagaacctgcatatctacatacaatgacacctctcctcacctgcccgtgacgctgagctgccttcgccccccccccccctcccccttcgccgccgctgcctagatgtttcatttcatctttgtgcgtgtgaggcacacggcacgataaggacgaatgttgggtggggctgctccctctttcaatggaatgacatggtcaatatcacgttgaggagggacttttgtgtactcctgacagaattcagagtattgttgcagtaaggcttgaatagccagacgaagagtgtggtgcctgcagagacaagctgttgagatgcagaatgaaactagaaatgcctttgttgagaagcttgttcattatccttttcagttgttcagtgtacgcatcctgagatgtacaatcctttaatgagaggagagtatcatcttctaaggagtcaagggtgttgttcaaggcatgttcctgaatagagaatgcagtgcctgttatgattgccccagatcttctgcttggattcctatctcaccctttattgatgggattaggaggaattcctgccaccaaggacaacgggatttgccattttggcgctgtctggacttaacactgaagctgctgatctttctcttgtactggtaatagttaggtttatacctgaaattaatcaaacaccatttttttgtaacaaatactaatttatttgctttctatactatggaaattttgtcatgtattgttggtggaaatactattgcgcttttgaaggaattgaaagactttgatatgttgactactattatggccctatggtctaagaaatattaaatgttttcatg

SEQ ID NO: 14775 - DNA, 2979 bp, Zea Mays
atgccccaccaggcaccaggttgctgggtttgggcctcacggtccagcagatgccagccagttgccacgcgtttcatcagcccgacccaaccaaagccagaagacacggtgccgtcagctgtgctcccggcgctcccgcaccacaagcaagcgcgtgcgcgccgtcaagtcgcctctacagcaacttccaccgcgtactccctccctccctcgtctcgtcttcgtctccaggtttcgcgggggccaaggtttctgccggagcagtcgcggtctgcgctgcggcacggcgacgaggtggggatggagtaccgcgacaagctcgtgctggcgcccatggtccgcgtgggcaccttgccatttaggctactggctgctgaatatggtgctgatattacttatggagaagaaattattgatcacaaattcttgaagtgtgagcgtgttacaaatgaatctcttgggactactgattttgtggagaaagggactgacagtgtagttttccgtacatgcccacaagaaaggggcagggttgtattccaaatgggcacatcaaatgctgtgagggcacttaaagctgctcagatcgtgtgccgtgatgtttctgctatagatatcaacatgggttgtccaaagtctttttcacttagtggagggatgggtgctgcattactctccaaacctgagcttatacacgatattctgacaacactgcggaggaacttggacacaactgtgacatgtaaaatccgtcttctgaacacacctaaagacactgtggagttggcacgccggattgagaaaactggtgttcctgctcttgctgtccatggaagaaagattaaagatagaccgagagatcttgccaagtgggatgagatagctgatgttgtgtcagcgctgtcaattccagttatagctaatggagatgtctttgagtatgaggattttaagagaattaaagatgcaacaggtttttgtttatttatactgtcatttcatagtttgctctgtttaatttgagttttcacctctatcagttagcaatcttgaaactgctttttaatatgcatctattcggactgctagaaaacttcaactgtttcttgaacgttgtatgccattaaacagaaaaaaggagctatcacatcattttttttaatgatgaacgcatataaaaatggtttctgaagaaatgactctgagatactttcatccttgctacgtgtttcctaacatgaattggtagatagagcttcgcctgttattttcaattgtagttgatatatccctataactgttaggtgccgcgtctgttatggttgctagaggtgctatgtggaatgcctccatcttttgtgccaaaggaaaaacaccttgggaggatgtcaaaagagagtatgtaagaaagagcatattgtgggacaacgatgtgaagagcacgaaacataccttgaaagaaatgataatgcactattcttgccttgaacttcctgaggggaaaggcgttataaagtgtgatacatctgaagatttagcgagactatacggggaagaggactactataattttgttgttgcaaataggaaatgaatacaatttgatgttgtgagctctcatgtgtaccaggtatctatttccgaatacattgggtctagagctagtgaaaaaggaaataatattatgtgaaactgatgaagttgatagtttcatgtagtctacatgcggtactttttccttgcaaataacaattacttgcaaaataagcatgtttgttgacatgggtttcaaaactaaaattggttccagttccttggccaggtagccactcttaataggggcttgcatgctggtagtctgtaaactagcgattagagtttgtaaatgtatgatactgatcaagaagtcaagaactggctaaactaaatggtattttacctggacccagcaaaaccggtgaaacttgcctggaacttgaagaaagatgttcacttgcatgattaaattgcaaatcagaggtacccatggccacaatgtaatttcgaaaggttttttcatcataataaaaaattgcaataattcagtgatcaatgggtaatggagcagaactctcaacttcatgattgattattcgcttcgattaaagccagctgtttggactgctgtagctgcaatccatagagataaaacactgtagaagcaatagaagcctacggattaaagtcaagcaaacaggctagacctctctctttctctgaaaaatgtactaccaagaacctgcatatctacatacaatgacacctctcctcacctgcccgtgacgctgagctgccttcgccccccccccccctcccccttcgccgccgctgcctagatgtttcatttcatctttgtgcgtgtgaggcacacggcacgataaggacgaatgttgggtggggctgctccctctttcaatggaatgacatggtcaatatcacgttgaggagggacttttgtgtactcctgacagaattcagagtattgttgcagtaaggcttgaatagccagacgaagagtgtggtgcctgcagagacaagctgttgagatgcagaatgaaactagaaatgcctttgttgagaagcttgttcattatccttttcagttgttcagtgtacgcatcctgagatgtacaatcctttaatgagaggagagtatcatcttctaaggagtcaagggtgttgttcaaggcatgttcctgaatagagaatgcagtgcctgttatgattgccccagatcttctgcttggattcctatctcaccctttattgatgggattaggaggaattcctgccaccaaggacaacgggatttgccattttggcgctgtctggacttaacactgaagctgctgatctttctcttgtactggaattgaaagactttgatatgttgactactattatggccctatggtctaagaaatattaaatgttttcatg

SEQ ID NO: 14776 - DNA, 2690 bp, Zea Mays
atgccccaccaggcaccaggttgctgggtttgggcctcacggtccagcagatgccagccagttgccacgcgtttcatcagcccgacccaaccaaagccagaagacacggtgccgtcagctgtgctcccggcgctcccgcaccacaagcaagcgcgtgcgcgccgtcaagtcgcctctacagcaacttccaccgcgtactccctccctccctcgtctcgtcttcgtctccaggtttcgcgggggccaaggtttctgccggagcagtcgcggtctgcgctgcggcacggcgacgaggtggggatggagtaccgcgacaagctcgtgctggcgcccatggtccgcgtgggcaccttgccatttaggctactggctgctgaatatggtgctgatattacttatggagaagaaattattgatcacaaattcttgaagtgtgagcgtgttacaaatgaatctcttgggactactgattttgtggagaaagggactgacagtgtagttttccgtacatgcccacaagaaaggggcagggttgtattccaaatgggcacatcaaatgctgtgagggcacttaaagctgctcagatcgtgtgccgtgatgtttctgctatagatatcaacatgggttgtccaaagtctttttcacttagtggagggatgggtgctgcattactctccaaacctgagcttatacacgatattctgacaacactgcggaggaacttggacacaactgtgacatgtaaaatccgtcttctgaacacacctaaagacactgtggagttggcacgccggattgagaaaactggtgttcctgctcttgctgtccatggaagaaagattaaagatagaccgagagatcttgccaagtgggatgagatagctgatgttgtgtcagcgctgtcaattccagttatagctaatggagatgtctttgagtatgaggattttaagagaattaaagatgcaacaggtgccgcgtctgttatggttgctagaggtgctatgtggaatgcctccatcttttgtgccaaaggaaaaacaccttgggaggatgtcaaaagagagtatgtaagaaagagcatattgtgggacaacgatgtgaagagcacgaaacataccttgaaagaaatgataatgcactattcttgccttgaacttcctgaggggaaaggcgttataaagtgtgatacatctgaagatttagcgagactatacggggaagaggactactataattttgttgttgcaaataggaaatgaatacaatttgatgttgtgagctctcatgtgtaccaggtatctatttccgaatacattgggtctagagctagtgaaaaaggaaataatattatgtgaaactgatgaagttgatagtttcatgtagtctacatgcggtactttttccttgcaaataacaattacttgcaaaataagcatgtttgttgacatgggtttcaaaactaaaattggttccagttccttggccaggtagccactcttaataggggcttgcatgctggtagtctgtaaactagcgattagagtttgtaaatgtatgatactgatcaagaagtcaagaactggctaaactaaatggtattttacctggacccagcaaaaccggtgaaacttgcctggaacttgaagaaagatgttcacttgcatgattaaattgcaaatcagagaactctcaacttcatgattgattattcgcttcgattaaagccagctgtttggactgctgtagctgcaatccatagagataaaacactgtagaagcaatagaagcctacggattaaagtcaagcaaacaggctagacctctctctttctctgaaaaatgtactaccaagaacctgcatatctacatacaatgacacctctcctcacctgcccgtgacgctgagctgccttcgccccccccccccctcccccttcgccgccgctgcctagatgtttcatttcatctttgtgcgtgtgaggcacacggcacgataaggacgaatgttgggtggggctgctccctctttcaatggaatgacatggtcaatatcacgttgaggagggacttttgtgtactcctgacagaattcagagtattgttgcagtaaggcttgaatagccagacgaagagtgtggtgcctgcagagacaagctgttgagatgcagaatgaaactagaaatgcctttgttgagaagcttgttcattatccttttcagttgttcagtgtacgcatcctgagatgtacaatcctttaatgagaggagagtatcatcttctaaggagtcaagggtgttgttcaaggcatgttcctgaatagagaatgcagtgcctgttatgattgccccagatcttctgcttggattcctatctcaccctttattgatgggattaggaggaattcctgccaccaaggacaacgggatttgccattttggcgctgtctggacttaacactgaagctgctgatctttctcttgtactggtaatagttaggtttatacctgaaattaatcaaacaccatttttttgtaacaaatactaatttatttgctttctatactatggaaattttgtcatgtattgttggtggaaatactattgcgcttttgaaggaattgaaagactttgatatgttgactactattatggccctatggtctaagaaatattaaatgttttcatg

SEQ ID NO: 14777 - DNA, 2712 bp, Zea Mays
atgccccaccaggcaccaggttgctgggtttgggcctcacggtccagcagatgccagccagttgccacgcgtttcatcagcccgacccaaccaaagccagaagacacggtgccgtcagctgtgctcccggcgctcccgcaccacaagcaagcgcgtgcgcgccgtcaagtcgcctctacagcaacttccaccgcgtactccctccctccctcgtctcgtcttcgtctccaggtttcgcgggggccaaggtttctgccggagcagtcgcggtctgcgctgcggcacggcgacgaggtggggatggagtaccgcgacaagctcgtgctggcgcccatggtccgcgtgggcaccttgccatttaggctactggctgctgaatatggtgctgatattacttatggagaagaaattattgatcacaaattcttgaagtgtgagcgtgttacaaatgaatctcttgggactactgattttgtggagaaagggactgacagtgtagttttccgtacatgcccacaagaaaggggcagggttgtattccaaatgggcacatcaaatgctgtgagggcacttaaagctgctcagatcgtgtgccgtgatgtttctgctatagatatcaacatgggttgtccaaagtctttttcacttagtggagggatgggtgctgcattactctccaaacctgagcttatacacgatattctgacaacactgcggaggaacttggacacaactgtgacatgtaaaatccgtcttctgaacacacctaaagacactgtggagttggcacgccggattgagaaaactggtgttcctgctcttgctgtccatggaagaaagattaaagatagaccgagagatcttgccaagtgggatgagatagctgatgttgtgtcagcgctgtcaattccagttatagctaatggagatgtctttgagtatgaggattttaagagaattaaagatgcaacaggtgccgcgtctgttatggttgctagaggtgctatgtggaatgcctccatcttttgtgccaaaggaaaaacaccttgggaggatgtcaaaagagagtatgtaagaaagagcatattgtgggacaacgatgtgaagagcacgaaacataccttgaaagaaatgataatgcactattcttgccttgaacttcctgaggggaaaggcgttataaagtgtgatacatctgaagatttagcgagactatacggggaagaggactactataattttgttgttgcaaataggaaatgaatacaatttgatgttgtgagctctcatgtgtaccaggtatctatttccgaatacattgggtctagagctagtgaaaaaggaaataatattatgtgaaactgatgaagttgatagtttcatgtagtctacatgcggtactttttccttgcaaataacaattacttgcaaaataagcatgtttgttgacatgggtttcaaaactaaaattggttccagttccttggccaggtagccactcttaataggggcttgcatgctggtagtctgtaaactagcgattagagtttgtaaatgtatgatactgatcaagaagtcaagaactggctaaactaaatggtattttacctggacccagcaaaaccggtgaaacttgcctggaacttgaagaaagatgttcacttgcatgattaaattgcaaatcagagtgatcaatgggtaatggagcagaactctcaacttcatgattgattattcgcttcgattaaagccagctgtttggactgctgtagctgcaatccatagagataaaacactgtagaagcaatagaagcctacggattaaagtcaagcaaacaggctagacctctctctttctctgaaaaatgtactaccaagaacctgcatatctacatacaatgacacctctcctcacctgcccgtgacgctgagctgccttcgccccccccccccctcccccttcgccgccgctgcctagatgtttcatttcatctttgtgcgtgtgaggcacacggcacgataaggacgaatgttgggtggggctgctccctctttcaatggaatgacatggtcaatatcacgttgaggagggacttttgtgtactcctgacagaattcagagtattgttgcagtaaggcttgaatagccagacgaagagtgtggtgcctgcagagacaagctgttgagatgcagaatgaaactagaaatgcctttgttgagaagcttgttcattatccttttcagttgttcagtgtacgcatcctgagatgtacaatcctttaatgagaggagagtatcatcttctaaggagtcaagggtgttgttcaaggcatgttcctgaatagagaatgcagtgcctgttatgattgccccagatcttctgcttggattcctatctcaccctttattgatgggattaggaggaattcctgccaccaaggacaacgggatttgccattttggcgctgtctggacttaacactgaagctgctgatctttctcttgtactggtaatagttaggtttatacctgaaattaatcaaacaccatttttttgtaacaaatactaatttatttgctttctatactatggaaattttgtcatgtattgttggtggaaatactattgcgcttttgaaggaattgaaagactttgatatgttgactactattatggccctatggtctaagaaatattaaatgttttcatg

SEQ ID NO: 14778 - DNA, 2514 bp, Zea Mays
atgccccaccaggcaccaggttgctgggtttgggcctcacggtccagcagatgccagccagttgccacgcgtttcatcagcccgacccaaccaaagccagaagacacggtgccgtcagctgtgctcccggcgctcccgcaccacaagcaagcgcgtgcgcgccgtcaagtcgcctctacagcaacttccaccgcgtactccctccctccctcgtctcgtcttcgtctccaggtttcgcgggggccaaggtttctgccggagcagtcgcggtctgcgctgcggcacggcgacgaggtggggatggagtaccgcgacaagctcgtgctggcgcccatggtccgcgtgggcaccttgccatttaggctactggctgctgaatatggtgctgatattacttatggagaagaaattattgatcacaaattcttgaagtaatctcttgggactactgattttgtggagaaagggactgacagtgtagttttccgtacatgcccacaagaaaggggcagggttgtattccaaatgggcacatcaaatgctgtgagggcacttaaagctgctcagatcgtgtgccgtgatgtttctgctatagatatcaacatgggttgtccaaagtctttttcacttagtggagggatgggtgctgcattactctccaaacctgagcttatacacgatgtacttttcttaattgtttctttttgccttttgtataccatatatccattgctcttactagtatacactatagattctgacaacactgcggaggaacttggacacaactgtgacatgtaaaatccgtcttctgaacacacctaaagacactgtggagttggcacgccggattgagaaaactggtgttcctgctcttgctgtccatggaagaaagattaaagatagaccgagagatcttgccaagtgggatgagatagctgatgttgtgtcagcgctgtcaattccagttatagctaatggagatgtctttgagtatgaggattttaagagaattaaagatgcaacaggtgccgcgtctgttatggttgctagaggtgctatgtggaatgcctccatcttttgtgccaaaggaaaaacaccttgggaggatgtcaaaagagagtatgtaagaaagagcatattgtgggacaacgatgtgaagagcacgaaacataccttgaaagaaatgataatgcactattcttgccttgaacttcctgaggggaaaggcgttataaagtgtgatacatctgaagatttagcgagactatacggggaagaggactactataattttgttgttgcaaataggaaatgaatacaatttgatgttgtgagctctcatgtgtaccagcaaaaccggtgaaacttgcctggaacttgaagaaagatgttcacttgcatgattaaattgcaaatcagaggtacccatggccacaatgtaatttcgaaaggttttttcatcataataaaaaattgcaataattcagtgatcaatgggtaatggagcagaactctcaacttcatgattgattattcgcttcgattaaagccagctgtttggactgctgtagctgcaatccatagagataaaacactgtagaagcaatagaagcctacggattaaagtcaagcaaacaggctagacctctctctttctctgaaaaatgtactaccaagaacctgcatatctacatacaatgacacctctcctcacctgcccgtgacgctgagctgccttcgccccccccccccctcccccttcgccgccgctgcctagatgtttcatttcatctttgtgcgtgtgaggcacacggcacgataaggacgaatgttgggtggggctgctccctctttcaatggaatgacatggtcaatatcacgttgaggagggacttttgtgtactcctgacagaattcagagtattgttgcagtaaggcttgaatagccagacgaagagtgtggtgcctgcagagacaagctgttgagatgcagaatgaaactagaaatgcctttgttgagaagcttgttcattatccttttcagttgttcagtgtacgcatcctgagatgtacaatcctttaatgagaggagagtatcatcttctaaggagtcaagggtgttgttcaaggcatgttcctgaatagagaatgcagtgcctgttatgattgccccagatcttctgcttggattcctatctcaccctttattgatgggattaggaggaattcctgccaccaaggacaacgggatttgccattttggcgctgtctggacttaacactgaagctgctgatctttctcttgtactggtaatagttaggtttatacctgaaattaatcaaacaccatttttttgtaacaaatactaatttatttgctttctatactatggaaattttgtcatgtattgttggtggaaatactattgcgcttttgaaggaattgaaagactttgatatgttgactactattatggccctatggtctaagaaatattaaatgttttcatg

SEQ ID NO: 14779 - DNA, 1615 bp, Zea Mays
atgccccaccaggcaccaggttgctgggtttgggcctcacggtccagcagatgccagccagttgccacgcgtttcatcagcccgacccaaccaaagccagaagacacggtgccgtcagctgtgctcccggcgctcccgcaccacaagcaagcgcgtgcgcgccgtcaagtcgcctctacagcaacttccaccgcgtactccctccctccctcgtctcgtcttcgtctccaggtttcgcgggggccaaggtttctgccggagcagtcgcggtctgcgctgcggcacggcgacgaggtggggatggagtaccgcgacaagctcgtgctggcgcccatggtccgcgtgggcaccttgccatttaggctactggctgctgaatatggtgctgatattacttatggagaagaaattattgatcacaaattcttgaagtaatctcttgggactactgattttgtggagaaagggactgacagtgtagttttccgtacatgcccacaagaaaggggcagggttgtattccaaatgggcacatcaaatgctgtgagggcacttaaagctgctcagatcgtgtgccgtgatgtttctgctatagatatcaacatgggttgtccaaagtctttttcacttagtggagggatgggtgctgcattactctccaaacctgagcttatacacgatattctgacaacactgcggaggaacttggacacaactgtgacatgtaaaatccgtcttctgaacacacctaaagacactgtggagttggcacgccggattgagaaaactggtgttcctgctcttgctgtccatggaagaaagattaaagatagaccgagagatcttgccaagtgggatgagatagctgatgttgtgtcagcgctgtcaattccagttatagctaatggagatgtctttgagtatgaggattttaagagaattaaagatgcaacaggtgccgcgtctgttatggttgctagaggtgctatgtggaatgcctccatcttttgtgccaaaggaaaaacaccttgggaggatgtcaaaagagagtatgtaagaaagagcatattgtgggacaacgatgtgaagagcacgaaacataccttgaaagaaatgataatgcactattcttgccttgaacttcctgaggggaaaggcgttataaagtgtgatacatctgaagatttagcgagactatacggggaagaggactactataattttgttgttgcaaataggaaatgaatacaatttgatgttgtgagctctcatgtgtaccagcttctgcttggattcctatctcaccctttattgatgggattaggaggaattcctgccaccaaggacaacgggatttgccattttggcgctgtctggacttaacactgaagctgctgatctttctcttgtactggtaatagttaggtttatacctgaaattaatcaaacaccatttttttgtaacaaatactaatttatttgctttctatactatggaaattttgtcatgtattgttggtggaaatactattgcgcttttgaaggaattgaaagactttgatatgttgactactattatggccctatggtctaagaaatattaaatgttttcatg

SEQ ID NO: 14780 - DNA, 2457 bp, Zea Mays
atgccccaccaggcaccaggttgctgggtttgggcctcacggtccagcagatgccagccagttgccacgcgtttcatcagcccgacccaaccaaagccagaagacacggtgccgtcagctgtgctcccggcgctcccgcaccacaagcaagcgcgtgcgcgccgtcaagtcgcctctacagcaacttccaccgcgtactccctccctccctcgtctcgtcttcgtctccaggtttcgcgggggccaaggtttctgccggagcagtcgcggtctgcgctgcggcacggcgacgaggtggggatggagtaccgcgacaagctcgtgctggcgcccatggtccgcgtgggcaccttgccatttaggctactggctgctgaatatggtgctgatattacttatggagaagaaattattgatcacaaattcttgaagtgtgagcgtgttacaaatgaatctcttgggactactgattttgtggagaaagggactgacagtgtagttttccgtacatgcccacaagaaaggggcagggttgtattccaaatgggcacatcaaatgctgtgagggcacttaaagctgctcagatcgtgccgtgatgtttctgctatagatatcaacatgggttgtccaaagtctttttcacttagtggagggatgggtgctgcattactctccaaacctgagcttatacacgatattctgacaacactgcggaggaacttggacacaactgtgacatgtaaaatccgtcttctgaacacacctaaagacactgtggagttggcacgccggattgagaaaactggtgttcctgctcttgctgtccatggaagaaagattaaagatagaccgagagatcttgccaagtgggatgagatagctgatgttgtgtcagcgctgtcaattccagttatagctaatggagatgtctttgagtatgaggattttaagagaattaaagatgcaacaggtgccgcgtctgttatggttgctagaggtgctatgtggaatgcctccatcttttgtgccaaaggaaaaacaccttgggaggatgtcaaaagagagtatgtaagaaagagcatattgtgggacaacgatgtgaagagcacgaaacataccttgaaagaaatgataatgcactattcttgccttgaacttcctgaggggaaaggcgttataaagtgtgatacatctgaagatttagcgagactatacggggaagaggactactataattttgttgttgcaaataggaaatgaatacaatttgatgttgtgagctctcatgtgtaccagcaaaaccggtgaaacttgcctggaacttgaagaaagatgttcacttgcatgattaaattgcaaatcagaggtacccatggccacaatgtaatttcgaaaggttttttcatcataataaaaaattgcaataattcagtgatcaatgggtaatggagcagaactctcaacttcatgattgattattcgcttcgattaaagccagctgtttggactgctgtagctgcaatccatagagataaaacactgtagaagcaatagaagcctacggattaaagtcaagcaaacaggctagacctctctctttctctgaaaaatgtactaccaagaacctgcatatctacatacaatgacacctctcctcacctgcccgtgacgctgagctgccttcgccccccccccccctcccccttcgccgccgctgcctagatgtttcatttcatctttgtgcgtgtgaggcacacggcacgataaggacgaatgttgggtggggctgctccctctttcaatggaatgacatggtcaatatcacgttgaggagggacttttgtgtactcctgacagaattcagagtattgttgcagtaaggcttgaatagccagacgaagagtgtggtgcctgcagagacaagctgttgagatgcagaatgaaactagaaatgcctttgttgagaagcttgttcattatccttttcagttgttcagtgtacgcatcctgagatgtacaatcctttaatgagaggagagtatcatcttctaaggagtcaagggtgttgttcaaggcatgttcctgaatagagaatgcagtgcctgttatgattgccccagatcttctgcttggattcctatctcaccctttattgatgggattaggaggaattcctgccaccaaggacaacgggatttgccattttggcgctgtctggacttaacactgaagctgctgatctttctcttgtactggtaatagttaggtttatacctgaaattaatcaaacaccatttttttgtaacaaatactaatttatttgctttctatactatggaaattttgtcatgtattgttggtggaaatactattgcgcttttgaaggaattgaaagactttgatatgttgactactattatggccctatggtctaagaaatattaaatgttttcatg

SEQ ID NO: 14781 - DNA, 2416 bp, Zea Mays
atgccccaccaggcaccaggttgctgggtttgggcctcacggtccagcagatgccagccagttgccacgcgtttcatcagcccgacccaaccaaagccagaagacacggtgccgtcagctgtgctcccggcgctcccgcaccacaagcaagcgcgtgcgcgccgtcaagtcgcctctacagcaacttccaccgcgtactccctccctccctcgtctcgtcttcgtctccaggtttcgcgggggccaaggtttctgccggagcagtcgcggtctgcgctgcggcacggcgacgaggtggggatggagtaccgcgacaagctcgtgctggcgcccatggtccgcgtgggcaccttgccatttaggctactggctgctgaatatggtgctgatattacttatggagaagaaattattgatcacaaattcttgaagtgtgagcgtgttacaaatgaatctcttgggactactgattttgtggagaaagggactgacagtgtagttttccgtacatgcccacaagaaaggggcagggttgtattccaaatgggcacatcaaatgctgtgagggcacttaaagctgctcagatcgtgtgccgtgatgtttctgctatagatatcaacatgggttgtccaaagtctttttcacttagtggagggatgggtgctgcattactctccaaacctgagcttatacacgatattctgacaacactgcggaggaacttggacacaactgtgacatgtaaaatccgtcttctgaacacacctaaagacactgtggagttggcacgccggattgagaaaactggtgttcctgctcttgctgtccatggaagaaagattaaagatagaccgagagatcttgccaagtgggatgagatagctgatgttgtgtcagcgctgtcaattccagttatagctaatggagatgtctttgagtatgaggattttaagagaattaaagatgcaacaggtgccgcgtctgttatggttgctagaggtgctatgtggaatgcctccatcttttgtgccaaaggaaaaacaccttgggaggatgtcaaaagagagtatgtaagaaagagcatattgtgggacaacgatgtgaagagcacgaaacataccttgaaagaaatgataatgcactattcttgccttgaacttcctgaggggaaaggcgttataaagtgtgatacatctgaagatttagcgagactatacggggaagaggactactataattttgttgttgcaaataggaaatgaatacaatttgatgttgtgagctctcatgtgtaccagcaaaaccggtgaaacttgcctggaacttgaagaaagatgttcacttgcatgattaaattgcaaatcagaggtacccatggccacaatgtaatttcgaaaggttttttcatcataataaaaaattgcaataattcagtgatcaatgggtaatggagcagaactctcaacttcatgattgattattcgcttcgattaaagccagctgtttggactgctgtagctgcaatccatagagataaaacactgtagaagcaatagaagcctacggattaaagtcaagcaaacaggctagacctctctctttctctgaaaaatgtactaccaagaacctgcatatctacatacaatgacacctctcctcacctgcccgtgacgctgagctgccttcgccccccccccccctcccccttcgccgccgctgcctagatgtttcatttcatctttgtgcgtgtgaggcacacggcacgataaggacgaatgttgggtggggctgctccctctttcaatggaatgacatggtcaatatcacgttgaggagggacttttgtgtactcctgacagaattcagagtattgttgcagtaaggcttgaatagccagacgaagagtgtggtgcctgcagagacaagctgttgagatgcagaatgaaactagaaatgcctttgttgagaagcttgttcattatccttttcagttgttcagtgtacgcatcctgagatgtacaatcctttaatgagaggagagtatcatcttctaaggagtcaagggtgttgttcaaggcatgttcctgaatagagaatgcagtgcctgttatgattgccccagatgaggaattcctgccaccaaggacaacgggatttgccattttggcgctgtctggacttaacactgaagctgctgatctttctcttgtactggtaatagttaggtttatacctgaaattaatcaaacaccatttttttgtaacaaatactaatttatttgctttctatactatggaaattttgtcatgtattgttggtggaaatactattgcgcttttgaaggaattgaaagactttgatatgttgactactattatggccctatggtctaagaaatattaaatgttttcatg

SEQ ID NO: 14782 - DNA, 2669 bp, Zea Mays
atgccccaccaggcaccaggttgctgggtttgggcctcacggtccagcagatgccagccagttgccacgcgtttcatcagcccgacccaaccaaagccagaagacacggtgccgtcagctgtgctcccggcgctcccgcaccacaagcaagcgcgtgcgcgccgtcaagtcgcctctacagcaacttccaccgcgtactccctccctccctcgtctcgtcttcgtctccaggtttcgcgggggccaaggtttctgccggagcagtcgcggtctgcgctgcggcacggcgacgaggtggggatggagtaccgcgacaagctcgtgctggcgcccatggtccgcgtgggcaccttgccatttaggctactggctgctgaatatggtgctgatattacttatggagaagaaattattgatcacaaattcttgaagtgtgagcgtgttacaaatgaatctcttgggactactgattttgtggagaaagggactgacagtgtagttttccgtacatgcccacaagaaaggggcagggttgtattccaaatgggcacatcaaatgctgtgagggcacttaaagctgctcagatcgtgtgccgtgatgtttctgctatagatatcaacatgggttgtccaaagtctttttcacttagtggagggatgggtgctgcattactctccaaacctgagcttatacacgatattctgacaacactgcggaggaacttggacacaactgtgacatgtaaaatccgtcttctgaacacacctaaagacactgtggagttggcacgccggattgagaaaactggtgttcctgctcttgctgtccatggaagaaagattaaagatagaccgagagatcttgccaagtgggatgagatagctgatgttgtgtcagcgctgtcaattccagttatagctaatggagatgtctttgagtatgaggattttaagagaattaaagatgcaacaggtgccgcgtctgttatggttgctagaggtgctatgtggaatgcctccatcttttgtgccaaaggaaaaacaccttgggaggatgtcaaaagagagtatgtaagaaagagcatattgtgggacaacgatgtgaagagcacgaaacataccttgaaagaaatgataatgcactattcttgccttgaacttcctgaggggaaaggcgttataaagtgtgatacatctgaagatttagcgagactatacggggaagaggactactataattttgttgttgcaaataggaaatgaatacaatttgatgttgtgagctctcatgtgtaccaggtatctatttccgaatacattgggtctagagctagtgaaaaaggaaataatattatgtgaaactgatgaagttgatagtttcatgtagtctacatgcggtactttttccttgcaaataacaattacttgcaaaataagcatgtttgttgacatgggtttcaaaactaaaattggttccagttccttggccaggtagccactcttaataggggcttgcatgctggtagtctgtaaactagcgattagagtttgtaaatgtatgatactgatcaagaagtcaagaactggctaaactaaatggtattttacctggacccagcaaaaccggtgaaacttgcctggaacttgaagaaagatgttcacttgcatgattaaattgcaaatcagagtgatcaatgggtaatggagcagaactctcaacttcatgattgattattcgcttcgattaaagccagctgtttggactgctgtagctgcaatccatagagataaaacactgtagaagcaatagaagcctacggattaaagtcaagcaaacaggctagacctctctctttctctgaaaaatgtactaccaagaacctgcatatctacatacaatgacacctctcctcacctgcccgtgacgctgagctgccttcgccccccccccccctcccccttcgccgccgctgcctagatgtttcatttcatctttgtgcgtgtgaggcacacggcacgataaggacgaatgttgggtggggctgctccctctttcaatggaatgacatggtcaatatcacgttgaggagggacttttgtgtactcctgacagaattcagagtattgttgcagtaaggcttgaatagccagacgaagagtgtggtgcctgcagagacaagctgttgagatgcagaatgaaactagaaatgcctttgttgagaagcttgttcattatccttttcagttgttcagtgtacgcatcctgagatgtacaatcctttaatgagaggagagtatcatcttctaaggagtcaagggtgttgttcaaggcatgttcctgaatagagaatgcagtgcctgttatgattgccccagatgaggaattcctgccaccaaggacaacgggatttgccattttggcgctgtctggacttaacactgaagctgctgatctttctcttgtactggtaatagttaggtttatacctgaaattaatcaaacaccatttttttgtaacaaatactaatttatttgctttctatactatggaaattttgtcatgtattgttggtggaaatactattgcgcttttgaaggaattgaaagactttgatatgttgactactattatggccctatggtctaagaaatattaaatgttttcatg

SEQ ID NO: 14783 - DNA, 2776 bp, Zea Mays
atgccccaccaggcaccaggttgctgggtttgggcctcacggtccagcagatgccagccagttgccacgcgtttcatcagcccgacccaaccaaagccagaagacacggtgccgtcagctgtgctcccggcgctcccgcaccacaagcaagcgcgtgcgcgccgtcaagtcgcctctacagcaacttccaccgcgtactccctccctccctcgtctcgtcttcgtctccaggtttcgcgggggccaaggtttctgccggagcagtcgcggtctgcgctgcggcacggcgacgaggtggggatggagtaccgcgacaagctcgtgctggcgcccatggtccgcgtgggcaccttgccatttaggctactggctgctgaatatggtgctgatattacttatggagaagaaattattgatcacaaattcttgaagtgtgagcgtgttacaaatgaatctcttgggactactgattttgtggagaaagggactgacagtgtagttttccgtacatgcccacaagaaaggggcagggttgtattccaaatgggcacatcaaatgctgtgagggcacttaaagctgctcagatcgtgccgtgatgtttctgctatagatatcaacatgggttgtccaaagtctttttcacttagtggagggatgggtgctgcattactctccaaacctgagcttatacacgatattctgacaacactgcggaggaacttggacacaactgtgacatgtaaaatccgtcttctgaacacacctaaagacactgtggagttggcacgccggattgagaaaactggtgttcctgctcttgctgtccatggaagaaagattaaagatagaccgagagatcttgccaagtgggatgagatagctgatgttgtgtcagcgctgtcaattccagttatagctaatggagatgtctttgagtatgaggattttaagagaattaaagatgcaacaggtgccgcgtctgttatggttgctagaggtgctatgtggaatgcctccatcttttgtgccaaaggaaaaacaccttgggaggatgtcaaaagagagtatgtaagaaagagcatattgtgggacaacgatgtgaagagcacgaaacataccttgaaagaaatgataatgcactattcttgccttgaacttcctgaggggaaaggcgttataaagtgtgatacatctgaagatttagcgagactatacggggaagaggactactataattttgttgttgcaaataggaaatgaatacaatttgatgttgtgagctctcatgtgtaccaggtatctatttccgaatacattgggtctagagctagtgaaaaaggaaataatattatgtgaaactgatgaagttgatagtttcatgtagtctacatgcggtactttttccttgcaaataacaattacttgcaaaataagcatgtttgttgacatgggtttcaaaactaaaattggttccagttccttggccaggtagccactcttaataggggcttgcatgctggtagtctgtaaactagcgattagagtttgtaaatgtatgatactgatcaagaagtcaagaactggctaaactaaatggtattttacctggacccagcaaaaccggtgaaacttgcctggaacttgaagaaagatgttcacttgcatgattaaattgcaaatcagaggtacccatggccacaatgtaatttcgaaaggttttttcatcataataaaaaattgcaataattcagtgatcaatgggtaatggagcagaactctcaacttcatgattgattattcgcttcgattaaagccagctgtttggactgctgtagctgcaatccatagagataaaacactgtagaagcaatagaagcctacggattaaagtcaagcaaacaggctagacctctctctttctctgaaaaatgtactaccaagaacctgcatatctacatacaatgacacctctcctcacctgcccgtgacgctgagctgccttcgccccccccccccctcccccttcgccgccgctgcctagatgtttcatttcatctttgtgcgtgtgaggcacacggcacgataaggacgaatgttgggtggggctgctccctctttcaatggaatgacatggtcaatatcacgttgaggagggacttttgtgtactcctgacagaattcagagtattgttgcagtaaggcttgaatagccagacgaagagtgtggtgcctgcagagacaagctgttgagatgcagaatgaaactagaaatgcctttgttgagaagcttgttcattatccttttcagttgttcagtgtacgcatcctgagatgtacaatcctttaatgagaggagagtatcatcttctaaggagtcaagggtgttgttcaaggcatgttcctgaatagagaatgcagtgcctgttatgattgccccagatcttctgcttggattcctatctcaccctttattgatgggattaggaggaattcctgccaccaaggacaacgggatttgccattttggcgctgtctggacttaacactgaagctgctgatctttctcttgtactggtaatagttaggtttatacctgaaattaatcaaacaccatttttttgtaacaaatactaatttatttgctttctatactatggaaattttgtcatgtattgttggtggaaatactattgcgcttttgaaggaattgaaagactttgatatgttgactactattatggccctatggtctaagaaatattaaatgttttcatg

SEQ ID NO: 14784 - DNA, 2241 bp, Zea Mays
atgccccaccaggcaccaggttgctgggtttgggcctcacggtccagcagatgccagccagttgccacgcgtttcatcagcccgacccaaccaaagccagaagacacggtgccgtcagctgtgctcccggcgctcccgcaccacaagcaagcgcgtgcgcgccgtcaagtcgcctctacagcaacttccaccgcgtactccctccctccctcgtctcgtcttcgtctccaggtttcgcgggggccaaggtttctgccggagcagtcgcggtctgcgctgcggcacggcgacgaggtggggatggagtaccgcgacaagctcgtgctggcgcccatggtccgcgtgggcaccttgccatttaggctactggctgctgaatatggtgctgatattacttatggagaagaaattattgatcacaaattcttgaagtgtgagcgtgttacaaatgaatctcttgggactactgattttgtggagaaagggactgacagtgtagttttccgtacatgcccacaagaaaggggcagggttgtattccaaatgggcacatcaaatgctgtgagggcacttaaagctgctcagatcgtgtgccgtgatgtttctgctatagatatcaacatgggttgtccaaagtctttttcacttagtggagggatgggtgctgcattactctccaaacctgagcttatacacgatattctgacaacactgcggaggaacttggacacaactgtgacatgtaaaatccgtcttctgaacacacctaaagacactgtggagttggcacgccggattgagaaaactggtgttcctgctcttgctgtccatggaagaaagattaaagatagaccgagagatcttgccaagtgggatgagatagctgatgttgtgtcagcgctgtcaattccagttatagctaatggagatgtctttgagtatgaggattttaagagaattaaagatgcaacaggtgccgcgtctgttatggttgctagaggtgctatgtggaatgcctccatcttttgtgccaaaggaaaaacaccttgggaggatgtcaaaagagagtatgtaagaaagagcatattgtgggacaacgatgtgaagagcacgaaacataccttgaaagaaatgataatgcactattcttgccttgaacttcctgaggggaaaggcgttataaagtgtgatacatctgaagatttagcgagactatacggggaagaggactactataattttgttgttgcaaataggaaatgaatacaatttgatgttgtgagctctcatgtgtaccagaattcagagtattgttgcagtaaggcttgaatagccagacgaagagtgtggtgcctgcagagacaagctgttgagatgcagaatgaaactagaaatgcctttgttgagaagcttgttcattatccttttcagttgttcagtgtacgcatcctgagatgtacaatcctttaatgagaggagagtatcatcttctaaggagtcaagggtgttgttcaaggcatgttcctgaatagagaatgcagtgcctgttatgattgccccagatcttctgcttggattcctatctcaccctttattgatgggattaggaggaattcctgccaccaaggacaacgggatttgccattttggcgctgtctggacttaacactgaagctgctgatctttctcttgtactggcgcaaagctgcatcagccatgagtccatgacatcagagacggttatgctgatatgcatgcatggtattccccttacacaaaaccgtaatatctcattctcattcatactccataatctctgcgcataggccatcttcgattctttttatatttaataaagacgccatcttggagctaccataccaagatgcagaaatgtcgtgcaaaccaaaggcaccgaagaacagtcgagacctagctttgttggtaagccaaacctagtcttcaattctctaggacccaaaaatcgtgtcttaaactgtcagtctgtcactgccagaaaatgcgggccagatttttttttgatacctctggaacgtgtactaagctatttaaaaagtttgctttcaacttcgaggcttcagcgagtggatgaactctgcacgctcccttgagacctcaatgcaagttcaatcagtcggtcactcagtcatgtgcagtggtttgggatttgggatatcaaaccccaatctccaggtgtgattagaaatttataatccgaac

SEQ ID NO: 14785 - DNA, 3810 bp, Zea Mays
atgccccaccaggcaccaggttgctgggtttgggcctcacggtccagcagatgccagccagttgccacgcgtttcatcagcccgacccaaccaaagccagaagacacggtgccgtcagctgtgctcccggcgctcccgcaccacaagcaagcgcgtgcgcgccgtcaagtcgcctctacagcaacttccaccgcgtactccctccctccctcgtctcgtcttcgtctccaggtttcgcgggggccaaggtttctgccggagcagtcgcggtctgcgctgcggcacggcgacgaggtggggatggagtaccgcgacaagctcgtgctggcgcccatggtccgcgtgggcaccttgccatttaggctactggctgctgaatatggtgctgatattacttatggagaagaaattattgatcacaaattcttgaagtgtgagcgtgttacaaatggtattgtagttcaattgatatttggcatctgatgtggtctattggtcctacaactgtctccactgcatcagtgttttagtttactcatccaagtatccaactgctttttaagatctaataagttgagtaccataggattgcaaataactttaccctaatatgttgcatctgaagttgataattaattaattggatatattcttcttaattgactcctggatgatgaagttcctgtaattggggtttggggaatgattggatgaatgctagaataagtttatgaatgctttatgaagtgaagagaaagctattttacttgtgaagctagggcgccttcaaagcacttccattatcttacctatttgctccatcagttgttcagattgattgcatttgctctggggctatatgatttgacacatccttatcatgctacgcattgtttaccagaatctcttgggactactgattttgtggagaaagggactgacagtgtagttttccgtacatgcccacaagaaaggggcagggttgtattccaaatgggcacatcaaatgctgtgagggcacttaaagctgctcagatcgtgtaagctctacttctgagaccttttaggatataagtcctgaagtcggtaatataaattgtgtttataccaggtttggtaccgaaaattttccaattggtagcattagattagaccatatagttttgctttgcgtatttatttaaccatattgttttgtcctcataggtgccgtgatgtttctgctatagatatcaacatgggttgtccaaagtctttttcacttagtggagggatgggtgctgcattactctccaaacctgagcttatacacgatgtacttttcttaattgtttctttttgccttttgtataccatatatccattgctcttactagtatacactatagattctgacaacactgcggaggaacttggacacaactgtgacatgtaaaatccgtcttctgaacacacctaaagacactgtggagttggcacgccggattgagaaaactggtgttcctgctcttgctgtccatggaagaaagattaaagatagaccgagagatcttgccaagtgggatgagatagctgatgttgtgtcagcgctgtcaattccagttatagctaatggagatgtctttgagtatgaggattttaagagaattaaagatgcaacaggtgccgcgtctgttatggttgctagaggtgctatgtggaatgcctccatcttttgtgccaaaggaaaaacaccttgggaggatgtcaaaagagagtatgtaagaaagagcatattgtgggacaacgatgtgaagagcacgaaacataccttgaaagaaatgataatgcactattcttgccttgaacttcctgaggggaaaggcgttataaagtgtgatacatctgaagatttagcgagactatacggggaagaggactactataattttgttgttgcaaataggaaatgaatacaatttgatgttgtgagctctcatgtgtaccaggtatctatttccgaatacattgggtctagagctagtgaaaaaggaaataatattatgtgaaactgatgaagttgatagtttcatgtagtctacatgcggtactttttccttgcaaataacaattacttgcaaaataagcatgtttgttgacatgggtttcaaaactaaaattggttccagttccttggccaggtagccactcttaataggggcttgcatgctggtagtctgtaaactagcgattagagtttgtaaatgtatgatactgatcaagaagtcaagaactggctaaactaaatggtattttacctggacccagcaaaaccggtgaaacttgcctggaacttgaagaaagatgttcacttgcatgattaaattgcaaatcagaggtacccatggccacaatgtaatttcgaaaggttttttcatcataataaaaaattgcaataattcagtgatcaatgggtaatggagcagaactctcaacttcatgattgattattcgcttcgattaaagccagctgtttggactgctgtagctgcaatccatagagataaaacactgtagaagcaatagaagcctacggattaaagtcaagcaaacaggctagacctctctctttctctgaaaaatgtactaccaagaacctgcatatctacatacaatgacacctctcctcacctgcccgtgacgctgagctgccttcgccccccccccccctcccccttcgccgccgctgcctagatgtttcatttcatctttgtgcgtgtgaggcacacggcacgataaggacgaatgttgggtggggctgctccctctttcaatggaatgacatggtcaatatcacgttgaggagggacttttgtgtactcctgacagaattcagagtattgttgcagtaaggcttgaatagccagacgaagagtgtggtgcctgcagagacaagctgttgagatgcagaatgaaactagaaatgcctttgttgagaagcttgttcattatccttttcagttgttcagtgtacgcatcctgagatgtacaatcctttaatgagaggagagtatcatcttctaaggagtcaagggtgttgttcaaggcatgttcctgaatagagaatgcagtgcctgttatgattgccccagatcttctgcttggattcctatctcaccctttattgatgggattaggaggaattcctgccaccaaggacaacgggatttgccattttggcgctgtctggacttaacactgaagctgctgatctttctcttgtactggcgcaaagctgcatcagccatgagtccatgacatcagagacggttatgctgatatgcatgcatggtattccccttacacaaaaccgtaatatctcattctcattcatactccataatctctgcgcataggccatcttcgattctttttatatttaataaagacgccatcttggagctaccataccaagatgcagaaatgtcgtgcaaaccaaaggcaccgaagaacagtcgagacctagctttgttggtaagccaaacctagtcttcaattctctaggacccaaaaatcgtgtcttaaactgtcagtctgtcactgccagaaaatgcgggccagatttttttttgatacctctggaacgtgtactaagctatttaaaaagtttgctttcaacttcgaggcttcagcgagtggatgaactctgcacgctcccttgagacctcaatgcaagttcaatcagtcggtcactcagtcatgtgcagtggtttgggatttgggatatcaaaccccaatctccaggtgtgattagaaatttataatccgaac

SEQ ID NO: 14786 - DNA, 3676 bp, Zea Mays
atgggttgcccccgtccgctcctcctcctcctcctccacgcggtcgcgctcgccgccgccgacgagttcacctacaacggcttcggaggcagcgacctgttgctcgacggcatggccgcggtggcgccgaacggcctgctggcgctcagcaacggcaccagccagatggccggccacgcgttccacccggcgccgttccgcctgcgtgacggcgccgccgccgccgccaggtccttctcggcggccttcgtcttcgccatcgtgtccaactacaccgtgctcagcgacaacggcatggcgctggtggtcgcgccgagcaccaggctctccgccttcaacgcggggcagtacctgggcgtcctcaacgtcaccgacaacggcagggacggcaaccgcgtcttcttcgtcgagctggacaccatgctcaacccggagttccaggacatgaacagcaaccacgtcggcgtcaacgtcaacagcatgaggtcgctgcggaaccacagcgccggctactacgacgacgccacgggggcgttcaccaacctcagcctcatcagccgccggcccatgcaggtctgggtcgactacgacggcgccgccgcgcggctggacgtggccatggcgcccgccggcgtgcccaggccgcggaagccgctcatctccacgccgctcaacctctcggcggtcggcgcggacgacggcaccgcctacgtcggcttctcggcggccacgggcgtcatctacacgcgccactacgtcctgggctggagcttcgccacgggcgccgcggccccgccgctggacatctccaggcttcccgcgctgccgcggttcgggcccaagccccggtccaaggtgctggagaccgtgctcccggtcgccaccgcggcgctcgtcctcgcgctggtcgtgggcgccttcctgttcgtgcggcggcgggtgaggtacgccgaggtgcgcgaggactgggaggcggagttcggcccccaccgcttctcgtacaaggagctctaccaggcgaccaaggggttcaagaacaagatgctgctcggcaccggcggcttcgggagggtgtacaagggcgtgctctccgggtccaagctcgaggtcgccgtgaagagggtgtcgcacgactcgaagcaggggatgaaggagttcatcgcggaggtggtgagcatcggccacctccgccaccggaacctggtgcagctgctgggctattgccggcggaagggcgagctgctgctggtgtacgactacatgtccaacggcagcctggacaagtacctctacgacgacaggaccgccaggcccgtcctggactgggggcagaggttccagatcgtcaggggcgtcgccgccggcctgctgtacctgcacgaggactgggagaaggtggtgatccaccgggacgtcaaggccagcaatgtgctcctggacggcgacatgaacggcaggctgggcgacttcggcctggcgcggctgtacgaccacggcgtggacccgcagacgacgcacgtggtgggcaccatgggctacctcgccccggagctggtgcgcacggggagggcgaccccggccacggacgtgttcgccttcggcgtgttcgtgctggaggtggcttgcggccgccgcccgctcgggcgcgtcgcgcccggtgtcgaccagaccgtgctgctggactgggtgcaggagcaccagcgcaggggggccgccctcgacacgctggacgcgcggctgtgcggcaagtacgacgccgacgaggcccggctggccgtcaagctggggctcatgtgcgcgcacccctcgcccgaggcgcggccgggcatgcgccaggtcgtgcagtacctggagggcgacgccccgatgcccgatgtggcgccctcgtacgtcagctacagcatgctggcgctgatgcagaacgacgggttcgactccttcgccaacgtgtcgttcccgtccacggtcacgtcgagcgtcagccctgtctccggcggcttctcttcttccgtgtccggcctctccggcggaaggatcgcgctggtgacgggagggaacaagggcatcgggctcgagacgtgccggcagctggcgtccaggggcgtcagggtcgtcctgacggcgaggaacgaggcgaggggtttggaagcggtcgagcgcgtcaggtgcgcccgcggcgacgccgaggtttacttccaccagctcgacgtcaccgacccctgcagcgccgcccggctcgcggatttcgtcagggatcagttcggtaggctggacatcctggtatggcaaccccttctcgctcgcttatctctctctctgccggcggcttagtgaatttgggtattggaaaagtgataatgttccgctaatatttttgggtggaactgatggagctagcttatcatatgttttggacattctgagccagcaggaaaaccagatgattccttttgagttccgaacatggatgtacccgtaggccgtagggttatttttggcttactaactaaaaatgaaaaagaaaatcttatgatgatgaccactactttacaactctgttcctaatacaactatgcgtgcctgtttcgcttcacaattcgagaaaacaaagcatggaatcaaattgttgcttagtttttacacctaagaacatttcctaagtagcacacttcaatctttggttcgactgattgtttgcaattcaccaccatggcaccgtcatgttttggccattgttgtctgcagatcaacaatgcaggaatttcaggcgttcaccgtgatccagttttgtctgctgcggtcaaggataaggtcgatggcatggatgtaaatcagagagtcgaatggatgaaagaaaattcgaaagaaacatacgaggaggctgtacaatgtatgaaaacaaactattatggtgccaaacttgtcacagaggcactacttcctcttcttcagttatcctcctctggaagaattgtcaacgtttcgtcaggctttggactactgagaaatttcaacagcgaagaccttaggaaggagtttgaagacatcgacaatcttactgaaagtagactggaggaactgatggataagtttctagaggattttaaggccaacttagtagaggcgcatgggtggccgacaggtggatcttcagcctacaaagtcgtcaaagcggcgctcaatgcgtacacgaggattcttgccaagaagtatcctacgctgcgtatcaattgtttgacgcctggttatgtcaagaccgacatgtctatgcacatgggggtactgacacttgaggaaggcgctcgcaaccccgtgaaggttgctctcttgcctgacgacggaccgactggtgcttattttgatctgaatggcgaggcgtcctttgtgtgatggtatttctcccttttcagcttcagaataaaagaaagagctatgaagtagttagtgccaatcagtattgtagttcgacttgaatacttaaactagcacgttgagcaaaccgtagagctcaacaccagggatttcctcgtcttctgtataatatctctggtgatgattgtatatttgcaatgaaccatgcagatttggtcgcgccaaggtagtgtttggttggcacaatggtaatggcaacaggaatgaaaatggactgcgaggggaacgatggtggggttcgttt

SEQ ID NO: 14787 - DNA, 3571 bp, Zea Mays
atgggttgcccccgtccgctcctcctcctcctcctccacgcggtcgcgctcgccgccgccgacgagttcacctacaacggcttcggaggcagcgacctgttgctcgacggcatggccgcggtggcgccgaacggcctgctggcgctcagcaacggcaccagccagatggccggccacgcgttccacccggcgccgttccgcctgcgtgacggcgccgccgccgccgccaggtccttctcggcggccttcgtcttcgccatcgtgtccaactacaccgtgctcagcgacaacggcatggcgctggtggtcgcgccgagcaccaggctctccgccttcaacgcggggcagtacctgggcgtcctcaacgtcaccgacaacggcagggacggcaaccgcgtcttcttcgtcgagctggacaccatgctcaacccggagttccaggacatgaacagcaaccacgtcggcgtcaacgtcaacagcatgaggtcgctgcggaaccacagcgccggctactacgacgacgccacgggggcgttcaccaacctcagcctcatcagccgccggcccatgcaggtctgggtcgactacgacggcgccgccgcgcggctggacgtggccatggcgcccgccggcgtgcccaggccgcggaagccgctcatctccacgccgctcaacctctcggcggtcggcgcggacgacggcaccgcctacgtcggcttctcggcggccacgggcgtcatctacacgcgccactacgtcctgggctggagcttcgccacgggcgccgcggccccgccgctggacatctccaggcttcccgcgctgccgcggttcgggcccaagccccggtccaaggtgctggagaccgtgctcccggtcgccaccgcggcgctcgtcctcgcgctggtcgtgggcgccttcctgttcgtgcggcggcgggtgaggtacgccgaggtgcgcgaggactgggaggcggagttcggcccccaccgcttctcgtacaaggagctctaccaggcgaccaaggggttcaagaacaagatgctgctcggcaccggcggcttcgggagggtgtacaagggcgtgctctccgggtccaagctcgaggtcgccgtgaagagggtgtcgcacgactcgaagcaggggatgaaggagttcatcgcggaggtggtgagcatcggccacctccgccaccggaacctggtgcagctgctgggctattgccggcggaagggcgagctgctgctggtgtacgactacatgtccaacggcagcctggacaagtacctctacgacgacaggaccgccaggcccgtcctggactgggggcagaggttccagatcgtcaggggcgtcgccgccggcctgctgtacctgcacgaggactgggagaaggtggtgatccaccgggacgtcaaggccagcaatgtgctcctggacggcgacatgaacggcaggctgggcgacttcggcctggcgcggctgtacgaccacggcgtggacccgcagacgacgcacgtggtgggcaccatgggctacctcgccccggagctggtgcgcacggggagggcgaccccggccacggacgtgttcgccttcggcgtgttcgtgctggaggtggcttgcggccgccgcccgctcgggcgcgtcgcgcccggtgtcgaccagaccgtgctgctggactgggtgcaggagcaccagcgcaggggggccgccctcgacacgctggacgcgcggctgtgcggcaagtacgacgccgacgaggcccggctggccgtcaagctggggctcatgtgcgcgcacccctcgcccgaggcgcggccgggcatgcgccaggtcgtgcagtacctggagggcgacgccccgatgcccgatgtggcgccctcgtacgtcagctacagcatgctggcgctgatgcagaacgacgggttcgactccttcgccaacgtgtcgttcccgtccacggtcacgtcgagcgtcagccctgtctccggcggcttctcttcttccgtgtccggcctctccggcggaaggatcgcgctggtgacgggagggaacaagggcatcgggctcgagacgtgccggcagctggcgtccaggggcgtcagggtcgtcctgacggcgaggaacgaggcgaggggtttggaagcggtcgagcgcgtcaggtgcgcccgcggcgacgccgaggtttacttccaccagctcgacgtcaccgacccctgcagcgccgcccggctcgcggatttcgtcagggatcagttcggtaggctggacatcctgatcaacaatgcaggaatttcaggcgttcaccgtgatccagttttgtctgctgcggtcaaggataaggtacccttaatctaaagcaaaagaatacaaagtactgcgtttgtgcagtttgtgagcgattctcacgcaccacagtttcaatgaggcacattacaggctaacacaactgcctctcacatttcacaaggctaacacaatagcttgaagaatagtggttaggatattagcattctcattgcacgttgataatcttaagttatgcaactcaggtaccatgttactaaagctatttgattggtaagttcttgtctgaccgaactaaccgtgcactgaattgcatagtcatatgctcatattgtaccagaaaaaatggatatgtatagttctagaagaattaacatgtccatgaaaaatacataggtcgatggcatggatgtaaatcagagagtcgaatggatgaaagaaaattcgaaagaaacatacgaggaggctgtacaatgtatgaaaacaaactattatggtgccaaacttgtcacagaggcactacttcctcttcttcagttatcctcctctggaagaattgtcaacgtttcgtcaggctttggactactgagaaatttcaacagcgaagaccttaggaaggagtttgaagacatcgacaatcttactgaaagtagactggaggaactgatggataagtttctagaggattttaaggccaacttagtagaggcgcatgggtggccgacaggtggatcttcagcctacaaagtcgtcaaagcggcgctcaatgcgtacacgaggattcttgccaagaagtatcctacgctgcgtatcaattgtttgacgcctggttatgtcaagaccgacatgtctatgcacatgggggtactgacacttgaggaaggcgctcgcaaccccgtgaaggttgctctcttgcctgacgacggaccgactggtgcttattttgatctgaatggcgaggcgtcctttgtgtgatggtatttctcccttttcagcttcagaataaaagaaagagctatgaagtagttagtgccaatcagtattgtagttcgacttgaatacttaaactagcacgttgagcaaaccgtagagctcaacaccagggatttcctcgtcttctgtataatatctctggtgatgattgtatatttgcaatgaaccatgcagatttggtcgcgccaaggtagtgtttggttggcacaatggtaatggcaacaggaatgaaaatggactgcgaggggaacgatggtggggttcgttt

SEQ ID NO: 14788 - DNA, 2095 bp, Zea Mays
gcttgcattgcattggcactttggcaggctgcgagcagtctgacagctacacacacaggcagacgccgttccgcgggggaaaggtgcggacgcctgaatcctctccaactccggcaccgcattcgcacgcccgcgaagccccgaatcggagaggacagaggagtcatggacgcggcggcggcggcggctgcggctgcgagccccacgagcaagaggatcgcgctggtgacgggagggaacaagggcatcgggctcgagacgtgccggcagctggcgtccaggggcgtcagggtcgtcctgacggcgaggaacgaggcgaggggtttggaagcggtcgagcgcgtcaggtgcgcccgcggcgacgccgaggtttacttccaccagctcgacgtcaccgacccctgcagcgccgcccggctcgcggatttcgtcagggatcagttcggtaggctggacatcctggtatggcaaccccttctcgctcgcttatctctctctctgccggcggcttagtgaatttgggtattggaaaagtgataatgttccgctaatatttttgggtggaactgatggagctagcttatcatatgttttggacattctgagccagcaggaaaaccagatgattccttttgagttccgaacatggatgtacccgtaggccgtagggttatttttggcttactaactaaaaatgaaaaagaaaatcttatgatgatgaccactactttacaactctgttcctaatacaactatgcgtgcctgtttcgcttcacaattcgagaaaacaaagcatggaatcaaattgttgcttagtttttacacctaagaacatttcctaagtagcacacttcaatctttggttcgactgattgtttgcaattcaccaccatggcaccgtcatgttttggccattgttgtctgcagatcaacaatgcaggaatttcaggcgttcaccgtgatccagttttgtctgctgcggtcaaggataaggtacccttaatctaaagcaaaagaatacaaagtactgcgtttgtgcagtttgtgagcgattctcacgcaccacagtttcaatgaggcacattacaggctaacacaactgcctctcacatttcacaaggctaacacaatagcttgaagaatagtggttaggatattagcattctcattgcacgttgataatcttaagttatgcaactcaggtaccatgttactaaagctatttgattggtcgatggcatggatgtaaatcagagagtcgaatggatgaaagaaaattcgaaagaaacatacgaggaggctgtacaatgtatgaaaacaaactattatggtgccaaacttgtcacagaggcactacttcctcttcttcagttatcctcctctggaagaattgtcaacgtttcgtcaggctttggactactgagaaatttcaacagcgaagaccttaggaaggagtttgaagacatcgacaatcttactgaaagtagactggaggaactgatggataagtttctagaggattttaaggccaacttagtagaggcgcatgggtggccgacaggtggatcttcagcctacaaagtcgtcaaagcggcgctcaatgcgtacacgaggattcttgccaagaagtatcctacgctgcgtatcaattgtttgacgcctggttatgtcaagaccgacatgtctatgcacatgggggtactgacacttgaggaaggcgctcgcaaccccgtgaaggttgctctcttgcctgacgacggaccgactggtgcttattttgatctgaatggcgaggcgtcctttgtgtgatggtatttctcccttttcagcttcagaataaaagaaagagctatgaagtagttagtgccaatcagtattgtagttcgacttgaatacttaaactagcacgttgagcaaaccgtagagctcaacaccagggatttcctcgtcttctgtataatatctctggtgatgattgtatatttgcaatgaaccatgcagatttggtcgcgccaaggtagtgtttggttggcacaatggtaatggcaacaggaatgaaaatggactgcgaggggaacgatggtggggttcgttt

SEQ ID NO: 14789 - DNA, 1595 bp, Zea Mays
acgagatgcagcattgcagcacgacacgactgcacgaggacgaaaaaaaaaatatccggacatccggtcacggttgccattcttttcctgtaaccgaaccctgaagggtagcgtcatcatccagaccaccattaccagagtgctctgctctcgctggaggccgtggttcattcacgttcatggaggccgccgccattcccaccagtgccccggaaaccagtccttcaactgacctggctggaactggaacctaccaggttttccttacaggaagtcgtagtttctacctactggattgccgttgtcaccggcggcaacaaagggatcgggctagaggtgtgccggcagctggccggcgccggcgccaccgtcgtcgtcttaacagccagggacgagacgaggggtgcagccgctgcacaagagctcagagaatctgggctctccgatgtcatcttccatcagctggacatcaccgacgctgcgagcgtcagtcggctggctgagttcctcaaggctcgttttggaaagctagatatcctggtaaataatgccgcagttggtgctgttgagtacgtccaagatcctgctgacagttcaacgagcgaggaagagctgagtggcatggatatggtccaaaggcttcagtgcatgcttaagagagtccgggagacctacgacgctgcgacagaaggcatcaagacaaactactatggcataaagcatgtgatcgaagccttgctgcctctgcttcaagcttcctccgatgggaggatcgttaacgtctcctctgacttcggactgctaaggctgatcaacaacgaggaagctaaggcaggagctaaacgacgtggagaagctcaccgaggagaggctggacgaggtgctggccgcgtacctgagagacttcgacgccggcgaggtgggggcgcgcgggtggccggtggacttctcggcctacaaggtggccaaggtggccatgaacgcgtacacgaggatcctagcgaggagccacccggggctgcgcgtcaactgcgcgcaccccggctacgtgagcaccgacatgaccgtccacaccgggcctctcacgcccgagcaaggcgcggccaacgtcgtgaaggtggcgctgctgccggagggcggcccgaccggcgcgtacttcgcgttgggagaggaggcgtcctttatgtgacgaaagcaccgtcgtcgttaagttcgtcgttgttcgccaactccctgttagtcgatttctaaatcgacgtacaatgaaatacatcatcgctgcaaactcacaaatgaaaacaagggaaccttgtagcaaaaaaaaaaagaagtggacagaataatgaataagcatgtcaaatatctcttgagtatctatttgttcaagtatgaatgactttgtacaagtatcaaagattgtgagtggaaccaaattaagcagggctttgtgcatgtatgaacgactccaaatgacagaacgaaggaagctggtaacaccgccggtgtcctgcaaaacatgcatactagccttcatgagattatcatcatcagatagataatgaaattacatcaagcaccaaaattctgttgagtac

SEQ ID NO: 14790 - DNA, 1433 bp, Zea Mays
gaaggcgaggaggaaccgcctcgctctcggtgacggcacccgcgctctgtcacggtgctagccagtgaagtccgacgccggcagaggccgatggaggagcccggtgcgtccccttgctccagcgcgcggtgtgcacaggcagctaggctcatggcggccgctacccctagtccccacagcgcaagggtcgccgttgtcaccggcgggaacaaagggatcgggctggaggtgtgcaggcagctggccagcaacggcatcaccgtcgtcctaacagccagagacgagaagcggggcgccgccgccgtagaggagctcgcggacgcgggcctctccggcgtcgttttccatcagctggaggtcaccgacgcccagagcattgctagattggccggtttcctgaaggcgtggtttgggaagctagacatcctggtaaacaatgccgctatcggtggggttcagtcacttcccgttgaaaatgttggcgaaaagatcaagggcatggacgcgtttcagatggcggagctgatgcggaagagctgccgggagacaaacgacaccgcgaaggcaggcgtccagacgaactactacggggtgaagaacgtgaccgaggcgctgctgcccctgctcctgcaggcctcctcctccggcggaggaagggtcgtcaacgtctcctccgacttcgggctgctacgcgaatgaggaggtgaagcatgagctggacgacattgagggcctgacggaggagaggctggacgagctgctgagcacgttcctccgggacttcgaggccggcgcgctgaagtcccgcggctggccgacggagttcgccgcgtacaaggtggccaaggccgccctgaactcctactcgagggtcctggcgaggcggcaccccgagctgcgcgtcaactgcgcgcacccgggctacgtcaagaccgacatgaccaggcagacgggcctgctgacgcccgcgcagggcgcggccaacgtcgtcaaggtggcgctgctcccggaaggcggccccaccggcgctttcttcgcgctaggcaaggaggcgccgttcgtgtgacgctgccgtactgggctggcggtggtggggacttcacggtccggcgctagtgcgccgcctctccgacttgcctggcgcctgctatctactacctctctgctctctgtgctgcgcagcgtagtttgctggtttgggacggcgaataaagaaaggatcgctgctgcctcttagttagttgggttctgtcagtactaagcttcggtaataaaatacccctagatatgaccatattttatctgattggttacccgcaccgttccatcctaaattaccgtgggcattaactttggattagcgtctgtttgattgactgtacgcgaggaacggtggctacataagtagatataaaataagttattttgaggct

SEQ ID NO: 14791 - DNA, 1245 bp, Zea Mays
gaaggcgaggaggaaccgcctcgctctcggtgacggcacccgcgctctgtcacggtgctagccagtgaagtccgacgccggcagaggccgatggaggagcccggtgcgtccccttgctccagcgcgcggtgtgcacaggcagctaggctcatggcggccgctacccctagtccccacagcgcaagggtcgccgttgtcaccggcgggaacaaagggatcgggctggaggtgtgcaggcagctggccagcaacggcatcaccgtcgtcctaacagccagagacgagaagcggggcgccgccgccgtagaggagctcgcggacgcgggcctctccggcgtcgttttccatcagctggaggtcaccgacgcccagagcattgctagattggccggtttcctgaaggcgtggtttgggaagctagacatcctggtaaacaatgccgctatcggtggggttcagtcacttcccgttgaaaatgttggcgaaaagatcaagggcatggacgcgtttcagatggcggagctgatgcggaagagctgccgggagacaaacgacaccgcgaaggcaggcgtccagacgaactactacggggtgaagaacgtgaccgaggcgctgctgcccctgctcctgcaggcctcctcctccggcggaggaagggtcgtcaacgtctcctccgacttcgggctgctacgctatctcaggaatgaggaggtgaagcatgagctggacgacattgagggcctgacggaggagaggctggacgagctgctgagcacgttcctccgggacttcgaggccggcgcgctgaagtcccgcggctggccgacggagttcgccgcgtacaaggtggccaaggccgccctgaactcctactcgagggtcctggcgaggcggcaccccgagctgcgcgtcaactgcgcgcacccgggctacgtcaagaccgacttgcctggcgcctgctatctactacctctctgctctctgtgctgcgcagcgtagtttgctggtttgggacggcgaataaagaaaggatcgctgctgcctcttagttagttgggttctgtcagtactaagcttcggtaataaaatacccctagatatgaccatattttatctgattggttacccgcaccgttccatcctaaattaccgtgggcattaactttggattagcgtctgtttgattgactgtacgcgaggaacggtggctacataagtagatataaaataagttattttgaggct

SEQ ID NO: 14792 - DNA, 1252 bp, Zea Mays
tgcgtctctcttctttccctctccctctgtctaccgcgcgcgcccgccgctacctgccagccgcacgcccgccgccagcgccccgccgcaaccccgcgcgccggctcgagtacttcgctgtccgctcccattcaactccggcccagctgcgtgctgctccggcaccggcaggcggataagcccagcaggcaagcaggcaggagactaggagaggaggagagctcagcactgcacgcgcgctcccctccccttgttggccaaatcgatcggtccccttcaggcttaaggcttcggagcttgctttacttcagttggcaggtgtattttcaggggatgttgcttgagcccaaatggatgacagcagaagtgtgatctgacgtgcgctcagcttcaccaacacactgattcttgaatgcattaagcatagtgcacaagcagttattcatgataagaaatcttttgctcaaatgtagctaattagcacttcatacattctggatagaatcgattataccatttcgtcatctgacttgtttgaagaactttggtcttcctttacagacatagaaggtgctctcaaagacatcgaaggtcttcctttaccgtttcgtcatctgcaatgtgcttatagtatgagagttgcctgctaattcctctaaatatagcattagttcagcttgtagcttcatattacatcaggtaatggatggcatcagaactattctctgtaatgatggtataagagctcacttgctaattcttctgaacattccctgggttcagcttgtaactttagttagatcaatggatatcatctaaactattcttttctttttttcttttgaaacagggcatatctacttagtacctgcatttttttgttgcttgttgatgatactaatactgtctgatataactagttgctttttctctctttgctgttgtatctgctcttggcatctacaacaaagacgggatagtagtttatgatggaaaggggctgttcagtgatgctcgtgtttggtggtaagcttttttattcacaaaaatatgtaaaagaaggagttcatcaagcagtttgctgagatttcatcaataaaccaacgaattttgttatccggtccagcaggttctgagatttatcaggaaacattggtaaaggcacttgctaaacattttggtgctagacttcttgtcttggattcacttttgctaccttggagaggaaggataaggacgcaaagaagacgaa

SEQ ID NO: 14793 - DNA, 1316 bp, Zea Mays
ccgcgcgcgcccgccgctacctgccagccgcacgcccgccgccagcgccccgccgcaaccccgcgcgccggctcgagtacttcgctgtccgctcccattcaactccggcccagctgcgtgctgctccggcaccggcaggcggataagcccagcaggcaagcaggcaggagactaggagaggaggagagctcagcactgcacgcgcgctcccctccccttgttggccaaatcgatcggtccccttcaggcttaaggcttcggagcttgctttacttcagttggcaggtgtattttcaggggatgttgcttgagcccaaatggatgacagcagaagtgtgatctgacgtgcgctcagcttcaccaacacactgattcttgaatgcattaagcatagtgcacaagcagttattcatgataagaaatcttttgctcaaatacatagaaggtgctctcaaagacatcgaaggtcttcctttaccgtttcgtcatctgcaatgtgcttatagtatgagagttgcctgctaattcctctaaatatagcattagttcagcttgtagcttcatattacatcagggcatatctacttagtacctgcatttttttgttgcttgttgatgatactaatactgtctgatataactagttgctttttctctctttggtaagaatctgcaattaaatttgacatccattggttatatattttttccttgttcagttaccacacatgttgccatctgaaaaggcattttcagctgttgtatctgctcttggcatctacaacaaagacgggatagtagtttatgatggaaaggggctgttcagtgatgctcgtgtttggtggtaagcttttttattcacaaaaatatgtaaaagaaggagttcatcaagcagtttgctgagatttcatcaataaaccaacgaattttgttatccggtccagcaggttctgagatttatcaggaaacattggtaaaggcacttgctaaacattttggtgctagacttcttgtcttggattcacttttgctaccttgggtaagctcatactgtatatttatttacctgctcatgaacattcagaagctaagaaactttgaattattgcacgttctattacaattttcctatactgaacatgagacttctcataggcaacccagttatgagcttgcttttgtattgactatcctgtgaaatcagatattctttccccatatcacattttttgtagcaccatattagtccaatacatatatttgtttatataaattgcttgattgatctctaggggaccaagttatggttatcgagg

SEQ ID NO: 14794 - DNA, 1109 bp, Zea Mays
ccgcgcgcgcccgccgctacctgccagccgcacgcccgccgccagcgccccgccgcaaccccgcgcgccggctcgagtacttcgctgtccgctcccattcaactccggcccagctgcgtgctgctccggcaccggcaggcggataagcccagcaggcaagcaggcaggagactaggagaggaggagagctcagcactgcacgcgcgctcccctccccttgttggccaaatcgatcggtccccttcaggcttaaggcttcggagcttgctttacttcagttggcaggtgtattttcaggggatgttgcttgagcccaaatggatgacagcagaagtgtgatctgacgtgcgctcagcttcaccaacacactgattcttgaatgcattaagcatagtgcacaagcagttattcatgataagaaatcttttgctcaaatacatagaaggtgctctcaaagacatcgaaggtcttcctttaccgtttcgtcatctgcaatgtgcttatagtatgagagttgcctgctaattcctctaaatatagcattagttcagcttgtagcttcatattacatcagggcatatctacttagtacctgcatttttttgttgcttgttgatgatactaatactgtctgatataactagttgctttttctctctttggtaagaatctgcaattaaatttgacatccattggttatatattttttccttgttcagttaccacacatgttgccatctgaaaaggcattttcagctgttgtatctgctcttggcatctacaacaaagacgggatagtagtttatgatggaaaggggctgttcagtgatgctcgtgtttggtggtaagcttttttattcacaaaaatatgtaaaagaaggagttcatcaagcagtttgctgagatttcatcaataaaccaacgaattttgttatccggtccagcaggttctgagatttatcaggaaacattggtaaaggcacttgctaaacattttggtgctagacttcttgtcttggattcacttttgctaccttgggaagagagtggctcttcactcccatcggattaacaaaaaagaggaaggataaggacgcaaagaagacgaa

SEQ ID NO: 14795 - DNA, 1157 bp, Zea Mays
ccgcgcgcgcccgccgctacctgccagccgcacgcccgccgccagcgccccgccgcaaccccgcgcgccggctcgagtacttcgctgtccgctcccattcaactccggcccagctgcgtgctgctccggcaccggcaggcggataagcccagcaggcaagcaggcaggagactaggagaggaggagagctcagcactgcacgcgcgctcccctccccttgttggccaaatcgatcggtccccttcaggcttaaggcttcggagcttgctttacttcagttggcaggtgtattttcaggggatgttgcttgagcccaaatggatgacagcagaagtgtgatctgacgtgcgctcagcttcaccaacacactgattcttgaatgcattaagcatagtgcacaagcagttattcatgataagaaatcttttgctcaaatacatagaaggtgctctcaaagacatcgaaggtcttcctttaccgtttcgtcatctgcaatgtgcttatagtatgagagttgcctgctaattcctctaaatatagcattagttcagcttgtagcttcatattacatcaggtaatggatggcatcagaactattctctgtaatgatggtataagagctcacttgctaattcttctgaacattccctgggttcagcttgtaactttagttagatcaatggatatcatctaaactattcttttctttttttcttttgaaacagggcatatctacttagtacctgcatttttttgttgcttgttgatgatactaatactgtctgatataactagttgctttttctctctttggtaagaatctgcaattaaatttgacatccattggttatatattttttccttgttcagttaccacacatgttgccatctgaaaaggcattttcagctgttgtatctgctcttggcatctacaacaaagacgggatagtagtttatgatggaaaggggctgttcagtgatgctcgtgtttggtggttctgagatttatcaggaaacattggtaaaggcacttgctaaacattttggtgctagacttcttgtcttggattcacttttgctaccttgggaagagagtggctcttcactcccatcggattaacaaaaaagaggaaggataaggacgcaaagaagacgaa

SEQ ID NO: 14796 - DNA, 1170 bp, Zea Mays
ccgcgcgcgcccgccgctacctgccagccgcacgcccgccgccagcgccccgccgcaaccccgcgcgccggctcgagtacttcgctgtccgctcccattcaactccggcccagctgcgtgctgctccggcaccggcaggcggataagcccagcaggcaagcaggcaggagactaggagaggaggagagctcagcactgcacgcgcgctcccctccccttgttggccaaatcgatcggtccccttcaggcttaaggcttcggagcttgctttacttcagttggcaggtgtattttcaggggatgttgcttgagcccaaatggatgacagcagaagtgtgatctgacacatagaaggtgctctcaaagacatcgaaggtcttcctttaccgtttcgtcatctgcaatgtgcttatagtatgagagttgcctgctaattcctctaaatatagcattagttcagcttgtagcttcatattacatcaggtaatggatggcatcagaactattctctgtaatgatggtataagagctcacttgctaattcttctgaacattccctgggttcagcttgtaactttagttagatcaatggatatcatctaaactattcttttctttttttcttttgaaacagggcatatctacttagtacctgcatttttttgttgcttgttgatgatactaatactgtctgatataactagttgctttttctctctttggtaagaatctgcaattaaatttgacatccattggttatatattttttccttgttcagttaccacacatgttgccatctgaaaaggcattttcagctgttgtatctgctcttggcatctacaacaaagacgggatagtagtttatgatggaaaggggctgttcagtgatgctcgtgtttggtggtaagcttttttattcacaaaaatatgtaaaagaaggagttcatcaagcagtttgctgagatttcatcaataaaccaacgaattttgttatccggtccagcagggttctgagatttatcaggaaacattggtaaaggcacttgctaaacattttggtgctagacttcttgtcttggattcacttttgctaccttgggaagagagtggctcttcactcccatcggattaacaaaaaagaggaaggataaggacgcaaagaagacgaa

SEQ ID NO: 14797 - DNA, 1115 bp, Zea Mays
ccgcgcgcgcccgccgctacctgccagccgcacgcccgccgccagcgccccgccgcaaccccgcgcgccggctcgagtacttcgctgtccgctcccattcaactccggcccagctgcgtgctgctccggcaccggcaggcggataagcccagcaggcaagcaggcaggagactaggagaggaggagagctcagcactgcacgcgcgctcccctccccttgttggccaaatcgatcggtccccttcaggcttaaggcttcggagcttgctttacttcagttggcaggtgtattttcaggggatgttgcttgagcccaaatggatgacagcagaagtgtgatctgacgtgcgctcagcttcaccaacacactgattcttgaatgcattaagcatagtgcacaagcagttattcatgataagaaatcttttgctcaaatacatagaaggtgctctcaaagacatcgaaggtcttcctttaccgtttcgtcatctgcaatgtgcttatagtatgagagttgcctgctaattcctctaaatatagcattagttcagcttgtagcttcatattacatcagttaccacacatgttgccatctgaaaaggcattttcagctgttgtatctgctcttggcatctacaacaaagacgggatagtagtttatgatggaaaggggctgttcagtgatgctcgtgtttggtggtaagcttttttattcacaaaaatatgtaaaagaaggagttcatcaagcagtttgctgagatttcatcaataaaccaacgaattttgttatccggtccagcaggtacttactttgtctctgtttggagacctgtacttcctttgttgtttaccttttccagttgatttgtaatgctagtggccatacttgtttgataattatccaacttcatgtgcttctgtatttctctaattttttgcggcaatgcatttaggttctgagatttatcaggaaacattggtaaaggcacttgctaaacattttggtgctagacttcttgtcttggattcacttttgctaccttgggaagagagtggctcttcactcccatcggattaacaaaaaagaggaaggataaggacgcaaagaagacgaa

SEQ ID NO: 14798 - DNA, 1403 bp, Zea Mays
cgtcgcagtcgcagctgcaggccagcagccacaggccacggccagcaggtgaaaatccgtcgcatttatggccaccgggatcctcctcggcctataaatccgtctcggcatttatgagcacggacggctctcgtccccctcacttcacttgtcgttcgttcagttcctgtcgctgccgacgccgccgaggcccgaggggaatcgaccaccatcaccatggggaggactccgtgctgcgacagcaagggcatcaagaaggggccatgggcgccggaggaggacaagctgctcgtcgactacgtccaggccaacggacccggcaactggcgcattctccccaagctcgcggggctgaaccggtgcggcaagagctgccggctgcggtggaccaactacctgcgcccggacatcaagcgcgggcccttcacccccgaggagcacaattccatccttcagctccacgccgtagtcggcaacaagtggtccatgatcgcggcacagatgccgggccggacggacaacgagatcaagaactactggaacacgcacatgaagaagcctcctgccccgccgcccgccacacggcccagtgggagaccgccaggctcgaggccgaggcgcgcctctccctgctctcgtcctcggccgccacgacggtcacctccgccaccgcctcctcctcgtcgtccaccgtcgccgccgagcatgcggcgccacccgacatcttcctgcgcctctggaactccgaggtcggggattctttccgcggcgcagccgcgcagcaggggcacggtccggaggcgagcgcggcgggcgctggcgtgccggcgctgctgcctgagctcggcggtggcggtgacgattcctcggccgcgtcgacctacgaggctgaggccgcggcggacgacggctaccaggcgttcctggacctggcgatggaggagttcgcgctgctgcacggccggctcggcgcgttctcggcgttcccgcaggccgacgtgttcgctgaggcgcactgctgccttttcgctccgtttgaggagtagctttgctcgatctcattgccagtcatcagacatcagagtagtagactagacgtacgtacgtgaccacgtgcatgtaccctgcatgcgtccgtctgcgtacgcgtacgtacatacatacgtacacatgccgcttgtcttggggacgatggcgtatgtacgtgcctgtacgcaacgagcggatgggtggcgcgtgtgacagttcgttattagtctgtgccctagagcaagaggtttttgcgactgctccaaactagccttggcattgctctggtgaacgatgtcaactttcaagtattctgcctctgcgtgtttgtgtacaagctctgacttactgcgtggatgcagaattctctgtag

SEQ ID NO: 14799 - DNA, 1662 bp, Zea Mays
tttatgagcacggacggctctcgtccccctcacttcacttgtcgttcgttcagttcctgtcgctgccgacgccgccgaggcccgaggggaatcgaccaccatcaccatggggaggactccgtgctgcgacagcaagggcatcaagaaggggccatgggcgccggaggaggacaagctgctcgtcgactacgtccaggccaacggacccggcaactggcgcattctccccaagctcgcgggtacgtactgtactgtacgtgctcttctcctgtcgatatcgagcccggccgcttgcttgtctcgtcatttctcaataccgagctggccgcttgttggtgccgccgccgcgcgcgcttgcagggctgaaccggtgcggcaagagctgccggctgcggtggaccaactacctgcgcccggacatcaagcgcgggcccttcacccccgaggagcacaattccatccttcagctccacgccgtagtcggcaacaagtgagtttctaatcctcagccgcgctcagtagtacgtgcgtgcgtgcgtgccgtcaaagcaggagtactgttcatcagcaacgcgttctgtatttattgcatatataccctcactctgcaactcatcactcatgtgcattcatgcaacaaacacgacgaaacatgcatctggattctggagcgcacgaaagccagtcctactacagcatcctcgcttacgcgtgctggaacgttgtggtatcggtcaggtggtccatgatcgcggcacagatgccgggccggacggacaacgagatcaagaactactggaacacgcacatgaagaagcctcctgccccgccgcccgccacacggcccagtgggagaccgccaggctcgaggccgaggcgcgcctctccctgctctcgtcctcggccgccacgacggtcacctccgccaccgcctcctcctcgtcgtccaccgtcgccgccgagcatgcggcgccacccgacatcttcctgcgcctctggaactccgaggtcggggattctttccgcggcgcagccgcgcagcaggggcacggtccggaggcgagcgcggcgggcgctggcgtgccggcgctgctgcctgagctcggcggtggcggtgacgattcctcggccgcgtcgacctacgaggctgaggccgcggcggacgacggctaccaggcgttcctggacctggcgatggaggagttcgcgctgctgcacggccggctcggcgcgttctcggcgttcccgcaggccgacgtgttcgctgaggcgcactgctgccttttcgctccgtttgaggagtagctttgctcgatctcattgccagtcatcagacatcagagtagtagactagacgtacgtacgtgaccacgtgcatgtaccctgcatgcgtccgtctgcgtacgcgtacgtacatacatacgtacacatgccgcttgtcttggggacgatggcgtatgtacgtgcctgtacgcaacgagcggatgggtggcgcgtgtgacagttcgttattagtctgtgccctagagcaagaggtttttgcgactgctccaaactagccttggcattgctctggtgaacgatgtcaactttcaagtattctgcctctgcgtgtttgtgtacaagctctgacttactgcgtggatgcagaattctctgtag

SEQ ID NO: 14800 - DNA, 1874 bp, Zea Mays
gtcgagtcgagccgagtcatctcaataccccctaatcatgcgtgatgcgtgtagtcagctcgtcctcgctcgccgaacgctggccatgtgccatctgattgggagacgagacgatggaggtcgcgacggcagcgaaggcgccgtcgtcccggctcgctcggagcctggctgctgcagcgccttgttacaaaggggtgtccgtcttcttcgccgcggtagtcgccggcgctctcgtctccgcctgctggatgtctgtcagcgccagattgcaggtcactccgatcactcctgccgccactccaggcatagcacgcaacgctgcaacggggccggaggcgccagcgccgggtcggccacggtccactggcgtcggcgcgagcacgaaccaaacgccgtccgcgggggcggccagttccgcgccaccgcctcgggaggtgccggactgccccgcctacttccggtggatccacgaggacctgcggccgtggcgcggcacgggggtcacgcgcggcgcggtggagggcgcgcgccggttcgcgcccaggctccgcgtcgccgtggtcgcgggccgcctgtacgtggcgcgctacggccggcggcggtgcttccagacgcgggccgcgttcacgcagtggggcatcctgcagctgctccgccgctaccccggccgcgtcccggacctcgacctcatgttcgactgtgaggacctgcccgtcgtcggcgctggcgaacgccacggggcccagccccagcctcctcctcctccgctgttccggtactgcggcagtgaggccacgctggacatcgcgtttcctgactggtcgttctggggccggagctcaacataaagccatgggaagcgctgcaaagggagataaacgaagcgaacgccgtggtgaactggacggacagggcgccgtacgcgtactggaaggggaaccccaaggtgggcgccgaacgcctgctcctcctccggtgcaacgcgtccggcgagcgtgactggaacgcgcgggtatacgcgcaggactggggagaggaggtgcggcacggattcagggggtcggacctgtccaagcagtgcacgcacaggtacaggatctacatcgaagggcgggggtggtcggtgagcgagaagtacatcctggcgtgcgagtcggtggcgctcatggtgcggccgaggttccacgacttcttctcgcgggggctgtcgccgctgcgccactactggcccgtccgcggcgaccgcggcatgtgccggtccatcaagcacgccgtggactgggggaacgctcacgcggacagggcgcaggagatggcagggaacgcgagcaggttcatccgggaggagctgacgatggaccgcgtctacgactacatgttccacctcctgacagagtacgccaggctgctgcggtacaggcccgcggtgccgcgcggcgccgcggaggtcaccgtcgagtccatgatccgggggaggcgggggctggagaggcagttcatggtggacacgcttgcggccagtgcgagtggcgatggcccctgcaggctgaagccggcttacagtcccgaggaactgcaggcgctgcggagagcgagagcggatgcggtgaggcaagtggaggcgtgggagatctgacgttgacacgcgtagagactagaggaatttggacaaaggaatatacggcgaatttgtatccgaattatttatttttgacacttttgtgtccttggctatggttgttaaatcaaaaggcctgaacttgactgttgacactttgtttgcttccttggctccggtctcccactttcttccttcatccttgtttgcttcggtctttaaggctccttttgttttggatcaggttaacagtgtc

SEQ ID NO: 14801 - DNA, 1872 bp, Zea Mays
gtcgagtcgagccgagtcatctcaataccccctaatcatgcgtgatgcgtgtagtcagctcgtcctcgctcgccgaacgctggccatgtgccatctgattgggagacgagacgatggaggtcgcgacggcagcgaaggcgccgtcgtcccggctcgctcggagcctggctgctgcagcgccttgttacaaaggggtgtccgtcttcttcgccgcggtagtcgccggcgctctcgtctccgcctgctggatgtctgtcagcgccagagtcactccgatcactcctgccgccactccaggcatagcacgcaacgctgcaacggggccggaggcgccagcgccgggtcggccacggtccactggcgtcggcgcgagcacgaaccaaacgccgtccgcgggggcggccagttccgcgccaccgcctcgggaggtgccggactgccccgcctacttccggtggatccacgaggacctgcggccgtggcgcggcacgggggtcacgcgcggcgcggtggagggcgcgcgccggttcgcgcccaggctccgcgtcgccgtggtcgcgggccgcctgtacgtggcgcgctacggccggcggcggtgcttccagacgcgggccgcgttcacgcagtggggcatcctgcagctgctccgccgctaccccggccgcgtcccggacctcgacctcatgttcgactgtgaggacctgcccgtcgtcggcgctggcgaacgccacggggcccagccccagcctcctcctcctccgctgttccggtactgcggcagtgaggccacgctggacatcgcgtttcctgactggtcgttctggggttggccggagctcaacataaagccatgggaagcgctgcaaagggagataaacgaagcgaacgccgtggtgaactggacggacagggcgccgtacgcgtactggaaggggaaccccaaggtgggcgccgaacgcctgctcctcctccggtgcaacgcgtccggcgagcgtgactggaacgcgcgggtatacgcgcaggactggggagaggaggtgcggcacggattcagggggtcggacctgtccaagcagtgcacgcacaggtacaggatctacatcgaagggcgggggtggtcggtgagcgagaagtacatcctggcgtgcgagtcggtggcgctcatggtgcggccgaggttccacgacttcttctcgcgggggctgtcgccgctgcgccactactggcccgtccgcggcgaccgcggcatgtgccggtccatcaagcacgccgtggactgggggaacgctcacgcggacagggcgcaggagatggcagggaacgcgagcaggttcatccgggaggagctgacgatggaccgcgtctacgactacatgttccacctcctgacagagtacgccaggctgctgcggtacaggcccgcggtgccgcgcggcgccgcggaggtcaccgtcgagtccatgatccgggggaggcgggggctggagaggcagttcatggtggacacgcttgcggccagtgcgagtggcgatggcccctgcaggctgaagccggcttacagtcccgaggaactgcaggcgctgcggagagcgagagcggatgcggtgaggcaagtggaggcgtgggagatctgacgttgacacgcgtagagactagaggaatttggacaaaggaatatacggcgaatttgtatccgaattatttatttttgacacttttgtgtccttggctatggttgttaaatcaaaaggcctgaacttgactgttgacactttgtttgcttccttggctccggtctcccactttcttccttcatccttgtttgcttcggtctttaaggctccttttgttttggatcaggttaacagtgtc

SEQ ID NO: 14802 - DNA, 1825 bp, Zea Mays
gatgcgtgtagtcagctcgtcctcgctcgccgaacgctggccatgtgccatctgattgggagacgagacgatggaggtcgcgacggcagcgaaggcgccgtcgtcccggctcgctcggagcctggctgctgcagcgccttgttacaaaggggtgtccgtcttcttcgccgcggtagtcgccggcgctctcgtctccgcctgctggatgtctgtcagcgccagagtcactccgatcactcctgccgccactccaggcatagcacgcaacgctgcaacggggccggaggcgccagcgccgggtcggccacggtccactggcgtcggcgcgagcacgaaccaaacgccgtccgcgggggcggccagttccgcgccaccgcctcgggaggtgccggactgccccgcctacttccggtggatccacgaggacctgcggccgtggcgcggcacgggggtcacgcgcggcgcggtggagggcgcgcgccggttcgcgcccaggctccgcgtcgccgtggtcgcgggccgcctgtacgtggcgcgctacggccggcggcggtgcttccagacgcgggccgcgttcacgcagtggggcatcctgcagctgctccgccgctaccccggccgcgtcccggacctcgacctcatgttcgactgtgaggacctgcccgtcgtcggcgctggcgaacgccacggggcccagccccagcctcctcctcctccgctgttccggtactgcggcagtgaggccacgctggacatcgcgtttcctgactggtcgttctggggccggagctcaacataaagccatgggaagcgctgcaaagggagataaacgaagcgaacgccgtggtgaactggacggacagggcgccgtacgcgtactggaaggggaaccccaaggtgggcgccgaacgcctgctcctcctccggtgcaacgcgtccggcgagcgtgactggaacgcgcgggtatacgcgcaggactggggagaggaggtgcggcacggattcagggggtcggacctgtccaagcagtgcacgcacaggtacaggatctacatcgaagggcgggggtggtcggtgagcgagaagtacatcctggcgtgcgagtcggtggcgctcatggtgcggccgaggttccacgacttcttctcgcgggggctgtcgccgctgcgccactactggcccgtccgcggcgaccgcggcatgtgccggtccatcaagcacgccgtggactgggggaacgctcacgcggacagggcgcaggagatggcagggaacgcgagcaggttcatccgggaggagctgacgatggaccgcgtctacgactacatgttccacctcctgacagagtacgccaggctgctgcggtacaggcccgcggtgccgcgcggcgccgcggaggtcaccgtcgagtccatgatccgggggaggcgggggctggagaggcagttcatggtggacacgcttgcggccagtgcgagtggcgatggcccctgcaggctgaagccggcttacagtcccgaggaactgcaggcgctgcggagagcgagagcggatgcggtgaggcaagtggaggcgtgggagatctgacgttgacacgcgtagagactagaggaatttggacaaaggaatatacggcgaatttgtatccgaattatttatttttgacacttttgtgtccttggctatggttgttaaatcaaaaggcctgaacttgactgttgacactttgtttgcttccttggctccggtctcccactttcttccttcatccttgtttgcttcggtctttaaggctccttttgttttggatcaggttaacagtgtc

SEQ ID NO: 14803 - DNA, 1829 bp, Zea Mays
gatgcgtgtagtcagctcgtcctcgctcgccgaacgctggccatgtgccatctgattgggagacgagacgatggaggtcgcgacggcagcgaaggcgccgtcgtcccggctcgctcggagcctggctgctgcagcgccttgttacaaaggggtgtccgtcttcttcgccgcggtagtcgccggcgctctcgtctccgcctgctggatgtctgtcagcgccagagtaattgcaggtcactccgatcactcctgccgccactccaggcatagcacgcaacgctgcaacggggccggaggcgccagcgccgggtcggccacggtccactggcgtcggcgcgagcacgaaccaaacgccgtccgcgggggcggccagttccgcgccaccgcctcgggaggtgccggactgccccgcctacttccggtggatccacgaggacctgcggccgtggcgcggcacgggggtcacgcgcggcgcggtggagggcgcgcgccggttcgcgcccaggctccgcgtcgccgtggtcgcgggccgcctgtacgtggcgcgctacggccggcggcggtgcttccagacgcgggccgcgttcacgcagtggggcatcctgcagctgctccgccgctaccccggccgcgtcccggacctcgacctcatgttcgactgtgaggacctgcccgtcgtcggcgctggcgaacgccacggggcccagccccagcctcctcctcctccgctgttccggtactgcggcagtgaggccacgctggacatcgcgtttcctgactggtcgttctggggccggagctcaacataaagccatgggaagcgctgcaaagggagataaacgaagcgaacgccgtggtgaactggacggacagggcgccgtacgcgtactggaaggggaaccccaaggtgggcgccgaacgcctgctcctcctccggtgcaacgcgtccggcgagcgtgactggaacgcgcgggtatacgcgcaggactggggagaggaggtgcggcacggattcagggggtcggacctgtccaagcagtgcacgcacaggatctacatcgaagggcgggggtggtcggtgagcgagaagtacatcctggcgtgcgagtcggtggcgctcatggtgcggccgaggttccacgacttcttctcgcgggggctgtcgccgctgcgccactactggcccgtccgcggcgaccgcggcatgtgccggtccatcaagcacgccgtggactgggggaacgctcacgcggacagggcgcaggagatggcagggaacgcgagcaggttcatccgggaggagctgacgatggaccgcgtctacgactacatgttccacctcctgacagagtacgccaggctgctgcggtacaggcccgcggtgccgcgcggcgccgcggaggtcaccgtcgagtccatgatccgggggaggcgggggctggagaggcagttcatggtggacacgcttgcggccagtgcgagtggcgatggcccctgcaggctgaagccggcttacagtcccgaggaactgcaggcgctgcggagagcgagagcggatgcggtgaggcaagtggaggcgtgggagatctgacgttgacacgcgtagagactagaggaatttggacaaaggaatatacggcgaatttgtatccgaattatttatttttgacacttttgtgtccttggctatggttgttaaatcaaaaggcctgaacttgactgttgacactttgtttgcttccttggctccggtctcccactttcttccttcatccttgtttgcttcggtctttaaggctccttttgttttggatcaggttaacagtgtc

SEQ ID NO: 14804 - DNA, 1012 bp, Zea Mays
gccgcaacggggactctggggagtgattcgagtgaacctttttccttttctttttgattttacaaggcacgaataggaagagaagcgtgggaggaggatttttttgccgcagcgtccccatggcggcgggaagagaaaccgacgaacagctgaccgagtacgagaagcagcggctgtcgcggatacgcgagaacgaggcccgactcgaggccctgggcctccgcagcctcgcagcgtcccctcttctccgcaactcgtcgccggggacggccaaggggaagcagaagaagaggtccgtcgacgaggacgaggagtacgtcccgtccgatagcggcggtgaggagaaggacgagagctcgtcggagagcgcgcaagacgaagaggtggatggagaggggaaatcagcttctatgtcacgcgccaagggaaagaaaaggaaattgtcaaaatctggtaaatctacaaagaacacgcctactaagggtagtgcttcttttgctgaggtggtggatgatgatacatccttacagcaggctattgctctctccctggcggaatattcagaaaagcctgtgacttcattgggtgcagaaacatcaagcacagtaacaagagcgagtgaaagtactccccagaagaacagcaaagcatccattcaggactcagctaagaacaagaagattaaaaagctgggtaagagcaggattcagctgtcagaagatgatgtggttcaattcttcttctcatttgacgataaacctcgaggatttccgcagcattatatctcaatgcaacatgttgcaggagcatgagaagtgaggatgacgagtgttgctggtctgcagatgcttgtactctagttttgcatggcctaacctgtgacattgcatcaacattgttggaatagtagcggacataaagccattgcacataacctttgtagttgcagcttgtcaagtccagttgaccggggattttatgattctactaacttgtttgagagaaggggatt

SEQ ID NO: 14805 - DNA, 922 bp, Zea Mays
gagtgaacctttttccttttctttttgattttacaaggcacgaataggaagagaagcgtgggaggaggatttttttgccgcagcgtccccatggcggcgggaagagaaaccgacgaacagctgaccgagtacgagaagcagcggctgtcgcggatacgcgagaacgaggcccgactcgaggccctgggcctccgcagcctcgcagcgtcccctcttctccgcaactcgtcgccggggacggccaaggggaagcagaagaagaggtccgtcgacgaggacgaggagtacgtcccgtccgatagcggcggtgaggagaaggacgagagctcgtcggagagcgcgcaagacgaagaggtggatggagaggggaaatcagcttctatgtcacgcgccaagggaaagaaaaggaaattgtcaaaatctggtaaatctacaaagaacacgcctactaagggtagtgcttcttttgctgaggtggtggatgatgatacatccttacagcaggctattgctctctccctggcggaatattcagaaaagcctgtgacttcattgggtgcagaaacatcaagcacagtaacaagagcgagtgaaagtactccccagaagaacagcaaagcatccattcaggactcagctaagaacaagaagattaaaaagctgataaacctcgaggatttccgcagcattatatctcaatgcaacatgttgcaggagcatgagaagtgaggatgacgagtgttgctggtctgcagatgcttgtactctagttttgcatggcctaacctgtgacattgcatcaacattgttggaatagtagcggacataaagccattgcacataacctttgtagttgcagcttgtcaagtccagttgaccggggattttatgattctactaacttgtttgagagaaggggatt

SEQ ID NO: 14806 - DNA, 859 bp, Zea Mays
cacttgtactctcttctctcctagctctggtctccctctcggcctctactctctcctagctctggtctccctcacctatcttcttctggtgctccggtctctcctagctctggtgctccggattcaaatccgtggaggaaccggttggccggaccggttcatcccctcctctctcctagctctggtgctccggcttactccgttgaggaaaccgggactccgagcccgaggtgggtcgatggccgtctccgacgatgaaactgttgagatcgactgcaacgaggagcgacgggttgtgtgggttggccggagacgacgatgaggatgacctccgggaggatgctgcaattatgggggtcaattagtgaggatcagcacaaactcacttatccagtactgtcaattatggctaaagatattttaactgttcctgtgtctaccatctcttcagaatccacttttagtttaactggcaggatcatcgacgagcggaggaggagattgaagtctgatgtggttgagatgttgacatgcattaaagattgggaggatgctgaagcaaggatgcaacacatggtggatgacaaagagcttgaagaaacatttgaagatctttatcttgattagtcttactctctttctgaccatttctgtaatgggactgtaatattatgcacctggacactggactggactgtaaacatttgaaaaacattttaatgagctgggctgtactcttttttcctgtctagggtttctcacaagggtgagttttacctagacaggtttttaacgaggcagccattgcactacagctcataaaattgttgtttgattagtctcttactctctttgtgaa

SEQ ID NO: 14807 - DNA, 240 bp, Zea Mays
cggagctgcaacatttttccactgatgaagctacagtgcgcaaatccacggatcctacgcagccacccaaacaacagcaggacgcggccgtgctcaagccgcaggacgcaggacacaaaaaggtcgttcaactgtgcagccgtagatttcctgcagcccaatcgtagatttcctgtgctgccttgcaagtgcagacgtagatttctttacaggtgaattccttttttttttaagaatttg

SEQ ID NO: 14808 - DNA, 1856 bp, Zea Mays
cgattgtgtggcttccaatcagagcgttctcccgctacctccgagcctctcggccctcaggctctgaccttaaatgggatctgccgcactcctgctctctatctctctctctgcaacgactgggttaccgacgcagccgccctcagccaggtgcgcgcgtcttctttgggcccttcgctggtgacgagcgcccactaggttggctgtgtgctgatgctatttgtgtttaagtacttccacctggtgttaatcttttgggagtggaatctctgagacctctgaggtgtgcctttctggcatcaagtttaactgcaacgatcagagggtttctggtgcctgctcattctgaatggcagaccttacggacatcggttgctgcagttgctttagctttttaaggaagcccagtgtacctgtacgtcaacatcaggatgctgatggcatgttatctgaagatttactgaagcgtcaatcagctgaagatcctgatggaagtttctacactggggatgatcctgatagatgatactgattatattgagggaagcgatgatggaccaccaaggaagagttctgaagatattgtacagttaagaactcaaaatggctttgcatgtagagaaatctcagttaaagagactaaaaaagtatttcgctcagaggatgaaaatggtaataagatggtcaatcaatatgtccacttgggaaagattggttctggaagctacggaaaagtggttctgtacagaaacattaaagatgggaagttgtatgccatcaaggttctgaataagccttacatgatgaaagtacgtgttgtacgcacagaaactgccatgacagatgttcttcgggaggtgtccataatgaaaatgctgaatcaccctaacattgtcaatcttgttgaagtgattgatgacccaaacatagataaattctacatggttcttgactatgttgaaggaaaaatggtttgcgataatggtttagaagaaggtactgcaagaaattatttgcgagacataatatctggtcttatgtatcttcactctcataatgttattcatggtgatatcaaaccagacaatctcttggttaccagtgccggcaatgtgaagattggggatttcagtgttagccaggtttttgaggatgatgatgatatgctttggagatctcctggcactcctgttttcactgccccggagtgctgtcaaggttcagcctaccatggtcgggcctctgatacatgggcagttggtgtaactttatattgtatggtttctgggcattatccatttcttggggatacattgcaggaaacttatgataagattgccaatgatcctgtgcaaatacctggagacatgaacccccaacttgctgatttgctcctaaggcttctctgcaaagatccaggggatcgcatcacgctgcaggctgcggctgagcatccttgggttgctggtgatgaggggccagtccctgaattcatctgtagatgtgggtttggccgcaggaagaggaatgatgtccgcgaagaagtacaataacaaagcatcctcggatagtccacaggtctagtgtagataattgataaaggttggcaaaacgtagccctgacgatgagtttgttttttgtttgtttgtttgtttgtttgtttgttgtttcgtgttcctaatttccaacgagtgttgggcgctcgactgaacatgtttcttttagtaagagaatctcgagtgtaaccctaatgacagtaaaacccaccgtctgcccccaattttttgttgccctgtataggacatacatacggtcagaaaccaccaaggtgccgtaaacctgcactgccattcag

SEQ ID NO: 14809 - DNA, 1730 bp, Zea Mays
cgattgtgtggcttccaatcagagcgttctcccgctacctccgagcctctcggccctcaggctctgaccttaaatgggatctgccgcactcctgctctctatctctctctctgcaacgactgggttaccgacgcagccgccctcagccaggtgcgcgcgtcttctttgggcccttcgctggtgacgagcgcccactagggtttctggtgcctgctcattctgaatggcagaccttacggacatcggttgctgcagttgctttagctttttaaggaagcccagtgtacctgtacgtcaacatcaggatgctgatggcatgttatctgaagatttactgaagcgtcaatcagctgaagatcctgatggaagtttctacactggggatgatcctgatagatgatactgattatattgagggaagcgatgatggaccaccaaggaagagttctgaagatattgtacagttaagaactcaaaatggctttgcatgtagagaaatctcagttaaagagactaaaaaagtatttcgctcagaggatgaaaatggtaataagatggtcaatcaatatgtccacttgggaaagattggttctggaagctacggaaaagtggttctgtacagaaacattaaagatgggaagttgtatgccatcaaggttctgaataagccttacatgatgaaagtacgtgttgtacgcacagaaactgccatgacagatgttcttcgggaggtgtccataatgaaaatgctgaatcaccctaacattgtcaatcttgttgaagtgattgatgacccaaacatagataaattctacatggttcttgactatgttgaaggaaaaatggtttgcgataatggtttagaagaaggtactgcaagaaattatttgcgagacataatatctggtcttatgtatcttcactctcataatgttattcatggtgatatcaaaccagacaatctcttggttaccagtgccggcaatgtgaagattggggatttcagtgttagccaggtttttgaggatgatgatgatatgctttggagatctcctggcactcctgttttcactgccccggagtgctgtcaaggttcagcctaccatggtcgggcctctgatacatgggcagttggtgtaactttatattgtatggtttctgggcattatccatttcttggggatacattgcaggaaacttatgataagattgccaatgatcctgtgcaaatacctggagacatgaacccccaacttgctgatttgctcctaaggcttctctgcaaagatccaggggatcgcatcacgctgcaggctgcggctgagcatccttgggttgctggtgatgaggggccagtccctgaattcatctgtagatgtgggtttggccgcaggaagaggaatgatgtccgcgaagaagtacaataacaaagcatcctcggatagtccacaggtctagtgtagataattgataaaggttggcaaaacgtagccctgacgatgagtttgttttttgtttgtttgtttgtttgtttgtttgttgtttcgtgttcctaatttccaacgagtgttgggcgctcgactgaacatgtttcttttagtaagagaatctcgagtgtaaccctaatgacagtaaaacccaccgtctgcccccaattttttgttgccctgtataggacatacatacggtcagaaaccaccaaggtgccgtaaacctgcactgccattcag

SEQ ID NO: 14810 - DNA, 1841 bp, Zea Mays
cgattgtgtggcttccaatcagagcgttctcccgctacctccgagcctctcggccctcaggctctgaccttaaatgggatctgccgcactcctgctctctatctctctctctgcaacgactgggttaccgacgcagccgccctcagccaggtgcgcgcgtcttctttgggcccttcgctggtgacgagcgcccactaggatcgaggcgtggtgatggtcgttgggtacttccatttggtgctaatctgtgtgggaggtggaattcatggacgttgttaccgggcccaagtttaatcctagcaatttcagggtttctggtgcctgctcattctgaatggcagaccttacggacatcggttgctgcagttgctttagctttttaaggaagcccagtgtacctgtacgtcaacatcaggatgctgatggcatgttatctgaagatttactgaagcgtcaatcagctgaagatcctgatggaagtttctacactggggatgatcctgatagatgatactgattatattgagggaagcgatgatggaccaccaaggaagagttctgaagatattgtacagttaagaactcaaaatggctttgcatgtagagaaatctcagttaaagagactaaaaaagtatttcgctcagaggatgaaaatggtaataagatggtcaatcaatatgtccacttgggaaagattggttctggaagctacggaaaagtggttctgtacagaaacattaaagatgggaagttgtatgccatcaaggttctgaataagccttacatgatgaaagtacgtgttgtacgcacagaaactgccatgacagatgttcttcgggaggtgtccataatgaaaatgctgaatcaccctaacattgtcaatcttgttgaagtgattgatgacccaaacatagataaattctacatggttcttgactatgttgaaggaaaaatggtttgcgataatggtttagaagaaggtactgcaagaaattatttgcgagacataatatctggtcttatgtatcttcactctcataatgttattcatggtgatatcaaaccagacaatctcttggttaccagtgccggcaatgtgaagattggggatttcagtgttagccaggtttttgaggatgatgatgatatgctttggagatctcctggcactcctgttttcactgccccggagtgctgtcaaggttcagcctaccatggtcgggcctctgatacatgggcagttggtgtaactttatattgtatggtttctgggcattatccatttcttggggatacattgcaggaaacttatgataagattgccaatgatcctgtgcaaatacctggagacatgaacccccaacttgctgatttgctcctaaggcttctctgcaaagatccaggggatcgcatcacgctgcaggctgcggctgagcatccttgggttgctggtgatgaggggccagtccctgaattcatctgtagatgtgggtttggccgcaggaagaggaatgatgtccgcgaagaagtacaataacaaagcatcctcggatagtccacaggtctagtgtagataattgataaaggttggcaaaacgtagccctgacgatgagtttgttttttgtttgtttgtttgtttgtttgtttgttgtttcgtgttcctaatttccaacgagtgttgggcgctcgactgaacatgtttcttttagtaagagaatctcgagtgtaaccctaatgacagtaaaacccaccgtctgcccccaattttttgttgccctgtataggacatacatacggtcagaaaccaccaaggtgccgtaaacctgcactgccattcag

SEQ ID NO: 14811 - DNA, 2196 bp, Zea Mays
atcgccgtgggggtgaaaataaagtaagggggggcgaacgcgccaaagtggcgaggaacggcgcgcgacgaagggtgtgaatatcggagaaggcggagggggcgagggtgaaacggcacggcgcgtcacttgtttcaggcagcagcccacggagtccggcagccatccaatgctccaccaaacaacgctcatccctccctccgtctccgccgcctcctcctcgcctttcctccacgccgccaccacagccccggctccgggtggaggttcctgcaccccagccttcctgcgaggcgcctctgccatgccgtcgtacgcgcaccaccgtagcagccctctggtaagaaagactgccggcccgggttgccgatagatgattgagggggacgggaagagattctttggatggttttgtttggcttcctttatttttttttcttcctgagagataaacacacacacacacaaagcagagacggacggaccgccctggttgccttctgcttctggtattggggatttgtgattttgacacacggcgtgtatgcgtgtttttccggccggccggtgaaggacgatggcaggatggacgcgctgaagtgtaacaacagcgtcctgccggaggagaccaccgcggacgccgccggggcgttcgtggagaaagacgggttctcggtcgaggacctgcttgacctggaggagttcgccgagcctgacaaggacgtcgccgaacgcgaggatgacgacgcgccaccggcagccgccgcggccgcggagaggtcgaaagcggactcgcagccgtcgtcggtcgtgaagtacgacctccctccgctgctgccgccgccgccggagatggttgacctgccgtcgcacgacgtcgaggagctggagtgggtctcccgtatcatggacgactcgctctccgagctgcagccccaggcgcagccgaagccggccgctgctgtggtcgcgtcgtcggcagcgcggccccctctggcgcagcagcggcgtccgttcgcgcacgacggtacataccgggcggtggcggcggcgccgccgcaggccggcccgcagcggacgccgaccatatgcgcgctgtcaacggaggcgatgataccggtgaaggcgaagcccagcgaccggcgctgcagccactgtggcgtgcagaagaccccgcagtggcgtgcgggccccgagggcgccaagacgctgtgcaacgcgtgcggcgtccgctacaagtcgggccggctcctccccgagtaccgcccggcgtgcagccccacgttcgtgagcagcatccactccaactcccaccgcaaggtcctcgagatgcgccgcaagaaggagggcggcatggttgccaccgccgcgccggccgtggcgtcgttctaagcttgtgcccaccctgtcagcgaaggagccgcaaggagggcggcatggaggctggccacgcagcggtggctgtacattttttttccccggacgtaatagccttgtaccgtacctgaactaccctccctttctcttgctagtatcgtcgtcgtaatcccccggctgggttattaattagagtttaggagtctcgattaggtcaggtcaggtcaggtttagctttggttccggttagggttctactgcggcggcagaagcggcccagcaactagcgcagaactttaattcctagcaagcatttataaagtcagtttttatttcatcttcctttctccgagctaggtgtaggagtggctggtgctggtgctggtgttggaattgagaaggtagaaaatgtcgcccaaggaaggagagggcacattgcagttggacaggcgcatgttgcgtgcacccttggttacgtcacatgttgtgacccgtaacgacatgatgtggttacttactttaggagagcggaatggtgacagcccgccccagtttagagcatgtttgaatctcggcggttaaaaattagcattggatgctaagtcaggactagatgtaaactatacaagctaatgacaggctagttattatgattaatagtcactctgtgtgtgaggtaaaagatgtgggaacaccaacaactcgttggaagaaagctcctcccttggttttggttgtgcctgcgacaccaactgcagctttgtgtaaatggtctctctgactcttacctggcagaggcataggagaaatgaacatcat

SEQ ID NO: 14812 - DNA, 2349 bp, Zea Mays
gccaaagtggcgaggaacggcgcgcgacgaagggtgtgaatatcggagaaggcggagggggcgagggtgaaacggcacggcgcgtcacttgtttcaggcagcagcccacggagtccggcagccatccaatgctccaccaaacaacgctcatccctccctccgtctccgccgcctcctcctcgcctttcctccacgccgccaccacagccccggctccgggtggaggttcctgcaccccagccttcctgcgaggcgcctctgccatgccgtcgtacgcgcaccaccgtagcagccctctgagacggacggaccgccctggttgccttctgcttctggtattggggatttgtgattttgacacacggcgtgtatgcgtgtttttccggccggccggtgaaggacgatggcaggatggacgcgctgaagtgtaacaacagcgtcctgccggaggagaccaccgcggacgccgccggggcgttcgtggagaaagacgggttctcggtcgaggacctgcttgacctggaggagttcgccgagcctgacaaggacgtcgccgaacgcgaggatgacgacgcgccaccggcagccgccgcggccgcggagaggtcgaaagcggactcgcagccgtcgtcggtcgtgaagtacgacctccctccgctgctgccgccgccgccggagatggttgacctgccgtcgcacgacgtcgaggagctggagtgggtctcccgtatcatggacgactcgctctccgagctgcagccccaggcgcagccgaagccggccgctgctgtggtcgcgtcgtcggcagcgcggccccctctggcgcagcagcggcgtccgttcgcgcacgacggtacataccgggcggtggcggcggcgccgccgcaggccggcccgcagcggacgccgaccatatgcgcgctgtcaacggaggcgatgataccggtgaaggcgaagcgcagcaagcggtcgcggggcccggggtggtcgaggccgggcgcctcgttcctgcccgactcggcctcgtcctcgtcgaccacaaccacttcctcgtgctcctcgtcaggttccatctcgccgttcctccgtctagactcgtccccgttcggcggcgggctggagctcggcgagggccttttcagctacggccacctcctgccgcggccgccgtcgaagaagtccaagcacggtggcaagggcagcaagcacaggcccaagaagcgcgggcggaagccgaagcacctcccccctccccacccgtccgcggccgcgtcgcagcccgggcccagcgaccggcgctgcagccactgtggcgtgcagaagaccccgcagtggcgtgcgggccccgagggcgccaagacgctgtgcaacgcgtgcggcgtccgctacaagtcgggccggctcctccccgagtaccgcccggcgtgcagccccacgttcgtgagcagcatccactccaactcccaccgcaaggtcctcgagatgcgccgcaagaaggagggcggcatggttgccaccgccgcgccggccgtggcgtcgttctaagcttgtgcccaccctgtcagcgaaggagccgcaaggagggcggcatggaggctggccacgcagcggtggctgtacattttttttccccggacgtaatagccttgtaccgtacctgaactaccctccctttctcttgctagtatcgtcgtcgtaatcccccggctgggttattaattagagtttaggagtctcgattaggtcaggtcaggtcaggtttagctttggttccggttagggttctactgcggcggcagaagcggcccagcaactagcgcagaactttaattcctagcaagcatttataaagtcagtttttatttcatcttcctttctccgagctaggtgtaggagtggctggtgctggtgctggtgttggaattgagaaggtagaaaatgtcgcccaaggaaggagagggcacattgcagttggacaggcgcatgttgcgtgcacccttggttacgtcacatgttgtgacccgtaacgacatgatgtggttacttactttaggagagcggaatggtgacagcccgccccagtttagagcatgtttgaatctcggcggttaaaaattagcattggatgctaagtcaggactagatgtaaactatacaagctaatgacaggctagttattatgattaatagtcactctgtgtgtgaggtaaaagatgtgggaacaccaacaactcgttggaagaaagctcctcccttggttttggttgtgcctgcgacaccaactgcagctttgtgtaaatggtctctctgactcttacctggcagaggcataggagaaatgaacatcat

SEQ ID NO: 14813 - DNA, 3168 bp, Zea Mays
aaaaggagaagaaagcaaaacggacgggcgccgccaccacaccacccctcccaacccaccttctgcctggctgccttctgcctccccttcggctccggtccttcctctcaagtcccacacccgtgtcccaccgcaccggccctcaagcagggcagggcagggcagctacctccaagtctccaaccccccaaccccaacagacgggacgccgcctcgtgtccggcacgccgttccctcccgtccccgctccttcccctcgctaaaacccatcgaatcgaccgacgcacgtcctgacactcctgctcccctgtcgccaccgcgtcgcgcgcgggcagaggcctctctcgccatctcgcggccgcggcaccccacagctatcctaccacccgacctcccaccaccgccgccgccgccggcctgctcccaaccacaagtccaggaggacgccccttcgatccgccgcagggaggcaggcgcccgcgcccccgccccccgccaggctccatctccggatccgatcgcccgccggctcggttcaatccgtttacttaattatactgaccttctcatatggcgttggatccgtgatgcctcctccattcctgaagctatttggaattcattgcctgaatcagtgttctgaagtgctatctaacagtcagaaatggatggatccgagcttgaaaatcctacttctagaagctcatcccagaaatctagccgacgttcgagtagtaggcgttctcaaaagtcagctggacagcattctttgaccggtgctcaagagaaaagaagcaaatcgaaatcttcaaggcagaaacacttggttattgacgacaaagaggctaaaaaagggaaaaaacatgaccacaaaattgacgtggcagatgagaggtccaattttctaggttatgaagtgtatgctggaaagctgattcttcaaaagaaaaatagaagtgcgagtgataataatcagttaccgtcaaacggaaaagctgatgcaattgatgctagactcacaagtaaagctctgatctggggcagctctgtactcctactggaggatgttgtctctgtatcatataattctggagtcaaacattttacattgcatgcatactcaactaaaaagtctttatttaaaaagacatgcagagttcagaaagatttctgctttatagcctctacccttgacgaggccattttgtgggtgacatgctttgctgaacaaagtatatatgttaacttactacctcgccttggagcatctagtatcaatcaagactcagaaaatcccctcagtgagtctttatttgaccagccaccgattaaatgcaaatctccgcaaagagtacttgttatattgaaccctcgatctggacatggtagatcaagtaaagttttccatgagaaagctgaacctatatttaagcttgcaggttttcagatggaagttgttaaaactactcatgctgggcatgcaaaatctcttgtatctacatttgatttcagtgcatgccctgatggaatcgtgtgcgtgggtggtgatggaattgtgaatgaggtgctcaatggtcttctcattaggagtgatagagcagaagctgtatcaattccagttggaataattcctgcagggtctgacaactcacttgtctggactgttttgggagttagagatcctatttctgcatcattattaattgttaagggtggtttcacagctctagatatcttggctgtcgagtgggttcaatctgggcaaatacattttggctcaactgtttcatactatggttttgttagtgatgtcctggaactttctgagaaatatcagaagaaatttggtccacttcgatattttgtggctggaatactgaaatttttatgtttgcctagctacttctatgaactggaatatcttccttcgccaaaggagatggccgtgaatggaaaaggtacagatcaagacaaggcccacctgtccaatgtctataccgatgtgatgcacagcagatcaaagaaagaaggaattccaagagcctccagtttgtccagtattgattctattatgactccaagtcggatgtcgcttggggatgttgatacatcaggtagtacagtggcaagcactgaaccatcagactatgtacgtggtctcgatccgaaagcaaaacgcttgtctctgggaagaagtaacattgtttcagaacctgaagaagtgctacaccctcaaccacatcatggatcattctggccaagaaccaggtccaaagcaagggctgatagaaattcagttggtataacgtctactaatgacacacggtcgtcttgggcagccccatcaatgcatgataaggaagacatttcctcaacaatatcagacccaggacctatttgggactgtgaaccaaagtgggacacagggccaaaatgggatagtgagctaacttgggagcctgaccaccccattgaacttcctggaccacaagaggacatgggaattggagcaccgatggaacttgtgccaaatttggatgagaaatgggtagttaggaaagggcactttcttggtgtcctagtatgcaaccattcatgcatgacagtgcaaagtctgagttcacaggttgttgcaccgaaggccatccatgatgacaacagcttggacttacttttagttggtggaaaaggaagatggaaattgctgagatttttcatacttctgcaattcggtcgccatctctctttgccttacgtcgaatatgtaaaggtgaagtcagttaagcttaaacctggtgcaaacactcacaatggctgtggcatagatggcgagctttgccgtgtcaagggacaggtactctgctccctgcttccggagcaatgcagactgattggccggcgatgtagacaatctatttaagcgctgtgttgaatttcatggatcctggggttctttccacttctaacaaatgtttatataactatactttctgatgggattaagcttgggttggtgttgcaaatgttgagagtttgaaccagaagcaatgttgtgaggtttctgtatatttgagcggttataggatgatatgctgattctgtttaattatgttgattttgcttatatatattcaatagagtaatttagtcccacttcggcgtggcggg

SEQ ID NO: 14814 - DNA, 3010 bp, Zea Mays
gcgccgccaccacaccacccctcccaacccaccttctgcctggctgccttctgcctccccttcggctccggtccttcctctcaagtcccacacccgtgtcccaccgcaccggccctcaagcagggcagggcagggcagctacctccaagtctccaaccccccaaccccaacagacgggacgccgcctcgtgtccggcacgccgttccctcccgtccccgctccttcccctcgctaaaacccatcgaatcgaccgacgcacgtcctgacactcctgctcccctgtcgccaccgcgtcgcgcgcgggcagaggcctctctcgccatctcgcggccgcggcaccccacagctatcctaccacccgacctcccaccaccgccgccgccgccggcctgctcccaaccacaagtccaggaggacgccccttcgatccgccgcagggaggcaggcgcccgcgcccccgccccccgccaggctccatctccggatccgatcgcccgccggctcggttcaatccgtttacttaattatactgaccttctcatatggcgttggatccgtgatgcctcctccattcctgaagctatttggaattcattgcctgaatcagtgttctgaagtgctatctaacagtcagaaatggatggatccgagcttgaaaatcctacttctagaagctcatcccagaaatctagccgacgttcgagtagtaggcgttctcaaaagtcagctggacagcattctttgaccggtgctcaagagaaaagaagcaaatcgaaatcttcaaggcagaaacacttggttattgacgacaaagaggctaaaaaagggaaaaaacatgaccacaaaattgacgtggcagatgagaggtccaattttctaggttatgaagtgtatgctggaaagctgattcttcaaaagaaaaatagaagtgcgagtgataataatcagttaccgtcaaacggaaaagctgatgcaattgatgctagactcacaagtaaagctctgatctggggcagctctgtactcctactggaggatgttgtctctgtatcatataattctggagtcaaacattttacattgcatgcatactcaactaaaaagtctttatttaaaaagacatgcagagttcagaaagatttctgctttatagcctctacccttgacgaggccattttgtgggtgacatgctttgctgaacaaagtatatatgttaacttactacctcgccttggagcatctagtatcaatcaagactcagaaaatcccctcacttgcaggttttcagatggaagttgttaaaactactcatgctgggcatgcaaaatctcttgtatctacatttgatttcagtgcatgccctgatggaatcgtgtgcgtgggtggtgatggaattgtgaatgaggtgctcaatggtcttctcattaggagtgatagagcagaagctgtatcaattccagttggaataattcctgcagggtctgacaactcacttgtctggactgttttgggagttagagatcctatttctgcatcattattaattgttaagggtggtttcacagctctagatatcttggctgtcgagtgggttcaatctgggcaaatacattttggctcaactgtttcatactatggttttgttagtgatgtcctggaactttctgagaaatatcagaagaaatttggtccacttcgatattttgtggctggaatactgaaatttttatgtttgcctagctacttctatgaactggaatatcttccttcgccaaaggagatggccgtgaatggaaaaggtacagatcaagacaaggcccacctgtccaatgtctataccgatgtgatgcacagcagatcaaagaaagaaggaattccaagagcctccagtttgtccagtattgattctattatgactccaagtcggatgtcgcttggggatgttgatacatcaggtagtacagtggcaagcactgaaccatcagactatgtacgtggtctcgatccgaaagcaaaacgcttgtctctgggaagaagtaacattgtttcagaacctgaagaagtgctacaccctcaaccacatcatggatcattctggccaagaaccaggtccaaagcaagggctgatagaaattcagttggtataacgtctactaatgacacacggtcgtcttgggcagccccatcaatgcatgataaggaagacatttcctcaacaatatcagacccaggacctatttgggactgtgaaccaaagtgggacacagggccaaaatgggatagtgagctaacttgggagcctgaccaccccattgaacttcctggaccacaagaggacatgggaattggagcaccgatggaacttgtgccaaatttggatgagaaatgggtagttaggaaagggcactttcttggtgtcctagtatgcaaccattcatgcatgacagtgcaaagtctgagttcacaggttgttgcaccgaaggccatccatgatgacaacagcttggacttacttttagttggtggaaaaggaagatggaaattgctgagatttttcatacttctgcaattcggtcgccatctctctttgccttacgtcgaatatgtaaaggtgaagtcagttaagcttaaacctggtgcaaacactcacaatggctgtggcatagatggcgagctttgccgtgtcaagggacaggtactctgctccctgcttccggagcaatgcagactgattggccggcgatgtagacaatctatttaagcgctgtgttgaatttcatggatcctggggttctttccacttctaacaaatgtttatataactatactttctgatgggattaagcttgggttggtgttgcaaatgttgagagtttgaaccagaagcaatgttgtgaggtttctgtatatttgagcggttataggatgatatgctgattctgtttaattatgttgattttgcttatatatattcaatagagtaatttagtcccacttcggcgtggcggg

SEQ ID NO: 14815 - DNA, 3029 bp, Zea Mays
ctcccaacccaccttctgcctggctgccttctgcctccccttcggctccggtccttcctctcaagtcccacacccgtgtcccaccgcaccggccctcaagcagggcagggcagggcagctacctccaagtctccaaccccccaaccccaacagacgggacgccgcctcgtgtccggcacgccgttccctcccgtccccgctccttcccctcgctaaaacccatcgaatcgaccgacgcacgtcctgacactcctgctcccctgtcgccaccgcgtcgcgcgcgggcagaggcctctctcgccatctcgcggccgcggcaccccacagctatcctaccacccgacctcccaccaccgccgccgccgccggcctgctcccaaccacaagtccaggaggacgccccttcgatccgccgcagggaggcaggcgcccgcgcccccgccccccgccaggctccatctccggatccgatcgcccgccggctcggttcaatccgtgttctgaagtgctatctaacagtcagaaatggatggatccgagcttgaaaatcctacttctagaagctcatcccagaaatctagccgacgttcgagtagtaggcgttctcaaaagtcagctggacagcattctttgaccggtgctcaagagaaaagaagcaaatcgaaatcttcaaggcagaaacacttggttattgacgacaaagaggctaaaaaagggaaaaaacatgaccacaaaattgacgtggcagatgagaggtccaattttctaggttatgaagtgtatgctggaaagctgattcttcaaaagaaaaatagaagtgcgagtgataataatcagttaccgtcaaacggaaaagctgatgcaattgatgctagactcacaagtaaagctctgatctggggcagctctgtactcctactggaggatgttgtctctgtatcatataattctggagtcaaacattttacattgcatgcatactcaactaaaaagtctttatttaaaaagacatgcagagttcagaaagatttctgctttatagcctctacccttgacgaggccattttgtgggtgacatgctttgctgaacaaagtatatatgttaacttactacctcgccttggagcatctagtatcaatcaagactcagaaaatcccctcagtgagtctttatttgaccagccaccgattaaatgcaaatctccgcaaagagtacttgttatattgaaccctcgatctggacatggtagatcaagtaaagttttccatgagaaagctgaacctatatttaagcttgcaggttttcagatggaagttgttaaaactactcatgctgggcatgcaaaatctcttgtatctacatttgatttcagtgcatgccctgatggaatcgtgtgcgtgggtggtgatggaattgtgaatgaggtgctcaatggtcttctcattaggagtgatagagcagaagctgtatcaattccagttggaataattcctgcagggtctgacaactcacttgtctggactgttttgggagttagagatcctatttctgcatcattattaattgttaagggtggtttcacagctctagatatcttggctgtcgagtgggttcaatctgggcaaatacattttggctcaactgtttcatactatggttttgttagtgatgtcctggaactttctgagaaatatcagaagaaatttggtccacttcgatattttgtggctggaatactgaaatttttatgtttgcctagctacttctatgaactggaatatcttccttcgccaaaggagatggccgtgaatggaaaaggtacagatcaagacaaggcccacctgtccaatgtctataccgatgtgatgcacagcagatcaaagaaagaaggaattccaagagcctccagtttgtccagtattgattctattatgactccaagtcggatgtcgcttggggatgttgatacatcaggtagtacagtggcaagcactgaaccatcagactatgtacgtggtctcgatccgaaagcaaaacgcttgtctctgggaagaagtaacattgtttcagaacctgaagaagtgctacaccctcaaccacatcatggatcattctggccaagaaccaggtccaaagcaagggctgatagaaattcagttggtataacgtctactaatgacacacggtcgtcttgggcagccccatcaatgcatgataaggaagacatttcctcaacaatatcagacccaggacctatttgggactgtgaaccaaagtgggacacagggccaaaatgggatagtgagctaacttgggagcctgaccaccccattgaacttcctggaccacaagaggacatgggaattggagcaccgatggaacttgtgccaaatttggatgagaaatgggtagttaggaaagggcactttcttggtgtcctagtatgcaaccattcatgcatgacagtgcaaagtctgagttcacaggttgttgcaccgaaggccatccatgatgacaacagcttggacttacttttagttggtggaaaaggaagatggaaattgctgagatttttcatacttctgcaattcggtcgccatctctctttgccttacgtcgaatatgtaaaggtgaagtcagttaagcttaaacctggtgcaaacactcacaatggctgtggcatagatggcgagctttgccgtgtcaagggacaggtactctgctccctgcttccggagcaatgcagactgattggccggcgatgtagacaatctatttaagcgctgtgttgaatttcatggatcctggggttctttccacttctaacaaatgtttatataactatactttctgatgggattaagcttgggttggtgttgcaaatgttgagagtttgaaccagaagcaatgttgtgaggtttctgtatatttgagcggttataggatgatatgctgattctgtttaattatgttgattttgcttatatatattcaatagagtaatttagtcccacttcggcgtggcggg

SEQ ID NO: 14816 - DNA, 3056 bp, Zea Mays
ctcccaacccaccttctgcctggctgccttctgcctccccttcggctccggtccttcctctcaagtcccacacccgtgtcccaccgcaccggccctcaagcagggcagggcagggcagctacctccaagtctccaaccccccaaccccaacagacgggacgccgcctcgtgtccggcacgccgttccctcccgtccccgctccttcccctcgctaaaacccatcgaatcgaccgacgcacgtcctgacactcctgctcccctgtcgccaccgcgtcgcgcgcgggcagaggcctctctcgccatctcgcggccgcggcaccccacagctatcctaccacccgacctcccaccaccgccgccgccgccggcctgctcccaaccacaagtccaggaggacgccccttcgatccgccgcagggaggcaggcgcccgcgcccccgccccccgccaggctccatctccggatccgatcgcccgccggctcggttcaatccgctatttggaattcattgcctgaatcagtgttctgaagtgctatctaacagtcagaaatggatggatccgagcttgaaaatcctacttctagaagctcatcccagaaatctagccgacgttcgagtagtaggcgttctcaaaagtcagctggacagcattctttgaccggtgctcaagagaaaagaagcaaatcgaaatcttcaaggcagaaacacttggttattgacgacaaagaggctaaaaaagggaaaaaacatgaccacaaaattgacgtggcagatgagaggtccaattttctaggttatgaagtgtatgctggaaagctgattcttcaaaagaaaaatagaagtgcgagtgataataatcagttaccgtcaaacggaaaagctgatgcaattgatgctagactcacaagtaaagctctgatctggggcagctctgtactcctactggaggatgttgtctctgtatcatataattctggagtcaaacattttacattgcatgcatactcaactaaaaagtctttatttaaaaagacatgcagagttcagaaagatttctgctttatagcctctacccttgacgaggccattttgtgggtgacatgctttgctgaacaaagtatatatgttaacttactacctcgccttggagcatctagtatcaatcaagactcagaaaatcccctcagtgagtctttatttgaccagccaccgattaaatgcaaatctccgcaaagagtacttgttatattgaaccctcgatctggacatggtagatcaagtaaagttttccatgagaaagctgaacctatatttaagcttgcaggttttcagatggaagttgttaaaactactcatgctgggcatgcaaaatctcttgtatctacatttgatttcagtgcatgccctgatggaatcgtgtgcgtgggtggtgatggaattgtgaatgaggtgctcaatggtcttctcattaggagtgatagagcagaagctgtatcaattccagttggaataattcctgcagggtctgacaactcacttgtctggactgttttgggagttagagatcctatttctgcatcattattaattgttaagggtggtttcacagctctagatatcttggctgtcgagtgggttcaatctgggcaaatacattttggctcaactgtttcatactatggttttgttagtgatgtcctggaactttctgagaaatatcagaagaaatttggtccacttcgatattttgtggctggaatactgaaatttttatgtttgcctagctacttctatgaactggaatatcttccttcgccaaaggagatggccgtgaatggaaaaggtacagatcaagacaaggcccacctgtccaatgtctataccgatgtgatgcacagcagatcaaagaaagaaggaattccaagagcctccagtttgtccagtattgattctattatgactccaagtcggatgtcgcttggggatgttgatacatcaggtagtacagtggcaagcactgaaccatcagactatgtacgtggtctcgatccgaaagcaaaacgcttgtctctgggaagaagtaacattgtttcagaacctgaagaagtgctacaccctcaaccacatcatggatcattctggccaagaaccaggtccaaagcaagggctgatagaaattcagttggtataacgtctactaatgacacacggtcgtcttgggcagccccatcaatgcatgataaggaagacatttcctcaacaatatcagacccaggacctatttgggactgtgaaccaaagtgggacacagggccaaaatgggatagtgagctaacttgggagcctgaccaccccattgaacttcctggaccacaagaggacatgggaattggagcaccgatggaacttgtgccaaatttggatgagaaatgggtagttaggaaagggcactttcttggtgtcctagtatgcaaccattcatgcatgacagtgcaaagtctgagttcacaggttgttgcaccgaaggccatccatgatgacaacagcttggacttacttttagttggtggaaaaggaagatggaaattgctgagatttttcatacttctgcaattcggtcgccatctctctttgccttacgtcgaatatgtaaaggtgaagtcagttaagcttaaacctggtgcaaacactcacaatggctgtggcatagatggcgagctttgccgtgtcaagggacaggtactctgctccctgcttccggagcaatgcagactgattggccggcgatgtagacaatctatttaagcgctgtgttgaatttcatggatcctggggttctttccacttctaacaaatgtttatataactatactttctgatgggattaagcttgggttggtgttgcaaatgttgagagtttgaaccagaagcaatgttgtgaggtttctgtatatttgagcggttataggatgatatgctgattctgtttaattatgttgattttgcttatatatattcaatagagtaatttagtcccacttcggcgtggcggg

SEQ ID NO: 14817 - DNA, 2925 bp, Zea Mays
ctcccaacccaccttctgcctggctgccttctgcctccccttcggctccggtccttcctctcaagtcccacacccgtgtcccaccgcaccggccctcaagcagggcagggcagggcagctacctccaagtctccaaccccccaaccccaacagacgggacgccgcctcgtgtccggcacgccgttccctcccgtccccgctccttcccctcgctaaaacccatcgaatcgaccgacgcacgtcctgacactcctgctcccctgtcgccaccgcgtcgcgcgcgggcagaggcctctctcgccatctcgcggccgcggcaccccacagctatcctaccacccgacctcccaccaccgccgccgccgccggcctgctcccaaccacaagtccaggaggacgccccttcgatccgccgcagggaggcaggcgcccgcgcccccgccccccgccaggctccatctccggatccgatcgcccgccggctcggttcaatccgctatttggaattcattgcctgaatcagtgttctgaagtgctatctaacagtcagaaatggatggatccgagcttgaaaatcctacttctagaagctcatcccagaaatctagccgacgttcgagtagtaggcgttctcaaaagtcagctggacagcattctttgaccggtgctcaagagaaaagaagcaaatcgaaatcttcaaggcagaaacacttggttattgacgacaaagaggctaaaaaagggaaaaaacatgaccacaaaattgacgtggcagatgagaggtccaattttctaggttatgaagtgtatgctggaaagctgattcttcaaaagaaaaatagaagtgcgagtgataataatcagttaccgtcaaacggaaaagctgatgcaattgatgctagactcacaagtaaagctctgatctggggcagctctgtactcctactggaggatgttgtctctgtatcatataattctggagtcaaacattttacattgcatgcatactcaactaaaaagtctttatttaaaaagacatgcagagttcagaaagatttctgctttatagcctctacccttgacgaggccattttgtgggtgacatgctttgctgaacaaagtatatatgttaacttactacctcgccttggagcatctagtatcaatcaagactcagaaaatcccctcacttgcaggttttcagatggaagttgttaaaactactcatgctgggcatgcaaaatctcttgtatctacatttgatttcagtgcatgccctgatggaatcgtgtgcgtgggtggtgatggaattgtgaatgaggtgctcaatggtcttctcattaggagtgatagagcagaagctgtatcaattccagttggaataattcctgcagggtctgacaactcacttgtctggactgttttgggagttagagatcctatttctgcatcattattaattgttaagggtggtttcacagctctagatatcttggctgtcgagtgggttcaatctgggcaaatacattttggctcaactgtttcatactatggttttgttagtgatgtcctggaactttctgagaaatatcagaagaaatttggtccacttcgatattttgtggctggaatactgaaatttttatgtttgcctagctacttctatgaactggaatatcttccttcgccaaaggagatggccgtgaatggaaaaggtacagatcaagacaaggcccacctgtccaatgtctataccgatgtgatgcacagcagatcaaagaaagaaggaattccaagagcctccagtttgtccagtattgattctattatgactccaagtcggatgtcgcttggggatgttgatacatcaggtagtacagtggcaagcactgaaccatcagactatgtacgtggtctcgatccgaaagcaaaacgcttgtctctgggaagaagtaacattgtttcagaacctgaagaagtgctacaccctcaaccacatcatggatcattctggccaagaaccaggtccaaagcaagggctgatagaaattcagttggtataacgtctactaatgacacacggtcgtcttgggcagccccatcaatgcatgataaggaagacatttcctcaacaatatcagacccaggacctatttgggactgtgaaccaaagtgggacacagggccaaaatgggatagtgagctaacttgggagcctgaccaccccattgaacttcctggaccacaagaggacatgggaattggagcaccgatggaacttgtgccaaatttggatgagaaatgggtagttaggaaagggcactttcttggtgtcctagtatgcaaccattcatgcatgacagtgcaaagtctgagttcacaggttgttgcaccgaaggccatccatgatgacaacagcttggacttacttttagttggtggaaaaggaagatggaaattgctgagatttttcatacttctgcaattcggtcgccatctctctttgccttacgtcgaatatgtaaaggtgaagtcagttaagcttaaacctggtgcaaacactcacaatggctgtggcatagatggcgagctttgccgtgtcaagggacaggtactctgctccctgcttccggagcaatgcagactgattggccggcgatgtagacaatctatttaagcgctgtgttgaatttcatggatcctggggttctttccacttctaacaaatgtttatataactatactttctgatgggattaagcttgggttggtgttgcaaatgttgagagtttgaaccagaagcaatgttgtgaggtttctgtatatttgagcggttataggatgatatgctgattctgtttaattatgttgattttgcttatatatattcaatagagtaatttagtcccacttcggcgtggcggg

SEQ ID NO: 14818 - DNA, 2691 bp, Zea Mays
ctcaggtctattggtgctcatcatctggtcttgttagtgcgcatacccacatgtgttggacaaaagtttacttaattatactgaccttctcatatggcgttggatccgtgatgcctcctccattcctgaagctatttggaattcattgcctgaatcagtgttctgaagtgctatctaacagtcagaaatggatggatccgagcttgaaaatcctacttctagaagctcatcccagaaatctagccgacgttcgagtagtaggcgttctcaaaagtcagctggacagcattctttgaccggtgctcaagagaaaagaagcaaatcgaaatcttcaaggcagaaacacttggttattgacgacaaagaggctaaaaaagggaaaaaacatgaccacaaaattgacgtggcagatgagaggtccaattttctaggttatgaagtgtatgctggaaagctgattcttcaaaagaaaaatagaagtgcgagtgataataatcagttaccgtcaaacggaaaagctgatgcaattgatgctagactcacaagtaaagctctgatctggggcagctctgtactcctactggaggatgttgtctctgtatcatataattctggagtcaaacattttacattgcatgcatactcaactaaaaagtctttatttaaaaagacatgcagagttcagaaagatttctgctttatagcctctacccttgacgaggccattttgtgggtgacatgctttgctgaacaaagtatatatgttaacttactacctcgccttggagcatctagtatcaatcaagactcagaaaatcccctcagtgagtctttatttgaccagccaccgattaaatgcaaatctccgcaaagagtacttgttatattgaaccctcgatctggacatggtagatcaagtaaagttttccatgagaaagctgaacctatatttaagcttgcaggttttcagatggaagttgttaaaactactcatgctgggcatgcaaaatctcttgtatctacatttgatttcagtgcatgccctgatggaatcgtgtgcgtgggtggtgatggaattgtgaatgaggtgctcaatggtcttctcattaggagtgatagagcagaagctgtatcaattccagttggaataattcctgcagggtctgacaactcacttgtctggactgttttgggagttagagatcctatttctgcatcattattaattgttaagggtggtttcacagctctagatatcttggctgtcgagtgggttcaatctgggcaaatacattttggctcaactgtttcatactatggttttgttagtgatgtcctggaactttctgagaaatatcagaagaaatttggtccacttcgatattttgtggctggaatactgaaatttttatgtttgcctagctacttctatgaactggaatatcttccttcgccaaaggagatggccgtgaatggaaaaggtacagatcaagacaaggcccacctgtccaatgtctataccgatgtgatgcacagcagatcaaagaaagaaggaattccaagagcctccagtttgtccagtattgattctattatgactccaagtcggatgtcgcttggggatgttgatacatcaggtagtacagtggcaagcactgaaccatcagactatgtacgtggtctcgatccgaaagcaaaacgcttgtctctgggaagaagtaacattgtttcagaacctgaagaagtgctacaccctcaaccacatcatggatcattctggccaagaaccaggtccaaagcaagggctgatagaaattcagttggtataacgtctactaatgacacacggtcgtcttgggcagccccatcaatgcatgataaggaagacatttcctcaacaatatcagacccaggacctatttgggactgtgaaccaaagtgggacacagggccaaaatgggatagtgagctaacttgggagcctgaccaccccattgaacttcctggaccacaagaggacatgggaattggagcaccgatggaacttgtgccaaatttggatgagaaatgggtagttaggaaagggcactttcttggtgtcctagtatgcaaccattcatgcatgacagtgcaaagtctgagttcacaggttgttgcaccgaaggccatccatgatgacaacagcttggacttacttttagttggtggaaaaggaagatggaaattgctgagatttttcatacttctgcaattcggtcgccatctctctttgccttacgtcgaatatgtaaaggtgaagtcagttaagcttaaacctggtgcaaacactcacaatggctgtggcatagatggcgagctttgccgtgtcaagggacaggtactctgctccctgcttccggagcaatgcagactgattggccggcgatgtagacaatctatttaagcgctgtgttgaatttcatggatcctggggttctttccacttctaacaaatgtttatataactatactttctgatgggattaagcttgggttggtgttgcaaatgttgagagtttgaaccagaagcaatgttgtgaggtttctgtatatttgagcggttataggatgatatgctgattctgtttaattatgttgattttgcttatatatattcaatagagtaatttagtcccacttcggcgtggcggg

SEQ ID NO: 14819 - DNA, 2654 bp, Zea Mays
cgcatacccacatgtgttggacaaaagtttacttaattatactgaccttctcatatggcgttggatccgtgatgcctcctccattcctgaagctatttggaattcattgcctgaatcagtgttctgaagtgctatctaacagtcagaaatggatggatccgagcttgaaaatcctacttctagaagctcatcccagaaatctagccgacgttcgagtagtaggcgttctcaaaagtcagctggacagcattctttgaccggtgctcaagagaaaagaagcaaatcgaaatcttcaaggcagaaacacttggttattgacgacaaagaggctaaaaaagggaaaaaacatgaccacaaaattgacgtggcagatgagaggtccaattttctaggttatgaagtgtatgctggaaagctgattcttcaaaagaaaaatagaagtgcgagtgataataatcagttaccgtcaaacggaaaagctgatgcaattgatgctagactcacaagtaaagctctgatctggggcagctctgtactcctactggaggatgttgtctctgtatcatataattctggagtcaaacattttacattgcatgcatactcaactaaaaagtctttatttaaaaagacatgcagagttcagaaagatttctgctttatagcctctacccttgacgaggccattttgtgggtgacatgctttgctgaacaaagtatatatgttaacttactacctcgccttggagcatctagtatcaatcaagactcagaaaatcccctcagtgagtctttatttgaccagccaccgattaaatgcaaatctccgcaaagagtacttgttatattgaaccctcgatctggacatggtagatcaagtaaagttttccatgagaaagctgaacctatatttaagcttgcaggttttcagatggaagttgttaaaactactcatgctgggcatgcaaaatctcttgtatctacatttgatttcagtgcatgccctgatggaatcgtgtgcgtgggtggtgatggaattgtgaatgaggtgtgctcaatggtcttctcattaggagtgatagagcagaagctgtatcaattccagttggaataattcctgcagggtctgacaactcacttgtctggactgttttgggagttagagatcctatttctgcatcattattaattgttaagggtggtttcacagctctagatatcttggctgtcgagtgggttcaatctgggcaaatacattttggctcaactgtttcatactatggttttgttagtgatgtcctggaactttctgagaaatatcagaagaaatttggtccacttcgatattttgtggctggaatactgaaatttttatgtttgcctagctacttctatgaactggaatatcttccttcgccaaaggagatggccgtgaatggaaaaggtacagatcaagacaaggcccacctgtccaatgtctataccgatgtgatgcacagcagatcaaagaaagaaggaattccaagagcctccagtttgtccagtattgattctattatgactccaagtcggatgtcgcttggggatgttgatacatcaggtagtacagtggcaagcactgaaccatcagactatgtacgtggtctcgatccgaaagcaaaacgcttgtctctgggaagaagtaacattgtttcagaacctgaagaagtgctacaccctcaaccacatcatggatcattctggccaagaaccaggtccaaagcaagggctgatagaaattcagttggtataacgtctactaatgacacacggtcgtcttgggcagccccatcaatgcatgataaggaagacatttcctcaacaatatcagacccaggacctatttgggactgtgaaccaaagtgggacacagggccaaaatgggatagtgagctaacttgggagcctgaccaccccattgaacttcctggaccacaagaggacatgggaattggagcaccgatggaacttgtgccaaatttggatgagaaatgggtagttaggaaagggcactttcttggtgtcctagtatgcaaccattcatgcatgacagtgcaaagtctgagttcacaggttgttgcaccgaaggccatccatgatgacaacagcttggacttacttttagttggtggaaaaggaagatggaaattgctgagatttttcatacttctgcaattcggtcgccatctctctttgccttacgtcgaatatgtaaaggtgaagtcagttaagcttaaacctggtgcaaacactcacaatggctgtggcatagatggcgagctttgccgtgtcaagggacaggtactctgctccctgcttccggagcaatgcagactgattggccggcgatgtagacaatctatttaagcgctgtgttgaatttcatggatcctggggttctttccacttctaacaaatgtttatataactatactttctgatgggattaagcttgggttggtgttgcaaatgttgagagtttgaaccagaagcaatgttgtgaggtttctgtatatttgagcggttataggatgatatgctgattctgtttaattatgttgattttgcttatatatattcaatagagtaatttagtcccacttcggcgtggcggg

SEQ ID NO: 14820 - DNA, 1369 bp, Zea Mays
ggtggtttcacagctctagatatcttggctgtcgagtgggttcaatctgggcaaatacattttggctcaactgtttcatactatggttttgttagtgatgctacttctatgaactggaatatcttccttcgccaaaggagatggccgtgaatggaaaaggtacagatcaagacaaggcccacctgtccaatgtctataccgatgtgatgcacagcagatcaaagaaagaaggaattccaagagcctccagtttgtccagtattgattctattatgactccaagtcggatgtcgcttggggatgttgatacatcaggtagtacagtggcaagcactgaaccatcagactatgtacgtggtctcgatccgaaagcaaaacgcttgtctctgggaagaagtaacattgtttcagaacctgaagaagtgctacaccctcaaccacatcatggatcattctggccaagaaccaggtccaaagcaagggctgatagaaattcagttggtataacgtctactaatgacacacggtcgtcttgggcagccccatcaatgcatgataaggaagacatttcctcaacaatatcagacccaggacctatttgggactgtgaaccaaagtgggacacagggccaaaatgggatagtgagctaacttgggagcctgaccaccccattgaacttcctggaccacaagaggacatgggaattggagcaccgatggaacttgtgccaaatttggatgagaaatgggtagttaggaaagggcactttcttggtgtcctagtatgcaaccattcatgcatgacagtgcaaagtctgagttcacaggttgttgcaccgaaggccatccatgatgacaacagcttggacttacttttagttggtggaaaaggaagatggaaattgctgagatttttcatacttctgcaattcggtcgccatctctctttgccttacgtcgaatatgtaaaggtgaagtcagttaagcttaaacctggtgcaaacactcacaatggctgtggcatagatggcgagctttgccgtgtcaagggacaggtactctgctccctgcttccggagcaatgcagactgattggccggcgatgtagacaatctatttaagcgctgtgttgaatttcatggatcctggggttctttccacttctaacaaatgtttatataactatactttctgatgggattaagcttgggttggtgttgcaaatgttgagagtttgaaccagaagcaatgttgtgaggtttctgtatatttgagcggttataggatgatatgctgattctgtttaattatgttgattttgcttatatatattcaatagagtaatttagtcccacttcggcgtggcggg

SEQ ID NO: 14821 - DNA, 1419 bp, Zea Mays
ttccagtgttttcagctctgaatctctgattattctgatgtgtgttgcaactgtttttactgtcctggaactttctgagaaatatcagaagaaatttggtccacttcgatattttgtggctggaatactgaaatttttatgtttgcctagctacttctatgaactggaatatcttccttcgccaaaggagatggccgtgaatggaaaaggtacagatcaagacaaggcccacctgtccaatgtctataccgatgtgatgcacagcagatcaaagaaagaaggaattccaagagcctccagtttgtccagtattgattctattatgactccaagtcggatgtcgcttggggatgttgatacatcaggtagtacagtggcaagcactgaaccatcagactatgtacgtggtctcgatccgaaagcaaaacgcttgtctctgggaagaagtaacattgtttcagaacctgaagaagtgctacaccctcaaccacatcatggatcattctggccaagaaccaggtccaaagcaagggctgatagaaattcagttggtataacgtctactaatgacacacggtcgtcttgggcagccccatcaatgcatgataaggaagacatttcctcaacaatatcagacccaggacctatttgggactgtgaaccaaagtgggacacagggccaaaatgggatagtgagctaacttgggagcctgaccaccccattgaacttcctggaccacaagaggacatgggaattggagcaccgatggaacttgtgccaaatttggatgagaaatgggtagttaggaaagggcactttcttggtgtcctagtatgcaaccattcatgcatgacagtgcaaagtctgagttcacaggttgttgcaccgaaggccatccatgatgacaacagcttggacttacttttagttggtggaaaaggaagatggaaattgctgagatttttcatacttctgcaattcggtcgccatctctctttgccttacgtcgaatatgtaaaggtgaagtcagttaagcttaaacctggtgcaaacactcacaatggctgtggcatagatggcgagctttgccgtgtcaagggacaggtactctgctccctgcttccggagcaatgcagactgattggccggcgatgtagacaatctatttaagcgctgtgttgaatttcatggatcctggggttctttccacttctaacaaatgtttatataactatactttctgatgggattaagcttgggttggtgttgcaaatgttgagagtttgaaccagaagcaatgttgtgaggtttctgtatatttgagcggttataggatgatatgctgattctgtttaattatgttgattttgcttatatatattcaatagagtaatttagtcccacttcggcgtggcggg

SEQ ID NO: 14822 - DNA, 1280 bp, Zea Mays
ctactagctagctataggatccaacgtcgatcgatcgatcaatcgacatggacaggccaggccaccaccagcaccattttttcatgccgccgccgccgcagcagcagcagcagcagctttgcgtgccgatgatggacgacccgtcgtcgttcttggcggagctgatgggcgtcggcggcggaggcggaggtgggccgtcgtcgtccgcgaggggggagaggaagcggcggttcacggaggagcagatacggtcgctggagtccacgttccgcgcgcgccacggccacgccaagctggagccccgggagaaggcggaactggcgcgggagctgggcctgcagccgcggcaggtggccatctggttccagaacaagcgcgcccgctggcgctccaagcagctcgagcacgactacgccgtgctccgcgccaagttcgacgacctccacgcccgcgtcgagtccctcaggcgcgacaagctcgccctctccacgcagtttgtttcatgcggcgacatttcactgatatcttcatacgagaaggttgagaattgtgtatacacatctactattttgagaaaatgtgctagatggggttccatgacactaaatccttggaatcgatgttccaagtggaaattagcacatgccgaggtaggagggccttggtgaaagctgggcaccactcaaaggtcgtgccgctgatcgacgagaacctcctggtgacaacaagcaggggcaccgagttatcttccactctagagcactggctcgaagaaaggaacctttcttccgaagaagcccagattatccgtctagaggaagggtatatcagagaagggatgcggttgagcgtggttggagtgctgagcaagaagaacggggatgccgtgatacttcctccgctggagcctcaatcgacgggctttgtgttgctgtcgtgtctcctcccgtcatatttcgacgggatagtgctgagactggccgccgtgccgaactcgggcgtctcatgaagagccgctatgggtaggggagctcggtgagatgtaacagctaacaacaactcttgtgcggtgcccttgcccccttgggatctttttcctgtacgggtccacctttttcttttttgtttgcttctgggactcgatcgtgtatgtggttttcttttcaggtaatcctaatgtacattctcactatatcatagttgtagtgcgaggcatttcagcgctcttgcctggctcccttctatctgaaatgctgtacggtacagtatggttttcggtc

SEQ ID NO: 14823 - DNA, 1524 bp, Zea Mays
atggccaatccatccgaggctcccgtgacgctgacgccgtcgtcgtctgcatcacccgtacccctgccacgccgacgccgacgtcgcaaacacagagcagattgccgcagtccgtcggcagtcgtcaaactcgagaagatgcacgttcccacgtcacctcctccatggctccatttgatctacgagtacagcactccgactcgtaactctgggaccactcgtcagacaccggtgcgggagaccgcaccgaggacaaaaaggtcaaaaggcaacgaggcgcccccaccccccgcaaccactgtaccggggtatagcccaagccggagcactatgcttccggggggcggcggcgaggaatggaagcgacgcggcgcccccgccggcgaggacgccgccgacgccgacgccgacgctgccacctcggcgtcggcggcgtcgctgaacgacctctgcgccaccgccgcggcgggggcgcccgcgccgttcccgacggcggctgcgtgggcggtcgccgcgctgctcgcggtgggcctcggggtcggcgccctcgtcctcgccgtcgtgcgcagcccggcgctgctcgtggtggcggtcctcctcgcggcgtccgtggcggcgttcctcctgtggaatgccgcggccgcggcgtcgggccacgcgctgcgccggttcgtggacgggctccaggcctccagcctccgcgttgcggccgatggccagctcgtcaagatcaccggatttgtttcatgcggcgacatttcactgatatcttcatacgagaaggttgagaattgtgtatacacatctactattttgagaaaatgtgctagatggggttccatgacactaaatccttggaatcgatgttccaagtggaaattagcacatgccgaggtaggagggccttggtgaaagctgggcaccactcaaaggtcgtgccgctgatcgacgagaacctcctggtgacaacaagcaggggcaccgagttatcttccactctagagcactggctcgaagaaaggaacctttcttccgaagaagcccagattatccgtctagaggaagggtatatcagagaagggatgcggttgagcgtggttggagtgctgagcaagaagaacggggatgccgtgatacttcctccgctggagcctcaatcgacgggctttgtgttgctgtcgtgtctcctcccgtcatatttcgacgggatagtgctgagactggccgccgtgccgaactcgggcgtctcatgaagagccgctatgggtaggggagctcggtgagatgtaacagctaacaacaactcttgtgcggtgcccttgcccccttgggatctttttcctgtacgggtccacctttttcttttttgtttgcttctgggactcgatcgtgtatgtggttttcttttcaggtaatcctaatgtacattctcactatatcatagttgtagtgcgaggcatttcagcgctcttgcctggctcccttctatctgaaatgctgtacggtacagtatggttttcggtc

SEQ ID NO: 14824 - DNA, 860 bp, Zea Mays
aaatgataattgtcaactaagatgcgcgccttcgtttgtttcatgcggcgacatttcactgatatcttcatacgagaaggttgagaattgtgtatacacatctactattttgagaaaatgtgctagatggggttccatgacactaaatccttggaatcgatgttccaagtggaaattagcacatgccgagaggttcgctgctgatttctacgtagcggatgcaaaatcaggtaggagggccttggtgaaagctgggcaccactcaaaggtcgtgccgctgatcgacgagaacctcctggtgacaacaagcaggggcaccgagttatcttccactctagagcactggctcgaagaaaggaacctttcttccgaagaagcccagattatccgtctagaggaagggtatatcagagaagggatgcggttgagcgtggttggagtgctgagcaagaagaacggggatgccgtgatacttcctccgctggagcctcaatcgacgggctttgtgttgctgtcgtgtctcctcccgtcatatttcgacgggatagtgctgagactggccgccgtgccgaactcgggcgtctcatgaagagccgctatgggtaggggagctcggtgagatgtaacagctaacaacaactcttgtgcggtgcccttgcccccttgggatctttttcctgtacgggtccacctttttcttttttgtttgcttctgggactcgatcgtgtatgtggttttcttttcaggtaatcctaatgtacattctcactatatcatagttgtagtgcgaggcatttcagcgctcttgcctggctcccttctatctgaaatgctgtacggtacagtatggttttcggtc

SEQ ID NO: 14825 - DNA, 1212 bp, Zea Mays
atgggcaagaaattttcttatatctgtgaaggcagacctaagacaaattcgggtttattcatgcaatccctctttctgcattgtatcggtagatgctggcttcctggaagagcatatttctgaactgaacccactgcacacttaccgataatcctttttgtggtcacagctgaactattttccacttaattttgcgctatactacatttactatctgtatgagtgccaaccatacaagccgcagttcaatatttaggccccgtttcaatctcacgggataaactttagcttcctgctaaactttagctatatgaattgaggtgctaaagtttagtttcaatttccaccattagctctcctgtttagattacaaatgactaaaagtagctaaaaaaaagctgctaaagtttatctcgcgagattggaacagggccttacttgtctcttggtaaggcgcatatttgagccaatatctgttgcacgctggaactattctttaacacattaaatattttatccttttggaaacataggagtgcaggcaactgaaagatttcgttgttatggcgaagcaaaatggactgcagctcgtgcctgcacttgtcaaaaggatgctggataaaggcatgtttttgtttggctatatgaatttgatcgacgacaacggggacaagtaggtcgaggaattgatcgcattgcagaacaaacgagtaaaatttgcatgtgacaagttatttgcaaatatcaagcagaaagatatatgcacatgaacttggtcccttctcacaccatagaccctcaggccgcttctctcgtcaatacctcgacaacactcctcgccctcctcgcccttgcggtggccagtggactggcggccgacggcttggaccaccggtacaagatgtacaagcagacaagctcatcccgctgaacggcaacaatggcccctttcacaatcccagtgtggacttgaatgggacaactggcgatatggttgattttcaatctacaggagatgcagggaatggcgcaaccatcaccgagatgggcaacccggttcctgagccatcctacgaggaagctgttctttcagtagaagaggctagattatggagtgttgatactgtgaattgcttagatttcgatgtctggaccacaattgttgaggagacggacaaaaatgttgaggttatgactaaccataataattga

SEQ ID NO: 14826 - DNA, 1890 bp, Zea Mays
atgggcaagaaattttcttatatctgtgaaggcagacctaagacaaattcgggtttattcatgcaatccctctttctgcattgtatcggtagatgctggcttcctggaagagcatatttctgaactgaacccactgcacacttaccgataatcctttttgtggtcacagctgaactattttccacttaattttgcgctatactacatttactatctgtatgagtgccaaccatacaagccgcagttcaatatttaggccccgtttcaatctcacgggataaactttagcttcctgctaaactttagctatatgaattgaggtgctaaagtttagtttcaatttccaccattagctctcctgtttagattacaaatgactaaaagtagctaaaaaaaagctgctaaagtttatctcgcgagattggaacagggccttacttgtctcttggtaaggcgcatatttgagccaatatctgttgcacgctggaactattctttaacacattaaatattttatccttttggaaacataggagtgcaggcaactgaaagatttcgttgttatggcgaagcaaaatggactgcagctcgtgcctgcacttgtcaaaaggatgctggataaaggcatgtttttgtttggctatatgaatttgatcgacgacaacggggacaagtaggtcgaggaattgatcgcattgcagaacaaacgagtaaaatttgcatgtgacaagttatttgcaaatatcaagcagaaagatatatgcacatgaacttggtcccttctcacaccatagaccctcaggccgcttctctcgtcaatacctcgacaacactcctcgccctcctcgcccttgcggtggccagtggactggcggccgacggcttggaccaccggtacaagatgtacaagcagacaagctcatcccgctgaacggcaacaatggcccctttcacaatcccaggagatgcagggaatggcgcaaccatcaccgagatgggcaacccggttcctgagccatcctacgaggaagctgttctttcagtagaagaggctagattatggagtgttgatactgtgaattgcttagatttcgatgtctggaccacaattgttgaggagacggacaaaaatgttgagggtgatgactgatgagttcgagcttgacagcatcaagaaattgtcaagggagtatgcagaagcaaaggaactggcccttgcagcccctatcacctggacagaggaaagccaaactgtagaagttgaagatgctaagcacctccttcagagtgtgagaggctgttgggcgacaagatggacgaagtcgtcaaagaatgggatgtccagaaggactgaaggaggggttctaccagaggacaggattatcctcatcccctggcgaccagctcatggcggtcgacaacgatgaatcaggagctcaatgtcacgaggatggatcccgtggcgatcagctcatggcggtcgacaatgatgaatcgggagtacaggatcacgaggacgaccatgacgacggctttgccgagttagaactgctgctagagtgaagaacatctacaagtctgtaaactcttactaccgccgtatatccatgtaatcatcgcgcccagagatgaaatcctcgctcgtctttactaggctctcctttttagttgccagaccttctgttcatctacactggttgcagttactgtacattgaaatagtccagtgcgccagcctatgcagaggaggggaaaaaaagaggtgagcttgagtaaaaatgtagatgaacagtgacaagaaaaaacgctggttgcagtaactgtacatttgaaacggtagtgtgccagagtaaaaaaatgtagatggacagtgacgaaaaaaaaacgcaa

SEQ ID NO: 14827 - DNA, 1872 bp, Zea Mays
atgggcaagaaattttcttatatctgtgaaggcagacctaagacaaattcgggtttattcatgcaatccctctttctgcattgtatcggtagatgctggcttcctggaagagcatatttctgaactgaacccactgcacacttaccgataatcctttttgtggtcacagctgaactattttccacttaattttgcgctatactacatttactatctgtatgagtgccaaccatacaagccgcagttcaatatttaggccccgtttcaatctcacgggataaactttagcttcctgctaaactttagctatatgaattgaggtgctaaagtttagtttcaatttccaccattagctctcctgtttagattacaaatgactaaaagtagctaaaaaaaagctgctaaagtttatctcgcgagattggaacagggccttacttgtctcttggtaaggcgcatatttgagccaatatctgttgcacgctggaactattctttaacacattaaatattttatccttttggaaacataggagtgcaggcaactgaaagatttcgttgttatggcgaagcaaaatggactgcagctcgtgcctgcacttgtcaaaaggatgctggataaaggcatgtttttgtttggctatatgaatttgatcgacgacaacggggacaagtaggtcgaggaattgatcgcattgcagaacaaacgagtaaaatttgcatgtgacaagttatttgcaaatatcaagcagaaagatatatgcacatgaacttggtcccttctcacaccatagaccctcaggccgcttctctcgtcaatacctcgacaacactcctcgccctcctcgcccttgcggtggccagtggactggcggccgacggcttggaccaccgtgtggacttgaatgggacaactggcgatatggttgattttcaatctacaggagatgcagggaatggcgcaaccatcaccgagatgggcaacccggttcctgagccatcctacgaggaagctgttctttcagtagaagaggctagattatggagtgttgatactgtgaattgcttagatttcgatgtctggaccacaattgttgaggagacggacaaaaatgttgagggtgatgactgatgagttcgagcttgacagcatcaagaaattgtcaagggagtatgcagaagcaaaggaactggcccttgcagcccctatcacctggacagaggaaagccaaactgtagaagttgaagatgctaagcacctccttcagagtgtgagaggctgttgggcgacaagatggacgaagtcgtcaaagaatgggatgtccagaaggactgaaggaggggttctaccagaggacaggattatcctcatcccctggcgaccagctcatggcggtcgacaacgatgaatcaggagctcaatgtcacgaggatggatcccgtggcgatcagctcatggcggtcgacaatgatgaatcgggagtacaggatcacgaggacgaccatgacgacggctttgccgagttagaactgctgctagagtgaagaacatctacaagtctgtaaactcttactaccgccgtatatccatgtaatcatcgcgcccagagatgaaatcctcgctcgtctttactaggctctcctttttagttgccagaccttctgttcatctacactggttgcagttactgtacattgaaatagtccagtgcgccagcctatgcagaggaggggaaaaaaagaggtgagcttgagtaaaaatgtagatgaacagtgacaagaaaaaacgctggttgcagtaactgtacatttgaaacggtagtgtgccagagtaaaaaaatgtagatggacagtgacgaaaaaaaaacgcaa

SEQ ID NO: 14828 - DNA, 1940 bp, Zea Mays
atgggcaagaaattttcttatatctgtgaaggcagacctaagacaaattcgggtttattcatgcaatccctctttctgcattgtatcggtagatgctggcttcctggaagagcatatttctgaactgaacccactgcacacttaccgataatcctttttgtggtcacagctgaactattttccacttaattttgcgctatactacatttactatctgtatgagtgccaaccatacaagccgcagttcaatatttaggccccgtttcaatctcacgggataaactttagcttcctgctaaactttagctatatgaattgaggtgctaaagtttagtttcaatttccaccattagctctcctgtttagattacaaatgactaaaagtagctaaaaaaaagctgctaaagtttatctcgcgagattggaacagggccttacttgtctcttggtaaggcgcatatttgagccaatatctgttgcacgctggaactattctttaacacattaaatattttatccttttggaaacataggagtgcaggcaactgaaagatttcgttgttatggcgaagcaaaatggactgcagctcgtgcctgcacttgtcaaaaggatgctggataaaggcatgtttttgtttggctatatgaatttgatcgacgacaacggggacaagtaggtcgaggaattgatcgcattgcagaacaaacgagtaaaatttgcatgtgacaagttatttgcaaatatcaagcagaaagatatatgcacatgaacttggtcccttctcacaccatagaccctcaggccgcttctctcgtcaatacctcgacaacactcctcgccctcctcgcccttgcggtggccagtggactggcggccgacggcttggaccaccggtacaagatgtacaagcagacaagctcatcccgctgaacggcaacaatggcccctttcacaatcccagtgtggacttgaatgggacaactggcgatatggttgattttcaatctacaggagatgcagggaatggcgcaaccatcaccgagatgggcaacccggttcctgagccatcctacgaggaagctgttctttcagtagaagaggctagattatggagtgttgatactgtgaattgcttagatttcgatgtctggaccacaattgttgaggagacggacaaaaatgttgagggtgatgactgatgagttcgagcttgacagcatcaagaaattgtcaagggagtatgcagaagcaaaggaactggcccttgcagcccctatcacctggacagaggaaagccaaactgtagaagttgaagatgctaagcacctccttcagagtgtgagaggctgttgggcgacaagatggacgaagtcgtcaaagaatgggatgtccagaaggactgaaggaggggttctaccagaggacaggattatcctcatcccctggcgaccagctcatggcggtcgacaacgatgaatcaggagctcaatgtcacgaggatggatcccgtggcgatcagctcatggcggtcgacaatgatgaatcgggagtacaggatcacgaggacgaccatgacgacggctttgccgagttagaactgctgctagagtgaagaacatctacaagtctgtaaactcttactaccgccgtatatccatgtaatcatcgcgcccagagatgaaatcctcgctcgtctttactaggctctcctttttagttgccagaccttctgttcatctacactggttgcagttactgtacattgaaatagtccagtgcgccagcctatgcagaggaggggaaaaaaagaggtgagcttgagtaaaaatgtagatgaacagtgacaagaaaaaacgctggttgcagtaactgtacatttgaaacggtagtgtgccagagtaaaaaaatgtagatggacagtgacgaaaaaaaaacgcaa

SEQ ID NO: 14829 - DNA, 1815 bp, Zea Mays
atgggcaagaaattttcttatatctgtgaaggcagacctaagacaaattcgggtttattcatgcaatccctctttctgcattgtatcggtagatgctggcttcctggaagagcatatttctgaactgaacccactgcacacttaccgataatcctttttgtggtcacagctgaactattttccacttaattttgcgctatactacatttactatctgtatgagtgccaaccatacaagccgcagttcaatatttaggccccgtttcaatctcacgggataaactttagcttcctgctaaactttagctatatgaattgaggtgctaaagtttagtttcaatttccaccattagctctcctgtttagattacaaatgactaaaagtagctaaaaaaaagctgctaaagtttatctcgcgagattggaacagggccttacttgtctcttggtaaggcgcatatttgagccaatatctgttgcacgctggaactattctttaacacattaaatattttatccttttggaaacataggagtgcaggcaactgaaagatttcgttgttatggcgaagcaaaatggactgcagctcgtgcctgcacttgtcaaaaggatgctggataaaggcatgtttttgtttggctatatgaatttgatcgacgacaacggggacaagtaggtcgaggaattgatcgcattgcagaacaaacgagtaaaatttgcatgtgacaagttatttgcaaatatcaagcagaaagatatatgcacatgaacttggtcccttctcacaccatagaccctcaggccgcttctctcgtcaatacctcgacaacactcctcgccctcctcgcccttgcggtggccagtggactggcggccgacggcttggaccaccgtgtggacttgaatgggacaactggcgatatggttgattttcaatctacaggagatgcagggaatggcgcaaccatcaccgagatgggcaacccggttcctgagccatcctacgaggaagatttcgatgtctggaccacaattgttgaggagacggacaaaaatgttgagggtgatgactgatgagttcgagcttgacagcatcaagaaattgtcaagggagtatgcagaagcaaaggaactggcccttgcagcccctatcacctggacagaggaaagccaaactgtagaagttgaagatgctaagcacctccttcagagtgtgagaggctgttgggcgacaagatggacgaagtcgtcaaagaatgggatgtccagaaggactgaaggaggggttctaccagaggacaggattatcctcatcccctggcgaccagctcatggcggtcgacaacgatgaatcaggagctcaatgtcacgaggatggatcccgtggcgatcagctcatggcggtcgacaatgatgaatcgggagtacaggatcacgaggacgaccatgacgacggctttgccgagttagaactgctgctagagtgaagaacatctacaagtctgtaaactcttactaccgccgtatatccatgtaatcatcgcgcccagagatgaaatcctcgctcgtctttactaggctctcctttttagttgccagaccttctgttcatctacactggttgcagttactgtacattgaaatagtccagtgcgccagcctatgcagaggaggggaaaaaaagaggtgagcttgagtaaaaatgtagatgaacagtgacaagaaaaaacgctggttgcagtaactgtacatttgaaacggtagtgtgccagagtaaaaaaatgtagatggacagtgacgaaaaaaaaacgcaa

SEQ ID NO: 14830 - DNA, 2120 bp, Zea Mays
atgggcaagaaattttcttatatctgtgaaggcagacctaagacaaattcgggtttattcatgcaatccctctttctgcattgtatcggtagatgctggcttcctggaagagcatatttctgaactgaacccactgcacacttaccgataatcctttttgtggtcacagctgaactattttccacttaattttgcgctatactacatttactatctgtatgagtgccaaccatacaagccgcagttcaatatttaggccccgtttcaatctcacgggataaactttagcttcctgctaaactttagctatatgaattgaggtgctaaagtttagtttcaatttccaccattagctctcctgtttagattacaaatgactaaaagtagctaaaaaaaagctgctaaagtttatctcgcgagattggaacagggccttacttgtctcttggtaaggcgcatatttgagccaatatctgttgcacgctggaactattctttaacacattaaatattttatccttttggaaacataggagtgcaggcaactgaaagatttcgttgttatggcgaagcaaaatggactgcagctcgtgcctgcacttgtcaaaaggatgctggataaaggcatgtttttgtttggctatatgaatttgatcgacgacaacggggacaagtaggtcgaggaattgatcgcattgcagaacaaacgagtaaaatttgcatgtgacaagttatttgcaaatatcaagcagaaagatatatgcacatgaacttggtcccttctcacaccatagaccctcaggccgcttctctcgtcaatacctcgacaacactcctcgccctcctcgcccttgcggtggccagtggactggcggccgacggcttggaccaccgtgtggacttgaatgggacaactggcgatatggttgattttcaatctacaggagatgcagggaatggcgcaaccatcaccgagatgggcaacccggttcctgagccatcctacgaggaagctgttctttcagtagaagaggctagattatggagtgttgatactgtgaattgcttagatttcgatgtctggaccacaattgttgaggagacggacaaaaatgttgagaggtgctggatagggcgtccgaaggggcgctgcctgatgtagcaacgtcacacctgttcaccgcacatgttctgacttttggcgagcggcaccacacatattcttatatctagggatgaaaacggtcggaaacagtatttattcgggtgatgactgatgagttcgagcttgacagcatcaagaaattgtcaagggagtatgcagaagcaaaggaactggcccttgcaggtgcctatccattgccattgttggatatgtgcattttacttcctttacgtaagactccggacacaacgccaacgccgttcctaatccaactgctgtctgttagcccctatcacctggacagaggaaagccaaactgtagaagttgaagatgctaagcacctccttcagagtgtgagaggctgttgggcgacaagatggacgaagtcgtcaaagaatgggatgtccagaaggactgaaggaggggttctaccagaggacaggattatcctcatcccctggcgaccagctcatggcggtcgacaacgatgaatcaggagctcaatgtcacgaggatggatcccgtggcgatcagctcatggcggtcgacaatgatgaatcgggagtacaggatcacgaggacgaccatgacgacggctttgccgagttagaactgctgctagagtgaagaacatctacaagtctgtaaactcttactaccgccgtatatccatgtaatcatcgcgcccagagatgaaatcctcgctcgtctttactaggctctcctttttagttgccagaccttctgttcatctacactggttgcagttactgtacattgaaatagtccagtgcgccagcctatgcagaggaggggaaaaaaagaggtgagcttgagtaaaaatgtagatgaacagtgacaagaaaaaacgctggttgcagtaactgtacatttgaaacggtagtgtgccagagtaaaaaaatgtagatggacagtgacgaaaaaaaaacgcaa

SEQ ID NO: 14831 - DNA, 1400 bp, Zea Mays
aaaaaaagacacggcggctacaactttctccagagatttccatcgcacaactctccagcgactttctccatagatttccatcgcacacctctctagtctccatccgtcgggacgccgcatctcgctttctctcccagttgcttcgtctcgctttcatcctctccatgtcacttgggtttcgtcggcgtcaaggactccactttcgcccgacgacttcgccttctcttggcttactcaccggctgtgtctctttgatggacatcgggttccggatttgtgcttcgatcatatccagctgccagcttggtcgtcgacacgtttatttccacagttgtgctcccattcttgcttcgtcgattgtttcgttttggtgcacagctgatttcgtttgtgtcaaatgcataaggctgtctcaggtcggagatttccggttgtgctcattgcaaccaagacgaagaagacgacgacgatccgtccacaacggctgtctcctctgcgggcgtattgacgccacaacccactatgggtatcttgagttggccttcaagcagatggcagagaccgcagacgccagcaacgcactcgaccacaggcttcactaccttcggttgaccggcaatgcatgtgcggcgagggcgctggtatggtgggtatgggagaactctaatgctcatgctgcgaacatccactgctcgaaccaccatggcgctcggctatagagcgtcatgacagcagctccccaagcgatgcaagccgcctgtttgacgaaatgtgtgagaagcaaaatagagacatcaatggtgttttcatgtgtctaatacattttaaaaaaaacatagctagatagcattttcgacaggaacaaaggattcgtaatgcgctcggctactgggcgtcatgacagcagctccccaagcgatgcaagccgcctgttcgacgaaatgtgtgagaagcaaaatagagacatcaacggtgttttcatgtgtctaatacaaatttattttttaaaacatagccagataacattttcgacaggaacaaaggattcgtaatgtaatttatataatgtaattattttgattaatctatgattcaatttccatagcataagaatgtttttttgtttgcatgtattataagaaaaaaaaattacaatacaaatgtctgataagaaaaaaaaatctatagcacaataatgtagcatattttaatttcacgacatacaaacgattgaaaacaatgtatattgtgaaattgctatagaggatcggatttagaggtcgttgctggagatgtgaatatatacaaaataaaatcttttagagtgtgctataaaggacatagaatattcttttagtgtataaaatgtaggagacatagcctaacaacttccggcgtag

SEQ ID NO: 14832 - DNA, 5831 bp, Zea Mays
cgagtgtcccgatccaggggaatgccattggctgcgctcctccttgtgggagtggtgcctctgctgagcacacgggaccagtgaaccaagagactttcggatcactggataatgtgaaaccttccaattttcctgctcagagtgatggtttgagttgtgtctctgctgaagaaacctggccagcagattccccaaccccaacactacagacaaaaggatattcatccccttcatttactcttcagtttggaacttttaactcaggagttattaacaaacaggaaactacttcctgcacatcctcagcccctcctgatctgaatgggagcaaacatgaaaaggcctgccatggattacattattgcaagcccaatacagcttcctcacctcctatacaagagctgcaaaagcaggaagcaagagatgatttagttattggtggagaagcagacttaattggtaaatatgaggttcatgttcctgaattgcatgaaacacacacaatgctgaattctgtttctccatctagcaaagtgtgcacagattcacgcaaggtgttgctcagaactatgtcttccccaactcaacaaaagtgtgaaaatcaagaagaaacaaaaaacactatcagtgttaaccagactgacaccgcatacaaatatcctacaaccaagcccaagatcagtgttcaaattccagcttcctatactcccaacatggcaccaccccaatttatgcttccagtaccagggagatcaatgcctgtggcatttcaacagaaacaacctcaagtgcccattgaattcaggggcccaggttttcaaatgcactctattggctctgtatctagttccttgcccgtgaagatggctgtccctctgggtaatgcacctcacatacaaccgatgtttgttcatggtgctcagcctcatgcattccatcagcaatcctttattcaccatggacaaggctttggatgtgctcctccatctaattgttaccttcctcagtttggcaacatgagaaatgtgcaagaattatctcagcagtatcctagaagcggtgatgaacataagagaactatcaagataacacatccagagacacacgaagaactgatgctagatagacatgggcattcctttataaatgttcctgcttctgggcagatgcctttaaacaatataaaccagctacctcactctgttcaaacattttctccacttcagaaagtgtattatcctagaccaggaacgtacaattcagcacatgtctatcttcccaactccactgatgtccctcttgcaagtaggcaattttcctccaaaattcaaccttcgatgcatggttttgattccactaatagcaaccagccatttacttccatcagacctcctatgccgatatctcggcttgatgctacttccgggccattaacaaatttgcatactgcttccgaaatctcaaatttcaaagggatgtttccatcaagcctacctgctccagttcatgttgagctaaagccgcctattacactccctgctgaaatgaatagtgaatctaccatatcaaatcaacaaaattattgcaaaattgggctagaaatgtcccttgaacctgtaaatttagtttatgaaggaaataacaaagattctgttgcaacttgtgacataagttgtaatttaatacctcaaccagtttcaaccccgcagacacagactcggccaacttcagttgatcatgccacaccagttgtagaccctcaaactatcttaaccagtagcctgcctctggaatctactacatgttgtaaatcttcagttaaagcaaaacctattgaggtggaacaatcattagtggttccaacaactttatcatcccatacaaaactcgagtcatcgcatgcaactactagtgtcattttgactgcaacttcattagtttccaagattgatgggacgccaccgactaacaggaactatagatattatggcaatagcattttggggaaacctccgttaatttatgcacaagaaatattgccatcaaagtttgtggggtctaatacatcaccagaaggtcttggaaaggcaaaggtgaatccagttctcttccaagaaaagtttccttctgaacttaatggttcagttccattgcgaaagcatgacttcatgatagaagaacatgttccaaacgaaaaagggatgtgctcagagtcaaagaccgaacaagtagatgtgaccatgccaagtactgcctttggattggaggatgacactagtgttgctaaatctggaagatttcatgcatatcaccagccagttgatttgcatccttccatatacattggtgatatccagacatcagatgacagtcagcaaccttcaccagatttagaaatcataacatctcaatcagagaacaagcagaataacagtagagtagactctgcaagggatgtcaagaatgcagcccctatttctacttcagctatctcccaggggaaaacagaacaagagaggattggtttagaaatatctaatccttgctctataactgctgctttagtggcacaaccaaaaaaagttgttttggagtcaacaaaggccaaaagtaccaatggacgaagaaagaaacgaaaagagacacttcctaagggtagtggacacaagtattatgatcttgatagtgcacacagttctctcaatgagaatgtcgagagttttgttacttcagaggatgttcagtgttccttggcaactgatttaaagctgaattttacatgcgaggctgcaaaggacaattcaactggtgggaatgattgccagaacagaagtgacttgttcagctgggaaaatacaacggaaaactctgcggacaagttgaaactttttgggggtacccattctaaaagtggagcagaagtaaacaaggataaatctgagtttgaccataaaaggtattcccgggattttcttttaacgtttgcacaaagttgcatcgaacttcctgcaggtttcatgattggattcgatatttctgaagcagtaatgagtgtacatgttggtgctccatttatagacaatactcaacttaattcaaaccatgcaaggataaaagatcgaggttcccgaggtagtcgtcatatgactggtaaatttgatgatgataagtggagaaaacagtttttttctactgtttctggacgtaacctgctttctgacaatttttatcaacctgccttttctaatcgggatgcagtacaacatgttgggaacggatctgtaagaagtttatcacaaagtcagccattaagtcaatatagtggcgaggtgctctccggagctatgaaagtagtatctcggcgcagcatgtcacgtggatctgttgatgagagatggcaacatagaactaatgttcagggtatttcatcgccttctcaggtatctatgccaattatgcacaaagctgagaaaaaatatgaaataggtaaggggattgatgaggaagggtcaaaacaaaggcagttgaaagctattctgaataagttaaccccccaaaatttcgaaaaactttttgcgcagttcaaggagttgaatattgataacgtggtcacacttactggtgtcatatctcagatatttgacaaagctttgatggaacccactttttgtgagatgtatgctagtttctgtttccgattagctggtgacctaccaaactttgtcaaagatgatgagaaaatcactttcaaacgactgcttttaaataaatgccaagaagaatttgaaagaggagaaagagagcaggctgaagcaaataaagcagaagaagagggtggagctaaacaatctgaaggcgagagagaggaaaaacggattcgagcacggagacgcatgctaggaaatattcggttaattggtgaattgtacaaaaagaaaatgctgaccgagagaataatgcatgaatgcataaataaactgctaggtgagtatcaaaacccagatgaggaagacctagaggctttgtgcaaattaatgagcacgatcggggagatgatagatcatcccaggacaaaggtccatatggatttttattttggccttatacataagctatcagaaaatgtgaagttatcatcgcgtataagatttatgctagaagatgtgattgaccttagaaaaaacaagtggaggcagagaaggaaagtagaagggccaaaaaagatagaggaggtccgcagggatgcagtaaaacataagtttggccaatcaacaaggtttggctcttctcctaattataattcatctgttacttgcattagctctggattgagaccagggcctccagatgctagatatcagtcttcaaatagagtcttgcatgttccactccatcaaaggcgtgctcataaatccattcgccttggtcctcaaggtgacttaggaagaggaatctcgatttgtgggaagcaacacgtttcaaatgatattttgccagaagttactttgaatagtcatcatggtcaaacatcagaaaactcaagagacagttcatttacaggagtgacaagtaatccaacaggcttcaaagccggtaatacatcttggggaatggtggatctttcttcaccagtaccgtcaactataggtcaaacacatacatcctccacagtcagaaaggagatgtgtgctgaagcgcatacattccctgaagaggttcttcaagagaaatcgatactaaccataaaagaattttacagtgctaaggatgagaaggaggtcgctctgtgcatgaaagaactgaatgctcccggcttctatccttctcttgtgtcactttggatcactgactcgtttgaaagaaaagacctggaaagggaactcttggccaagcttttggtgtacttgtgcacagctcaagagcacttgctgagccagaggcagctactccaggggttccaacatgttctatctaccttggaggatgccgtgaccgatgcgccgaaagcgaccaagttcctgggccaaatatttgccagagtcgtactggaagacgggatctcgctgacggaggtaggagggctgctgcaggagtgggatggcagggaagagccagcaggacagcatgccctggaggacagcctcgcatccgaggttctagggagcatgctagagtccatcagagtagagaggggcgacaacgccgtggacgaaatccgcgcaaaatccaacctgcagaggcgtggggtacttatcatgtttccatcgttttcacggcgagcgtcatgcaagaagcaagaagatccggattcttttgaatgggccaagaaatttctgttgtctggtgctctttctgctttcgttgagcccaacatggaaactgtccccatcaagattccctctaaatgtatgctccctcctagtcaggaattgcatgaggaacctcagtcccctttgcctgcagaagcggtcaacagaaagaaacagtcaatcttgatcgacactgaagtaaggagtgccaggctcaaggagaaggctagaggttttaagacttgctctggaataaggaagaattgctcgtgctgtgctaggacatcgccaccctctatctctcacaagattattaagaagctaggagctgaattctgcaaagttaatccctccaagttatgccctaatgcattaaacaactccaggtccttcagctctgccatccagaggccacgtgcttcatccagtagcagggccgagctacgagcaacgtccgaagatcagagggatgaatcagaagatgaagatgatgcggggtctcgcccctcggctgggatgtaa

SEQ ID NO: 14833 - DNA, 3138 bp, Zea Mays
aaatttaactgcactgccagatcggtcatgggaacttaaacattaccaaataggcaactacaagtggttaagaactgaacagaaaaggactgaaaaaactgaatacatcctttttgttgttgtgaacattaccaactgaaaaagctgaatgtaacctattaacttctgtcttgctgaacatatttgaagcagattttttggttgaacattacaaaaagtgtgcaagaacatggattcaatgtttatttaaacttcataactgatacaacaaaatagagaggcacataatcaatccatgctgatgaattacaggtgggctataagagtatgctgtaaaaaaccaaatcatgtgataatagacaaaatcattttcacccattcacttccttggcctcaaattaacataggacaacaatcacacacatggattttattgaatggaaggaaattgaatcaacatcagaaatctagtgagcggaatatgaggagcctagtaccagaggtccaagtaacatcgatagccataacaatccaggtttaacaaaaaccaacgactttctatttaccttcgacctaggaagctatgaatgaataaattaatttgaaaccacacaataatcaaagggccaaaaggcaaatgctttcctctgaaaggcggaatggaggaagtggataggggcataccaggaggaagccagaagagtagcgttcaaaaagcctcgatgtgtaactatccctcaaatttggctgtattttttcataatagaaatcgtggatttcaagtactacataatgaaccaattgcaatggttcttactgttgctcctaaatggcttccgttgagaacatatgaggccatgatgactgatatatgactgaattctaagaatcagatttatagtactatgatgcaagacataaacaaatcacttatgccatcaaaatggtgcacatcaatgactgactgagggcctgtttggacgctgacgtccagcaccacaccccgcctaaggtgtcgcggccgattcggccgccacaactgcggcgcgcgaagtgtggcgtggcatggtgaatttcagagctgtttttcgttctcttctatatgtcctatttacaataatgattgtgcagctcacttttcaaagtaaaactatgtaccacttttttttgaaagaacataccagctggtgttagtagtaacaagaaacggtatgtctgcattttcttgtttcacaaccaggacataatttcagagagaaacccaaagggataaagaaagtcatcatggcagtaaggcatattgcgtatggtttcataaaataattaccagagtcctaaatctctggtaagggagagagtgacatttggatatatcctagtcacatcacttttcattttcagaacacaataagctctcaagtatgatgactgaagagtcatataagcaaagaaaagtacaagaggtcttcgagaaatcggatgatatggacgatcagttacactaatcgagtccaacaccctaatcgagcacagagaaacaatcagcccgactaatcgcgattagtcagccgatctgaaaacaatgagcccctgtatccaaacaagcccggtatacagtctatgtaataactttgtcaaattacagaaagcttatacctttatcttttgtactactatcaaagaaacatgccctgtcgttcattgatcatacaaaagtcttaagtatcgagtatcgacttaaaattatgtgcactcaccactattcaacttgacagtgaatttcttagtgcattgtctatagattatagtgaagtatgtggtctagtgagccatactttttgcttggttgtagccatttttgtttatggtctatagacctttatctttttgtttgttccttttctgaatggctggtagttaatgtaatttttgaccttctctattaacatatagcaagttagcagcagtacgtcaaggaagcactttttgcgtgtaatcactttaatttcagatagccatgcatgtttctccgccaagatttaacagctaaccttttgcttcagcgatgcacatacttttggtctcatcaaagtccatgaaccctatccttttggggtggacccaagctggcgtggaagtcggtctgagctaccctttctaaattcattaaagatgaagatgtctatactaatgggtgttgcccagatgaacctggggattgtattgagttattttgatgcacgatatcatggaaatgctcttgacataaggtatcaattcataccacagatgattttcctcaatagcctttttggttacttagcactcctgattcttatcaagtggtgcacgggctctcaagctgatctttatcatgtgatgatatatatgttccttgatcctgctggagatcttggagaaaatcaactgttctggggccaaaaggaacttcagatattgttgttacttctggctttgatcgctgttccatggatgctcttcccaaaaccttttatcttgaagaaacttcataaggaggtaatgatttggaaaatgttcttgaaaaatatatcaggctctggtatgactgaagagtcatataagcaaagaaaagtacaagaggtcttcgagaaatatataccaggctcataataaaggtaaacagagcagttcaatgggctgcttcattgggccaaacataaatataatgcatttgtgagaccttattatctgccaaactacatgaaaattcctctgaactcatgtatctcattggatttaagcttatattttgaagttgcatagtgatcaatttctactctggatcaaaacctgatacatagtgctcattatgttttatagtgcctttaatgttttacattgtctagttgattcatgtctatagcataaattatatgacacaagagatctttaaactttcaagtaacataaacaaaaatcagcagtgtcaaacatgtgaattagcatagagcgcaaaatgaaaacttgggagaagaatcatgtcttgcttataatggatctcagcttcttggagctgttgtttaagagttgttacttgtagttccagctcacgctgctgcgacgatcccctaaatacttcctgaaagtgctccattg

SEQ ID NO: 14834 - DNA, 1073 bp, Zea Mays
atttttgaccttctctattaacatatagcaagttagcagcagtacgtcaaggaagcactttttgcgtgtaatcactttaatttcagatagccatgcatgtttctccgccaagatttaacagctaaccttttgcttcagcgatgcacatacttttggtctcatcaaagtccatgaaccctatccttttggggtggacccaagctggcgtggaagtcggtctgagctaccctttctaaattcattaaagatgaagatgtctatactaatgggtgttgcccagatgaacctggggattgtattgagttattttgatgcacgatatcatggaaatgctcttgacataagatcttggagaaaatcaactgttctggggccaaaaggaacttcagatattgttgttacttctggctttgatcgctgttccatggatgctcttcccaaaaccttttatcttgaagaaacttcataaggaggtaatgatttggaaaatgttcttgaaaaatatatcaggctctggtatgactgaagagtcatataagcaaagaaaagtacaagaggtcttcgagaaatatataccaggctcataataaaggtaaacagagcagttcaatgggctgcttcattgggccaaacataaatataatgcatttgtgagaccttattatctgccaaactacatgaaaattcctctgaactcatgtatctcattggatttaagcttatattttgaagttgcatagtgatcaatttctactctggatcaaaacctgatacatagtgctcattatgttttatagtgcctttaatgttttacattgtctagttgattcatgtctatagcataaattatatgacacaagagatctttaaactttcaagtaacataaacaaaaatcagcagtgtcaaacatgtgaattagcatagagcgcaaaatgaaaacttgggagaagaatcatgtcttgcttataatggatctcagcttcttggagctgttgtttaagagttgttacttgtagttccagctcacgctgctgcgacgatcccctaaatacttcctgaaagtgctccattg

SEQ ID NO: 14835 - DNA, 1957 bp, Zea Mays
atcaatgccacgagcacatcttatcactatccaccgcttcctctcggatattatcctcagttgccgtattctgctgaaacccggcgcctgggatcagcctcatatctcctctgatttttttcacccagccgatcctatcctgcgccgccgccctcgttgcttgatttttctgctcggcggccagcggctttatctcaccgcgtggtcatcttcaatctccaacggtggagctctcttggctatctccctccatggcgactctctctctgccgtgagctctctgccgtgctctctctctgccgtgagctctctgccgtgctccctactgccgttcaccatggtcgtgcctctgctcgccgtgaagctttatcatctccagcagctcacctcacctagccgtcgtggcccctctgctcgagctcctccctcgccgtagccccagatcgccaaaccatggctgcagcccaccggactgcgccctgacttttccttgagtcggccgttgtttccccgcgagcttcgctggccgtgctgcatcttccccggccgtaggcatccgagcccctggcttcccatggagctcgcccctattcttcgttccagcacgcatcccatgaccgctgaactccctgccgaggtccctgttctccatggcgccggatccactgcaagctcgccaactcgcccttcttctctaccggcgctccagctcgcgtcctgcgcgcgccctccttgctcgaccggccatcctccggctagtcatcctgctcggagttccctctggcgcacgctctgctcgccgtcgcaagccgcggctctctccagctcgctcggatctcccagcgccgtccctctgttttgttctgccgcgagcagctccctggtgctcagacccagcttcgcgcgcttcctgctcccatggcagcgcatcctcgcgctttggccaagttcgtcccatggcgcccggacttctgctcgccccagctccctgttgtcgcgagcttcagcccggatttctctttgtcacgcagctcggcgcctgctgctcgtccctgctgcgcgtgtcgcattcttctattgcgcgcacgaaaattctctgctcacaacgacgtgtcaagtttccgcgtcgaactcctctcgtgcgtgccggtcgtcgtctccaagccgattcttggctgtcgtagtatttttaagttatcccggacatgtctgtggttgtcaggcgtgtctgttgccgtgaactcgcccctggtatccactctgtctctggtccgcgcttccttcacttcggccaggcggggcatcgttccgtgtgctcgcccaagtcaccactgtcaaatcgtcggagtcgctcaactcaccaatcgtatcttgttcgtcgcgtcgggtatgcagctctgtatatgccaccctcctatatcgtcgtcgaagctgtcatcccttgctcgaccccacctcaccagctcgctccaaacacgatctcgtcgtcgtttcgtgtgtcgtcaagaaatcccaagcgtcggatgaagacgtagccaacagcgcgatattccccaagcgctcgacaaattgcctggatcggaaaatcgctaccgatctcgcggattcgagtcagctgttgaaacggtaagctgataaattatttagaatagttcaatcgatgaataaataaatgtgctagtgcgatgctcattaaggtgctcgataaattgcgtaagtcacgaaactctcgtcgacttcgcagttcttgcgattatcgagccaggtttagttatagcgagttatctcgctattccgatcaattagttaattagtataccgggtagaatatcagtaggcctgtggggtgatggaatatttttatcacttataaagatgtagtataatttataaagcaagggattagttcataatttaattaattaactgataagttgtgtaggctaattgtatttaa

SEQ ID NO: 14836 - DNA, 4661 bp, Zea Mays
cacaaagtgaggagcgatggagaaacttggacttgctcgaaacatgccagctgccaagagaaaggattttgggtttgttacatttgatacgcatgataatgctgttgcatgtgctgaagggataagtaactctgaaattggtgaaggtgatcacaaggcaaaagtaagggctagactgtcgcgaccactacagagaccacctagaatgaagcatggattgagaggaaattttagagtcgggcatggtgccccacggggtggccgtttacagtacgctcgtgctcctccacctcgcaggcctccaccacgccttgttcggcctgctggtagtcgcttaccaccaatcaggagccatccattgaaacgacccatatacatcagagatagacgtcctgctatgccaatgctagatagagctaggcgtttacctccttcagggagatcttatgacaggaggcccccagctccagtttacctgaagaaaagtccaaggagagaatacgggaggcgtgatgaacttcctcctccaaggagcagagctatgattgattacagtcctagagttccagttgatagacgtccctctttgagggatgattatttaccccggggatcaggttattcagacctaggtcctcatagtgctccccatctttctgataggcgagcttatgctgatgatagttatggggggaagttcgaccggcctttaccggtctatagggagggtcgtggccatgattatgacaccgtttctggatcaaagcgtccatatgcagatatggatgatgcgcctcggtatcaagaaattggtgttcgtcagtccaaggcacgcttggactatgacattggtggcagcagtgctcgctatggagatacatacaacgagaggcctggacgaccacatgcgggatatagcagtagtcggtctatccctggtcatgattcagcatatggtagcagccgtaatggcatgagttatggaggttctgctagcagtgctgatgctggtggtatgtacccaccgagttacagtggtagctatgggtctcgtggatctgatgccgcaatttgggtagcagcagtggtggctactatggaggtagcggttccggttcatattactaaggtgcaaaatcaaatctcttctgtctttcaccaagcttgtttcactgtgcttaaattatttgcaccgtccctcacctctatcacacatgcacacatcatggtgctattgttggggatgagaaatgtttcccctttgtgtaagatgcgggaagtccagaaccataaaactctaattacacagatttggcatcacctcgtctttgtggaacagatttggcattataggacgttggtgtaggccctgcattttgtggagctccttgatttaagccctacagatctggaaaagaaatcccaagcacccaagtgaggcaatgatttcaaataagacatttcaacgaagccagatcattaagttggttgaagcagtagtcccgaggatgttctggcttgcttatgtaatgtaaggatttgctttatctgatcaagagttatgaacataagagccagatatggtgttttaagtgtttctactggtgttttaagtgtttcgacatgtttacttccagtgtttctataacgttattgagacagaatggagtgtactttgaggtagtttctgcaattcaaggtatttgagattacatctttgatgtgctgccaaagatcaggcttacaaaagaagctttacaagcagtgcttcttgtaaggctaatagtttctgaaaaccttcccttctgtcctctagaggaccaataatcgtcaagacagatagttgattgatcagacttaaattctggacatctgtacaaatggttctatcggttgccaaaagttgagagaaactgcttgtgtggcaaaaatttccccaacctcatttggacttctcccaagtttaggataacagaacttgaagcaaaaggacatttgaaatttgagtatagccttgcagtacgatgactatatagagcacaaggcatcaggtaaatttaacaagcagtgccagtattgaacaccaccctggttccctcatttatgaaattccttgaagtgctttgtggagtatggattaaacagggcagaccctgtacaggtggctccagctttagtggggtctggggaagggacaaacagaggcaagctttctccccgcaaatgtggagaggctgcctcgaattcgtgacctggtgattcagtgagacgactttcaccactgcactgggacgatcacaatctttcaagaaccttgctggaggcataacacactaactgatcaagttccagaaaaagtatcgtaacatagtttgggaccttaggctatctctagcagcttacccatccctatacccatattcaaactccattctgcgaacagtgcagtctacagtgcaaaccgatgtttttggtgatgatataggtgaattgctggacacggtcttagtaaccaggttcctggattgatgggatcgaggaataggaacatggtacatggtgcggtacttgaaaaaagattttaacactacggggacgaggttgttcccacattcccggaacaccccgatttctaagtttgggaccaaaccatagtcacaaagtttccagatcggtagggacgaggaacggggtcaaggaacatggtacactacttgtgagagacttacatggtgggaatggaaatgaccctacatatctgggtcggggacgacgtttctgggtcgagggtctctaccaccatacgtgtttcttgtgaatatggaccaatcatttagctcaatatcgccacacttaggctttaaacccaaaaagggcaggcttgatgtggtggtgagagttgtctcacttgagtcatcatgttggtgaaagcctctagcactgggtctgctatcttaggctttaaacccaccatatgcgtgatatatttcattggtctaatttgtgttgcgtggaccattttcaccaaatgataactttgccaagaatttaccttttatataagttgaagaaacaaggcgtgctgtgtttgtgttttgacagtgactacttatgtatggcatcctgcaaagtagctgaaagatgagtagtaataccaacaccccagctatagaggccgcagagagctgaaacctaagcttaacttttaagtgatggtgtctttcttctgtgagttttaacatggaaatctcatgcattaactttggatctgatcaattgggctagggataataactcggatcctgaggtcagaccgccagaggcaattttgcccttgaatttggtttttgcagatgacctaatgatgccactgggtaggatgaaagatcaatatgtaatttcatgaaaaggctactcagatgacttttgcagtattcagaaacacacttttctgtgattatcgatgtacttgagggccatttgtttgttacttatgtgttatttcttgttggaatttgtcttcaagagggaatttgatgatggaattaggagatctagcagaactgttgattgccaaatgtgcacagaagaaatactatatgcaatggcatcaatgggcttggttactggggggcagtacgtgggaatcagcacctgctggtgctggctgggttggtgctcatttgaaaaacaaggggaaggagattatttttccttgatggggcaaggacggtagatctgaaagcagcatggcgtggaaatatttttcttgaaaacagtaggcacaggattaagtacaagaatactccattagaattttgagttgaagggtcttgaattttttacccaattgctggagcaaactcagggatctaacacggtttagtctaactacttagttaagagtattcaacataaagattctttggaatcacaataagctgacaaatgcatcatttctttatcaatttcaccatctcatctgcatagttccctttgtttttattctgttattcacatggtttttctagtgatgttattatcaaagcagttgacgatgcttacctgtttttccatgctaacgtggcttcgatattatcatgtttttttgagccctttgagaattgtagcccaccagcatgcctctttccaaagtcgtgcgtggagattcaaaccggtagtctagtggttgccgtcaaaagcagccagatttgtgaaatcgtcatgtgtgttgctctctagtttaccgatctgtgggcttgtaaagaacactgtaggcatgaaagcaaccgtatgtacagaaaatataattaactgctcgtatgaaataccatacggagatgtaccgacgtttgtcacgcgcgtctgaaaatctgttcccaattagttcttgtaaagaaacattgcaggcatggaagataccagaagtgcaaaaatataatcaagtgcttgtatgaacattgtagtcttgaagttccatcttccattggccacgccgtgtccggtgcccgtgcagctctgtgcgtgttgccttggttctacactgcctcatggtcattgaaatcccgagatggccatagccgaccacgctgttgccctacgtattggctcgatgctcacgcgatgatggtgcgcatttaccccgtcgcacacttgagaag

SEQ ID NO: 14837 - DNA, 4695 bp, Zea Mays
cacaaagtgaggagcgatggagaaacttggacttgctcgaaacatgccagctgccaagagaaaggattttgggtttgttacatttgatacgcatgataatgctgttgcatgtgctgaagggataagtaactctgaaattggtgaaggtgatcacaaggcaaaagtaagggctagactgtcgcgaccactacagagaccacctagaatgaagcatggattgagaggaaattttagagtcgggcatggtgccccacggggtggccgtttacagtacgctcgtgctcctccacctcgcaggcctccaccacgccttgttcggcctgctggtagtcgcttaccaccaatcaggagccatccattgaaacgacccatatacatcagagatagacgtcctgctatgccaatgctagatagagctaggcgtttacctccttcagggagatcttatgacaggaggcccccagctccagtttacctgaagaaaagtccaaggagagaatacgggaggcgtgatgaacttcctcctccaaggagcagagctatgattgattacagtcctagagttccagttgatagacgtccctctttgagggatgattatttaccccggggatcaggttattcagacctaggtcctcatagtgctccccatctttctgataggcgagcttatgctgatgatagttatggggggaagttcgaccggcctttaccggtctatagggagggtcgtggccatgattatgacaccgtttctggatcaaagcgtccatatgcagatatggatgatgcgcctcggtatcaagaaattggtgttcgtcagtccaaggcacgcttggactatgacattggtggcagcagtgctcgctatggagatacatacaacgagaggcctggacgaccacatgcgggatatagcagtagtcggtctatccctggtcatgattcagcatatggtagcagccgtaatggcatgagttatggaggttctgctagcagtgctgatgctggtggtatgtacccaccgagttacagtggtagctatgggtctcgtggatctgatgttggtgggagttcatattcttcgctttactcaggccgcaatttgggtagcagcagtggtggctactatggaggtagcggttccggttcatattactaaggtgcaaaatcaaatctcttctgtctttcaccaagcttgtttcactgtgcttaaattatttgcaccgtccctcacctctatcacacatgcacacatcatggtgctattgttggggatgagaaatgtttcccctttgtgtaagatgcgggaagtccagaaccataaaactctaattacacagatttggcatcacctcgtctttgtggaacagatttggcattataggacgttggtgtaggccctgcattttgtggagctccttgatttaagccctacagatctggaaaagaaatcccaagcacccaagtgaggcaatgatttcaaataagacatttcaacgaagccagatcattaagttggttgaagcagtagtcccgaggatgttctggcttgcttatgtaatgtaaggatttgctttatctgatcaagagttatgaacataagagccagatatggtgttttaagtgtttctactggtgttttaagtgtttcgacatgtttacttccagtgtttctataacgttattgagacagaatggagtgtactttgaggtagtttctgcaattcaaggtatttgagattacatctttgatgtgctgccaaagatcaggcttacaaaagaagctttacaagcagtgcttcttgtaaggctaatagtttctgaaaaccttcccttctgtcctctagaggaccaataatcgtcaagacagatagttgattgatcagacttaaattctggacatctgtacaaatggttctatcggttgccaaaagttgagagaaactgcttgtgtggcaaaaatttccccaacctcatttggacttctcccaagtttaggataacagaacttgaagcaaaaggacatttgaaatttgagtatagccttgcagtacgatgactatatagagcacaaggcatcaggtaaatttaacaagcagtgccagtattgaacaccaccctggttccctcatttatgaaattccttgaagtgctttgtggagtatggattaaacagggcagaccctgtacaggtggctccagctttagtggggtctggggaagggacaaacagaggcaagctttctccccgcaaatgtggagaggctgcctcgaattcgtgacctggtgattcagtgagacgactttcaccactgcactgggacgatcacaatctttcaagaaccttgctggaggcataacacactaactgatcaagttccagaaaaagtatcgtaacatagtttgggaccttaggctatctctagcagcttacccatccctatacccatattcaaactccattctgcgaacagtgcagtctacagtgcaaaccgatgtttttggtgatgatataggtgaattgctggacacggtcttagtaaccaggttcctggattgatgggatcgaggaataggaacatggtacatggtgcggtacttgaaaaaagattttaacactacggggacgaggttgttcccacattcccggaacaccccgatttctaagtttgggaccaaaccatagtcacaaagtttccagatcggtagggacgaggaacggggtcaaggaacatggtacactacttgtgagagacttacatggtgggaatggaaatgaccctacatatctgggtcggggacgacgtttctgggtcgagggtctctaccaccatacgtgtttcttgtgaatatggaccaatcatttagctcaatatcgccacacttaggctttaaacccaaaaagggcaggcttgatgtggtggtgagagttgtctcacttgagtcatcatgttggtgaaagcctctagcactgggtctgctatcttaggctttaaacccaccatatgcgtgatatatttcattggtctaatttgtgttgcgtggaccattttcaccaaatgataactttgccaagaatttaccttttatataagttgaagaaacaaggcgtgctgtgtttgtgttttgacagtgactacttatgtatggcatcctgcaaagtagctgaaagatgagtagtaataccaacaccccagctatagaggccgcagagagctgaaacctaagcttaacttttaagtgatggtgtctttcttctgtgagttttaacatggaaatctcatgcattaactttggatctgatcaattgggctagggataataactcggatcctgaggtcagaccgccagaggcaattttgcccttgaatttggtttttgcagatgacctaatgatgccactgggtaggatgaaagatcaatatgtaatttcatgaaaaggctactcagatgacttttgcagtattcagaaacacacttttctgtgattatcgatgtacttgagggccatttgtttgttacttatgtgttatttcttgttggaatttgtcttcaagagggaatttgatgatggaattaggagatctagcagaactgttgattgccaaatgtgcacagaagaaatactatatgcaatggcatcaatgggcttggttactggggggcagtacgtgggaatcagcacctgctggtgctggctgggttggtgctcatttgaaaaacaaggggaaggagattatttttccttgatggggcaaggacggtagatctgaaagcagcatggcgtggaaatatttttcttgaaaacagtaggcacaggattaagtacaagaatactccattagaattttgagttgaagggtcttgaattttttacccaattgctggagcaaactcagggatctaacacggtttagtctaactacttagttaagagtattcaacataaagattctttggaatcacaataagctgacaaatgcatcatttctttatcaatttcaccatctcatctgcatagttccctttgtttttattctgttattcacatggtttttctagtgatgttattatcaaagcagttgacgatgcttacctgtttttccatgctaacgtggcttcgatattatcatgtttttttgagccctttgagaattgtagcccaccagcatgcctctttccaaagtcgtgcgtggagattcaaaccggtagtctagtggttgccgtcaaaagcagccagatttgtgaaatcgtcatgtgtgttgctctctagtttaccgatctgtgggcttgtaaagaacactgtaggcatgaaagcaaccgtatgtacagaaaatataattaactgctcgtatgaaataccatacggagatgtaccgacgtttgtcacgcgcgtctgaaaatctgttcccaattagttcttgtaaagaaacattgcaggcatggaagataccagaagtgcaaaaatataatcaagtgcttgtatgaacattgtagtcttgaagttccatcttccattggccacgccgtgtccggtgcccgtgcagctctgtgcgtgttgccttggttctacactgcctcatggtcattgaaatcccgagatggccatagccgaccacgctgttgccctacgtattggctcgatgctcacgcgatgatggtgcgcatttaccccgtcgcacacttgagaag

SEQ ID NO: 14838 - DNA, 2539 bp, Zea Mays
cacaaagtgaggagcgatggagaaacttggacttgctcgaaacatgccagctgccaagagaaaggattttgggtttgttacatttgatacgcatgataatgctgttgcatgtgctgaagggataagtaactctgaaattggtgaaggtgatcacaaggcaaaagtaagggctagactgtcgcgaccactacagagaccacctagaatgaagcatggattgagaggaaattttagagtcgggcatggtgccccacggggtggccgtttacagtacgctcgtgctcctccacctcgcaggcctccaccacgccttgttcggcctgctggtagtcgcttaccaccaatcaggagccatccattgaaacgacccatatacatcagagatagacgtcctgctatgccaatgctagatagagctaggcgtttacctccttcagggagatcttatgacaggaggcccccagctccagtttacctgaagaaaagtccaaggagagaatacgggaggcgtgatgaacttcctcctccaaggagcagagctatgattgattacagtcctagagttccagttgatagacgtccctctttgagggatgattatttaccccggggatcaggttattcagacctaggtcctcatagtgctccccatctttctgataggcgagcttatgctgatgatagttatggggggaagttcgaccggcctttaccggtctatagggagggtcgtggccatgattatgacaccgtttctggatcaaagcgtccatatgcagatatggatgatgcgcctcggtatcaagaaattggtgttcgtcagtccaaggcacgcttggactatgacattggtggcagcagtgctcgctatggagatacatacaacgagaggcctggacgaccacatgcgggatatagcagtagtcggtctatccctggtcatgattcagcatatggtagcagccgtaatggcatgagttatggaggttctgctagcagtgctgatgctggtggtatgtacccaccgagttacagtggtagctatgggtctcgtggatctgatgttggtgggagttcatattcttcgctttactcaggccgcaatttgggtagcagcagtggtggctactatggaggtagcggttccggttcatattactaagggataataactcggatcctgaggtcagaccgccagaggcaattttgcccttgaatttggtttttgcagatgacctaatgatgccactgggtaggatgaaagatcaatatgtaatttcatgaaaaggctactcagatgacttttgcagtattcagaaacacacttttctgtgattatcgatgtacttgagggccatttgtttgttacttatgtgttatttcttgttggaatttgtcttcaagagggaatttgatgatggaattaggagatctagcagaactgttgattgccaaatgtgcacagaagaaatactatatgcaatggcatcaatgggcttggttactggggggcagtacgtgggaatcagcacctgctggtgctggctgggttggtgctcatttgaaaaacaaggggaaggagattatttttccttgatggggcaaggacggtagatctgaaagcagcatggcgtggaaatatttttcttgaaaacagtaggcacaggattaagtacaagaatactccattagaattttgagttgaagggtcttgaattttttacccaattgctggagcaaactcagggatctaacacggtttagtctaactacttagttaagagtattcaacataaagattctttggaatcacaataagctgacaaatgcatcatttctttatcaatttcaccatctcatctgcatagttccctttgtttttattctgttattcacatggtttttctagtgatgttattatcaaagcagttgacgatgcttacctgtttttccatgctaacgtggcttcgatattatcatgtttttttgagccctttgagaattgtagcccaccagcatgcctctttccaaagtcgtgcgtggagattcaaaccggtagtctagtggttgccgtcaaaagcagccagatttgtgaaatcgtcatgtgtgttgctctctagtttaccgatctgtgggcttgtaaagaacactgtaggcatgaaagcaaccgtatgtacagaaaatataattaactgctcgtatgaaataccatacggagatgtaccgacgtttgtcacgcgcgtctgaaaatctgttcccaattagttcttgtaaagaaacattgcaggcatggaagataccagaagtgcaaaaatataatcaagtgcttgtatgaacattgtagtcttgaagttccatcttccattggccacgccgtgtccggtgcccgtgcagctctgtgcgtgttgccttggttctacactgcctcatggtcattgaaatcccgagatggccatagccgaccacgctgttgccctacgtattggctcgatgctcacgcgatgatggtgcgcatttaccccgtcgcacacttgagaag

SEQ ID NO: 14839 - DNA, 4485 bp, Zea Mays
cacaaagtgaggagcgatggagaaacttggacttgctcgaaacatgccagctgccaagagaaaggattttgggtttgttacatttgatacgcatgataatgctgttgcatgtgctgaagggataagtaactctgaaattggtgaaggtgatcacaaggcaaaagtaagggctagactgtcgcgaccactacagagaccacctagaatgaagcatggattgagaggaaattttagagtcgggcatggtgccccacggggtggccgtttacagtacgctcgtgctcctccacctcgcaggcctccaccacgccttgttcggcctgctggtagtcgcttaccaccaatcaggagccatccattgaaacgacccatatacatcagagatagacgtcctgctatgccaatgctagatagagctaggcgtttacctccttcagggagatcttatgacaggaggcccccagctccagtttacctgaagaaaagtccaaggagagaatacgggaggcgtgatgaacttcctcctccaaggagcagagctatgattgattacagtcctagagttccagttgatagacgtccctctttgagggatgattatttaccccggggatcaggttattcagacctaggtcctcatagtgctccccatctttctgataggcgagcttatgctgatgatagttatggggggaagttcgaccggcctttaccggtctatagggagggtcgtggccatgattatgacaccgtttctggatcaaagcgtccatatgcagatatggatgatgcgcctcggtatcaagaaattggtgttcgtcagtccaaggcacgcttggactatgacattggtggcagcagtgctcgctatggagatacatacaacgagaggcctggacgaccacatgcgggatatagcagtagtcggtctatccctggtcatgattcagcatatggtagcagccgtaatggcatgagttatggaggttctgctagcagtgctgatgctggtggtatgtacccaccgagttacagtggtagctatgggtctcgtggatctgatgttggtgggagttcatattcttcgctttactcaggccgcaatttgggtagcagcagtggtggctactatggaggtagcggttccggttcatattactaagatttggcattataggacgttggtgtaggccctgcattttgtggagctccttgatttaagccctacagatctggaaaagaaatcccaagcacccaagtgaggcaatgatttcaaataagacatttcaacgaagccagatcattaagttggttgaagcagtagtcccgaggatgttctggcttgcttatgtaatgtaaggatttgctttatctgatcaagagttatgaacataagagccagatatggtgttttaagtgtttctactggtgttttaagtgtttcgacatgtttacttccagtgtttctataacgttattgagacagaatggagtgtactttgaggtagtttctgcaattcaaggtatttgagattacatctttgatgtgctgccaaagatcaggcttacaaaagaagctttacaagcagtgcttcttgtaaggctaatagtttctgaaaaccttcccttctgtcctctagaggaccaataatcgtcaagacagatagttgattgatcagacttaaattctggacatctgtacaaatggttctatcggttgccaaaagttgagagaaactgcttgtgtggcaaaaatttccccaacctcatttggacttctcccaagtttaggataacagaacttgaagcaaaaggacatttgaaatttgagtatagccttgcagtacgatgactatatagagcacaaggcatcaggtaaatttaacaagcagtgccagtattgaacaccaccctggttccctcatttatgaaattccttgaagtgctttgtggagtatggattaaacagggcagaccctgtacaggtggctccagctttagtggggtctggggaagggacaaacagaggcaagctttctccccgcaaatgtggagaggctgcctcgaattcgtgacctggtgattcagtgagacgactttcaccactgcactgggacgatcacaatctttcaagaaccttgctggaggcataacacactaactgatcaagttccagaaaaagtatcgtaacatagtttgggaccttaggctatctctagcagcttacccatccctatacccatattcaaactccattctgcgaacagtgcagtctacagtgcaaaccgatgtttttggtgatgatataggtgaattgctggacacggtcttagtaaccaggttcctggattgatgggatcgaggaataggaacatggtacatggtgcggtacttgaaaaaagattttaacactacggggacgaggttgttcccacattcccggaacaccccgatttctaagtttgggaccaaaccatagtcacaaagtttccagatcggtagggacgaggaacggggtcaaggaacatggtacactacttgtgagagacttacatggtgggaatggaaatgaccctacatatctgggtcggggacgacgtttctgggtcgagggtctctaccaccatacgtgtttcttgtgaatatggaccaatcatttagctcaatatcgccacacttaggctttaaacccaaaaagggcaggcttgatgtggtggtgagagttgtctcacttgagtcatcatgttggtgaaagcctctagcactgggtctgctatcttaggctttaaacccaccatatgcgtgatatatttcattggtctaatttgtgttgcgtggaccattttcaccaaatgataactttgccaagaatttaccttttatataagttgaagaaacaaggcgtgctgtgtttgtgttttgacagtgactacttatgtatggcatcctgcaaagtagctgaaagatgagtagtaataccaacaccccagctatagaggccgcagagagctgaaacctaagcttaacttttaagtgatggtgtctttcttctgtgagttttaacatggaaatctcatgcattaactttggatctgatcaattgggctagggataataactcggatcctgaggtcagaccgccagaggcaattttgcccttgaatttggtttttgcagatgacctaatgatgccactgggtaggatgaaagatcaatatgtaatttcatgaaaaggctactcagatgacttttgcagtattcagaaacacacttttctgtgattatcgatgtacttgagggccatttgtttgttacttatgtgttatttcttgttggaatttgtcttcaagagggaatttgatgatggaattaggagatctagcagaactgttgattgccaaatgtgcacagaagaaatactatatgcaatggcatcaatgggcttggttactggggggcagtacgtgggaatcagcacctgctggtgctggctgggttggtgctcatttgaaaaacaaggggaaggagattatttttccttgatggggcaaggacggtagatctgaaagcagcatggcgtggaaatatttttcttgaaaacagtaggcacaggattaagtacaagaatactccattagaattttgagttgaagggtcttgaattttttacccaattgctggagcaaactcagggatctaacacggtttagtctaactacttagttaagagtattcaacataaagattctttggaatcacaataagctgacaaatgcatcatttctttatcaatttcaccatctcatctgcatagttccctttgtttttattctgttattcacatggtttttctagtgatgttattatcaaagcagttgacgatgcttacctgtttttccatgctaacgtggcttcgatattatcatgtttttttgagccctttgagaattgtagcccaccagcatgcctctttccaaagtcgtgcgtggagattcaaaccggtagtctagtggttgccgtcaaaagcagccagatttgtgaaatcgtcatgtgtgttgctctctagtttaccgatctgtgggcttgtaaagaacactgtaggcatgaaagcaaccgtatgtacagaaaatataattaactgctcgtatgaaataccatacggagatgtaccgacgtttgtcacgcgcgtctgaaaatctgttcccaattagttcttgtaaagaaacattgcaggcatggaagataccagaagtgcaaaaatataatcaagtgcttgtatgaacattgtagtcttgaagttccatcttccattggccacgccgtgtccggtgcccgtgcagctctgtgcgtgttgccttggttctacactgcctcatggtcattgaaatcccgagatggccatagccgaccacgctgttgccctacgtattggctcgatgctcacgcgatgatggtgcgcatttaccccgtcgcacacttgagaag

SEQ ID NO: 14840 - DNA, 4451 bp, Zea Mays
cacaaagtgaggagcgatggagaaacttggacttgctcgaaacatgccagctgccaagagaaaggattttgggtttgttacatttgatacgcatgataatgctgttgcatgtgctgaagggataagtaactctgaaattggtgaaggtgatcacaaggcaaaagtaagggctagactgtcgcgaccactacagagaccacctagaatgaagcatggattgagaggaaattttagagtcgggcatggtgccccacggggtggccgtttacagtacgctcgtgctcctccacctcgcaggcctccaccacgccttgttcggcctgctggtagtcgcttaccaccaatcaggagccatccattgaaacgacccatatacatcagagatagacgtcctgctatgccaatgctagatagagctaggcgtttacctccttcagggagatcttatgacaggaggcccccagctccagtttacctgaagaaaagtccaaggagagaatacgggaggcgtgatgaacttcctcctccaaggagcagagctatgattgattacagtcctagagttccagttgatagacgtccctctttgagggatgattatttaccccggggatcaggttattcagacctaggtcctcatagtgctccccatctttctgataggcgagcttatgctgatgatagttatggggggaagttcgaccggcctttaccggtctatagggagggtcgtggccatgattatgacaccgtttctggatcaaagcgtccatatgcagatatggatgatgcgcctcggtatcaagaaattggtgttcgtcagtccaaggcacgcttggactatgacattggtggcagcagtgctcgctatggagatacatacaacgagaggcctggacgaccacatgcgggatatagcagtagtcggtctatccctggtcatgattcagcatatggtagcagccgtaatggcatgagttatggaggttctgctagcagtgctgatgctggtggtatgtacccaccgagttacagtggtagctatgggtctcgtggatctgatgccgcaatttgggtagcagcagtggtggctactatggaggtagcggttccggttcatattactaagatttggcattataggacgttggtgtaggccctgcattttgtggagctccttgatttaagccctacagatctggaaaagaaatcccaagcacccaagtgaggcaatgatttcaaataagacatttcaacgaagccagatcattaagttggttgaagcagtagtcccgaggatgttctggcttgcttatgtaatgtaaggatttgctttatctgatcaagagttatgaacataagagccagatatggtgttttaagtgtttctactggtgttttaagtgtttcgacatgtttacttccagtgtttctataacgttattgagacagaatggagtgtactttgaggtagtttctgcaattcaaggtatttgagattacatctttgatgtgctgccaaagatcaggcttacaaaagaagctttacaagcagtgcttcttgtaaggctaatagtttctgaaaaccttcccttctgtcctctagaggaccaataatcgtcaagacagatagttgattgatcagacttaaattctggacatctgtacaaatggttctatcggttgccaaaagttgagagaaactgcttgtgtggcaaaaatttccccaacctcatttggacttctcccaagtttaggataacagaacttgaagcaaaaggacatttgaaatttgagtatagccttgcagtacgatgactatatagagcacaaggcatcaggtaaatttaacaagcagtgccagtattgaacaccaccctggttccctcatttatgaaattccttgaagtgctttgtggagtatggattaaacagggcagaccctgtacaggtggctccagctttagtggggtctggggaagggacaaacagaggcaagctttctccccgcaaatgtggagaggctgcctcgaattcgtgacctggtgattcagtgagacgactttcaccactgcactgggacgatcacaatctttcaagaaccttgctggaggcataacacactaactgatcaagttccagaaaaagtatcgtaacatagtttgggaccttaggctatctctagcagcttacccatccctatacccatattcaaactccattctgcgaacagtgcagtctacagtgcaaaccgatgtttttggtgatgatataggtgaattgctggacacggtcttagtaaccaggttcctggattgatgggatcgaggaataggaacatggtacatggtgcggtacttgaaaaaagattttaacactacggggacgaggttgttcccacattcccggaacaccccgatttctaagtttgggaccaaaccatagtcacaaagtttccagatcggtagggacgaggaacggggtcaaggaacatggtacactacttgtgagagacttacatggtgggaatggaaatgaccctacatatctgggtcggggacgacgtttctgggtcgagggtctctaccaccatacgtgtttcttgtgaatatggaccaatcatttagctcaatatcgccacacttaggctttaaacccaaaaagggcaggcttgatgtggtggtgagagttgtctcacttgagtcatcatgttggtgaaagcctctagcactgggtctgctatcttaggctttaaacccaccatatgcgtgatatatttcattggtctaatttgtgttgcgtggaccattttcaccaaatgataactttgccaagaatttaccttttatataagttgaagaaacaaggcgtgctgtgtttgtgttttgacagtgactacttatgtatggcatcctgcaaagtagctgaaagatgagtagtaataccaacaccccagctatagaggccgcagagagctgaaacctaagcttaacttttaagtgatggtgtctttcttctgtgagttttaacatggaaatctcatgcattaactttggatctgatcaattgggctagggataataactcggatcctgaggtcagaccgccagaggcaattttgcccttgaatttggtttttgcagatgacctaatgatgccactgggtaggatgaaagatcaatatgtaatttcatgaaaaggctactcagatgacttttgcagtattcagaaacacacttttctgtgattatcgatgtacttgagggccatttgtttgttacttatgtgttatttcttgttggaatttgtcttcaagagggaatttgatgatggaattaggagatctagcagaactgttgattgccaaatgtgcacagaagaaatactatatgcaatggcatcaatgggcttggttactggggggcagtacgtgggaatcagcacctgctggtgctggctgggttggtgctcatttgaaaaacaaggggaaggagattatttttccttgatggggcaaggacggtagatctgaaagcagcatggcgtggaaatatttttcttgaaaacagtaggcacaggattaagtacaagaatactccattagaattttgagttgaagggtcttgaattttttacccaattgctggagcaaactcagggatctaacacggtttagtctaactacttagttaagagtattcaacataaagattctttggaatcacaataagctgacaaatgcatcatttctttatcaatttcaccatctcatctgcatagttccctttgtttttattctgttattcacatggtttttctagtgatgttattatcaaagcagttgacgatgcttacctgtttttccatgctaacgtggcttcgatattatcatgtttttttgagccctttgagaattgtagcccaccagcatgcctctttccaaagtcgtgcgtggagattcaaaccggtagtctagtggttgccgtcaaaagcagccagatttgtgaaatcgtcatgtgtgttgctctctagtttaccgatctgtgggcttgtaaagaacactgtaggcatgaaagcaaccgtatgtacagaaaatataattaactgctcgtatgaaataccatacggagatgtaccgacgtttgtcacgcgcgtctgaaaatctgttcccaattagttcttgtaaagaaacattgcaggcatggaagataccagaagtgcaaaaatataatcaagtgcttgtatgaacattgtagtcttgaagttccatcttccattggccacgccgtgtccggtgcccgtgcagctctgtgcgtgttgccttggttctacactgcctcatggtcattgaaatcccgagatggccatagccgaccacgctgttgccctacgtattggctcgatgctcacgcgatgatggtgcgcatttaccccgtcgcacacttgagaag

SEQ ID NO: 14841 - DNA, 2722 bp, Zea Mays
cacaaagtgaggagcgatggagaaacttggacttgctcgaaacatgccagctgccaagagaaaggattttgggtttgttacatttgatacgcatgataatgctgttgcatgtgctgaagggataagtaactctgaaattggtgaaggtgatcacaaggcaaaagtaagggctagactgtcgcgaccactacagagaccacctagaatgaagcatggattgagaggaaattttagagtcgggcatggtgccccacggggtggccgtttacagtacgctcgtgctcctccacctcgcaggcctccaccacgccttgttcggcctgctggtagtcgcttaccaccaatcaggagccatccattgaaacgacccatatacatcagagatagacgtcctgctatgccaatgctagatagagctaggcgtttacctccttcagggagatcttatgacaggaggcccccagctccagtttacctgaagaaaagtccaaggagagaatacgggaggcgtgatgaacttcctcctccaaggagcagagctatgattgattacagtcctagagttccagttgatagacgtccctctttgagggatgattatttaccccggggatcaggttattcagacctaggtcctcatagtgctccccatctttctgataggcgagcttatgctgatgatagttatggggggaagttcgaccggcctttaccggtctatagggagggtcgtggccatgattatgacaccgtttctggatcaaagcgtccatatgcagatatggatgatgcgcctcggtatcaagaaattggtgttcgtcagtccaaggcacgcttggactatgacattggtggcagcagtgctcgctatggagatacatacaacgagaggcctggacgaccacatgcgggatatagcagtagtcggtctatccctggtcatgattcagcatatggtagcagccgtaatggcatgagttatggaggttctgctagcagtgctgatgctggtggtatgtacccaccgagttacagtggtagctatgggtctcgtggatctgatgttggtgggagttcatattcttcgctttactcaggccgcaatttgggtagcagcagtggtggctactatggaggtagcggttccggttcatattactaagtgactacttatgtatggcatcctgcaaagtagctgaaagatgagtagtaataccaacaccccagctatagaggccgcagagagctgaaacctaagcttaacttttaagtgatggtgtctttcttctgtgagttttaacatggaaatctcatgcattaactttggatctgatcaattgggctagggataataactcggatcctgaggtcagaccgccagaggcaattttgcccttgaatttggtttttgcagatgacctaatgatgccactgggtaggatgaaagatcaatatgtaatttcatgaaaaggctactcagatgacttttgcagtattcagaaacacacttttctgtgattatcgatgtacttgagggccatttgtttgttacttatgtgttatttcttgttggaatttgtcttcaagagggaatttgatgatggaattaggagatctagcagaactgttgattgccaaatgtgcacagaagaaatactatatgcaatggcatcaatgggcttggttactggggggcagtacgtgggaatcagcacctgctggtgctggctgggttggtgctcatttgaaaaacaaggggaaggagattatttttccttgatggggcaaggacggtagatctgaaagcagcatggcgtggaaatatttttcttgaaaacagtaggcacaggattaagtacaagaatactccattagaattttgagttgaagggtcttgaattttttacccaattgctggagcaaactcagggatctaacacggtttagtctaactacttagttaagagtattcaacataaagattctttggaatcacaataagctgacaaatgcatcatttctttatcaatttcaccatctcatctgcatagttccctttgtttttattctgttattcacatggtttttctagtgatgttattatcaaagcagttgacgatgcttacctgtttttccatgctaacgtggcttcgatattatcatgtttttttgagccctttgagaattgtagcccaccagcatgcctctttccaaagtcgtgcgtggagattcaaaccggtagtctagtggttgccgtcaaaagcagccagatttgtgaaatcgtcatgtgtgttgctctctagtttaccgatctgtgggcttgtaaagaacactgtaggcatgaaagcaaccgtatgtacagaaaatataattaactgctcgtatgaaataccatacggagatgtaccgacgtttgtcacgcgcgtctgaaaatctgttcccaattagttcttgtaaagaaacattgcaggcatggaagataccagaagtgcaaaaatataatcaagtgcttgtatgaacattgtagtcttgaagttccatcttccattggccacgccgtgtccggtgcccgtgcagctctgtgcgtgttgccttggttctacactgcctcatggtcattgaaatcccgagatggccatagccgaccacgctgttgccctacgtattggctcgatgctcacgcgatgatggtgcgcatttaccccgtcgcacacttgagaag

SEQ ID NO: 14842 - DNA, 4479 bp, Zea Mays
cacaaagtgaggagcgatggagaaacttggacttgctcgaaacatgccagctgccaagagaaaggattttgggtttgttacatttgatacgcatgataatgctgttgcatgtgctgaagggataagtaactctgaaattggtgaaggtgatcacaaggcaaaagtaagggctagactgtcgcgaccactacagagaccacctagaatgaagcatggattgagaggaaattttagagtcgggcatggtgccccacggggtggccgtttacagtacgctcgtgctcctccacctcgcaggcctccaccacgccttgttcggcctgctggtagtcgcttaccaccaatcaggagccatccattgaaacgacccatatacatcagagatagacgtcctgctatgccaatgctagatagagctaggcgtttacctccttcagggagatcttatgacaggaggcccccagtttacctgaagaaaagtccaaggagagaatacgggaggcgtgatgaacttcctcctccaaggagcagagctatgattgattacagtcctagagttccagttgatagacgtccctctttgagggatgattatttaccccggggatcaggttattcagacctaggtcctcatagtgctccccatctttctgataggcgagcttatgctgatgatagttatggggggaagttcgaccggcctttaccggtctatagggagggtcgtggccatgattatgacaccgtttctggatcaaagcgtccatatgcagatatggatgatgcgcctcggtatcaagaaattggtgttcgtcagtccaaggcacgcttggactatgacattggtggcagcagtgctcgctatggagatacatacaacgagaggcctggacgaccacatgcgggatatagcagtagtcggtctatccctggtcatgattcagcatatggtagcagccgtaatggcatgagttatggaggttctgctagcagtgctgatgctggtggtatgtacccaccgagttacagtggtagctatgggtctcgtggatctgatgttggtgggagttcatattcttcgctttactcaggccgcaatttgggtagcagcagtggtggctactatggaggtagcggttccggttcatattactaagatttggcattataggacgttggtgtaggccctgcattttgtggagctccttgatttaagccctacagatctggaaaagaaatcccaagcacccaagtgaggcaatgatttcaaataagacatttcaacgaagccagatcattaagttggttgaagcagtagtcccgaggatgttctggcttgcttatgtaatgtaaggatttgctttatctgatcaagagttatgaacataagagccagatatggtgttttaagtgtttctactggtgttttaagtgtttcgacatgtttacttccagtgtttctataacgttattgagacagaatggagtgtactttgaggtagtttctgcaattcaaggtatttgagattacatctttgatgtgctgccaaagatcaggcttacaaaagaagctttacaagcagtgcttcttgtaaggctaatagtttctgaaaaccttcccttctgtcctctagaggaccaataatcgtcaagacagatagttgattgatcagacttaaattctggacatctgtacaaatggttctatcggttgccaaaagttgagagaaactgcttgtgtggcaaaaatttccccaacctcatttggacttctcccaagtttaggataacagaacttgaagcaaaaggacatttgaaatttgagtatagccttgcagtacgatgactatatagagcacaaggcatcaggtaaatttaacaagcagtgccagtattgaacaccaccctggttccctcatttatgaaattccttgaagtgctttgtggagtatggattaaacagggcagaccctgtacaggtggctccagctttagtggggtctggggaagggacaaacagaggcaagctttctccccgcaaatgtggagaggctgcctcgaattcgtgacctggtgattcagtgagacgactttcaccactgcactgggacgatcacaatctttcaagaaccttgctggaggcataacacactaactgatcaagttccagaaaaagtatcgtaacatagtttgggaccttaggctatctctagcagcttacccatccctatacccatattcaaactccattctgcgaacagtgcagtctacagtgcaaaccgatgtttttggtgatgatataggtgaattgctggacacggtcttagtaaccaggttcctggattgatgggatcgaggaataggaacatggtacatggtgcggtacttgaaaaaagattttaacactacggggacgaggttgttcccacattcccggaacaccccgatttctaagtttgggaccaaaccatagtcacaaagtttccagatcggtagggacgaggaacggggtcaaggaacatggtacactacttgtgagagacttacatggtgggaatggaaatgaccctacatatctgggtcggggacgacgtttctgggtcgagggtctctaccaccatacgtgtttcttgtgaatatggaccaatcatttagctcaatatcgccacacttaggctttaaacccaaaaagggcaggcttgatgtggtggtgagagttgtctcacttgagtcatcatgttggtgaaagcctctagcactgggtctgctatcttaggctttaaacccaccatatgcgtgatatatttcattggtctaatttgtgttgcgtggaccattttcaccaaatgataactttgccaagaatttaccttttatataagttgaagaaacaaggcgtgctgtgtttgtgttttgacagtgactacttatgtatggcatcctgcaaagtagctgaaagatgagtagtaataccaacaccccagctatagaggccgcagagagctgaaacctaagcttaacttttaagtgatggtgtctttcttctgtgagttttaacatggaaatctcatgcattaactttggatctgatcaattgggctagggataataactcggatcctgaggtcagaccgccagaggcaattttgcccttgaatttggtttttgcagatgacctaatgatgccactgggtaggatgaaagatcaatatgtaatttcatgaaaaggctactcagatgacttttgcagtattcagaaacacacttttctgtgattatcgatgtacttgagggccatttgtttgttacttatgtgttatttcttgttggaatttgtcttcaagagggaatttgatgatggaattaggagatctagcagaactgttgattgccaaatgtgcacagaagaaatactatatgcaatggcatcaatgggcttggttactggggggcagtacgtgggaatcagcacctgctggtgctggctgggttggtgctcatttgaaaaacaaggggaaggagattatttttccttgatggggcaaggacggtagatctgaaagcagcatggcgtggaaatatttttcttgaaaacagtaggcacaggattaagtacaagaatactccattagaattttgagttgaagggtcttgaattttttacccaattgctggagcaaactcagggatctaacacggtttagtctaactacttagttaagagtattcaacataaagattctttggaatcacaataagctgacaaatgcatcatttctttatcaatttcaccatctcatctgcatagttccctttgtttttattctgttattcacatggtttttctagtgatgttattatcaaagcagttgacgatgcttacctgtttttccatgctaacgtggcttcgatattatcatgtttttttgagccctttgagaattgtagcccaccagcatgcctctttccaaagtcgtgcgtggagattcaaaccggtagtctagtggttgccgtcaaaagcagccagatttgtgaaatcgtcatgtgtgttgctctctagtttaccgatctgtgggcttgtaaagaacactgtaggcatgaaagcaaccgtatgtacagaaaatataattaactgctcgtatgaaataccatacggagatgtaccgacgtttgtcacgcgcgtctgaaaatctgttcccaattagttcttgtaaagaaacattgcaggcatggaagataccagaagtgcaaaaatataatcaagtgcttgtatgaacattgtagtcttgaagttccatcttccattggccacgccgtgtccggtgcccgtgcagctctgtgcgtgttgccttggttctacactgcctcatggtcattgaaatcccgagatggccatagccgaccacgctgttgccctacgtattggctcgatgctcacgcgatgatggtgcgcatttaccccgtcgcacacttgagaag

SEQ ID NO: 14843 - DNA, 2706 bp, Zea Mays
gtccaggtcgcacgagccgcatgccgccgtgcgcggccaatcgcagacgtgacgaccaccgttcacccaccgtccccgctaggccgctacagaggccaaattccatttcggcccccgaaaccaaaacattattaccaagaagaggacgcaagcgactattgaagtccagtgtccacggcccacgggggcggcccacccgtgatccgacggccgtcgcccccgctcccgacgcatcgtagccgcccagcagccgagaaggaggacggaaggccaccgcgcaattttacgagtcgtcgcacgccccgcgccccgcgcgcggggtgtcgggcaaggtgcccccacgcgcggcggttggcgccgccgtcgtccaccgccgcccgcgtgcgcccaccgccacctgttaccgcctaaggggaacgcctccgttataacccacggcaccatccatgccgtcctccaccaccgcttcaccatccccgccaggcccaccaccaccatggcctctccttcccccgcccgcgcctccggccggcgcgtgccgcccccgtgctggacgaccgacgagaccctcgcgctcgcgcgggcctacaccgcgcgccgcctcgccgtcggccgtgagcacctgacctccgctgactgggccgccgtcgccgcggccgctccgtccaagacggccaggcagtgccgccacaaggtcgagaagctccgccgacgcctccggtccaaccgccgccgcccgtgcccgctcctcgacgccatcgacctcctcgacgtcccttccccgcccttcttctccaagtcccagtcccgatccacgtcccggtcctcgtcgccgccgccgccggcggcggcgatctcttcgccgtctcccccttcccctcccgcatccccgcccagaaagaggcggcgggacgatgccggggacgaggacggtgtgagcgatgtggtgggggctctgagggccatcggagagggtttcctgcgagcggaggagaggaggatggaggccgcccgggagacgcagaggatgcggatggagatggcgcttcggcaccttgatgcacagaggaggctcatggacgcgcttgtcggccgcatcgtcgacgccttggactgaagtggtgtcacaaagatgtctcatcgaggtttcttgcttgtcctcgttgcatgctagcttgcgagtttaggagtttcttagcgctgtttatgtgtagtagctgtgatggatctgtgatgtagttgaagcggacaagccttagtgatttcccacccttgtatttgcttaaaaggggagtttcttatgaagaagaggttgcacgtctgttgcctatgcctacttgcttctttgctctcatgtatcatgctatttaatttgtttgattttgtgttctgatgaaagtgacatatatatactactgataaccatgctagaagattagcatcgggttttggtaacaattatgttttggggctttggacttctaatttcttgaaaagaaagaaaacaattgtcactgctgcattacagacttgcatcataaaaaaaactttgctacctttgcccagcaaacatgaggggtatgtgacaagttatattcatcatctaaaaagtttaatctcctgaaacatgagaaagaaagaaaatatacctctggtcagtagcggacaaattaatttacacgcacaaacattgtgtagagatgagaaggattcaaagcagaaacacaatgacaaggaatggttattcttatttgctatcccttttttataccgtgcaatgtagaacatgtctttcaagaataacatcattatatgaagaagagcatgtagaatccaacttattcaaatttctcccaatagttttacatacaagaggtgagtgtaaacttttgtctcacttttgaagggaaatctgtgtaacctcatcttgaggatatttgctttggtaccactaattgttatcaaaatgtatatttgatgcagcagtcgtggacataaggaatgttaatgtgtagatgttgagtaccaatattgtctccccttttttcatccagtcatcaagatttccaacttcaggctggggaattcttcatagagatacagtgcacagaatattgagttccctccacagtacaattaaatttgtagattgcagatttttcagctccatacagcaaaaaatttgacaaggactaaacacttgtactctgccggggatgtaattgaaaatgaaatcttcgcatgattgcttcacaacatataggttggtgtgaccagcaaagtagaacccagtgctgaaatttcattcaggatctaaaataaaaaatatataaaggataccattggcctcacagagtcacagacctcagttggcgggctaaggcactagcaaaggactgaaaaaatacagtccctgacaaaacaaaaatcttttgtgtgtgttaggggggtgggggtggggggagccacatttttgtgtcttttgcttctaagtgaaaactgcttcggcttcattgtttttccttggtttttggcttcaccaagccattttcgtgtgtgcacatttggcagcacttttgattaagagggtggagaatccctaacaaaagccctgccaaagaggaccttagagagaagggaattagggaaatgctttccatctattagcctcaagctttctgcaaatctgcaagtttagctactttg

SEQ ID NO: 14844 - DNA, 50 bp, Zea Mays
tcctcctggtggcttgcgctttcttcatctgtggctgggcctgggtggac

SEQ ID NO: 14845 - DNA, 2474 bp, Zea Mays
gggcgactcggcgcgtaggaggaagaactctccctcggcgcggtggcggcctctcccacaacttttcctaattgaattcgatctcccttccctatccggcatcagcgcgcaccaccactagcgaatcccgtttggtcatcaagaagacgtacggctgtctccaatcgaagttccagtcccactccaacatcggagagagagcacatgtcagtctgacttgcgaactccttccctctcctccttcccccaggtcaggagtcccagatcgtgaagccagctattttactctactcccccctcaccacgagtcggaattcagccccgcgccgcgcgtcgatcttatcctccagtctgattccagctccgcccccgcctccacctcccctctctctcgatccctcgctattaatacatcccggcggttcactcccgatctccatccctcccggccgggcctgcctcctcgatcctcggacgaaacgcgccgccttctttcttcgtcccagcctcgcctcctgccctttttaggtcgcccggatctcgctctcgtcgtcgtcgtcgcgcgcgcgcgcgcgcttcttgtttctgtcggcgccgccgcggtgctgggaaggcggctccttttcgcggccacaacccacaacacgtcctcgtgatcctagtaccttcttcttggaaaaagttgccgccgcgatgaacgcgctcgccgccaccacccgcaacttccggcgggcatcgaagctgctcggcctcgactccaagctcgagcagagcctgctcatcccgttccgggagatcaaggtggaatgcaccatccccaaagacgacggcagcttggcgacgttcgtggggttccgcgtgcagcatgataacgcccgcgggccgatgaaaggcggcatccgctatcacaatgaggttgatccagatgaagtaaatgcccttgctcaactcatgacatggaagacagctgttgctgcagtcccatatggtggagcaaagggagggatcgggtgctctcctggtgaactaagtagaagtgagttggagcggttgacacgagtatttacccagaaaattcatgatcttatcggaacgcatacagatgtccctgctcctgacatggggaccaatgcacaaaccatggcatggatgctggatgagtactcgaaatttcatggtcactccccagcagtcgtcactgggaagccaatagatcttggcggatcactgggcagggatgcagcaacagggcgaggcgtaatggttttggcaatgttggttcatgggctgctcgacttattcacgagaaaggtggtaagattattgcaattggggatgtgacaggttcaattagaaacacggctggtatagacatacctgctttggtgaagcataggaatgaaggtcatgcgatgaaagacttcgatggtgcggaagttttggattcaaccgagttgttagtgcatgactgtgatgttcttgtcccctgcgccttaggtggagttcttaacaaggataatgcaccagacgtgaaggccaaatttgtaatcgaagctgctaaccatccaactgatccagaggcagacgagattctcgccaagaagggggtagtagtattacctgatatatatgctaattcaggtggcgtggtcgttagctactttgaatgggtgcagaacattcaaggtttcatgtgggatgaggagaaagttaacgatgaactagaaaagtacatgagcagtgcttttcaacacatgaaagccatgtgcaaatctctggattgcgaccttaggatgggggccttcaccttaggagttaacagggttgctcgtgccacccttttgagaggctgggaggcatgagaccattgaccgcgcattacagattcgacaggcgcattcaataattcgtgtccaacaacgttggaggatcagtgtatacggtaaaattcatccggcttggaatgagcccgttgaagggtgttgtgcttgttgatcctgagttaccaatggttggttcaccagtttttggtgatgattagtgaaaattttattcaaaaccattttattgtattttagaaagctaatttggcctcgacagagttactgtaccttttcatttttaatgaaattctggtctgaggtttgaagttcccagatgtaaatgatttgcaaaaaaattgcagaagggattcaaataaaccagttatcattcacacagtttaaagaagtgctatgactgagttaaacataagccgcaaagcaacctaataattcagtaaaagtgaacacactaaagttatcatcctgcgcattacgtttaacaatcgtgatagaaatgcttcaggtcaggtagccaagttttggagctacgggtatgacgccgctagtgtctggagaaggcaacgcgagcaaagcaatctctggatcatctgaaatctcgtcagcgctaactgggtacagtttgcgaggccg

SEQ ID NO: 14846 - DNA, 2354 bp, Zea Mays
gggcgactcggcgcgtaggaggaagaactctccctcggcgcggtggcggcctctcccacaacttttcctaattgaattcgatctcccttccctatccggcatcagcgcgcaccaccactagcgaatcccgtttggtcatcaagaagacgtcaggagtcccagatcgtgaagccagctattttactctactcccccctcaccacgagtcggaattcagccccgcgccgcgcgtcgatcttatcctccagtctgattccagctccgcccccgcctccacctcccctctctctcgatccctcgctattaatacatcccggcggttcactcccgatctccatccctcccggccgggcctgcctcctcgatcctcggacgaaacgcgccgccttctttcttcgtcccagcctcgcctcctgccctttttaggtcgcccggatctcgctctcgtcgtcgtcgtcgcgcgcgcgcgcgcgcttcttgtttctgtcggcgccgccgcggtgctgggaaggcggctccttttcgcggccacaacccacaacacgtcctcgtgatcctagtaccttcttcttggaaaaagttgccgccgcgatgaacgcgctcgccgccaccacccgcaacttccggcgggcatcgaagctgctcggcctcgactccaagctcgagcagagcctgctcatcccgttccgggagatcaaggtggaatgcaccatccccaaagacgacggcagcttggcgacgttcgtggggttccgcgtgcagcatgataacgcccgcgggccgatgaaaggcggcatccgctatcacaatgaggttgatccagatgaagtaaatgcccttgctcaactcatgacatggaagacagctgttgctgcagtcccatatggtggagcaaagggagggatcgggtgctctcctggtgaactaagtagaagtgagttggagcggttgacacgagtatttacccagaaaattcatgatcttatcggaacgcatacagatgtccctgctcctgacatggggaccaatgcacaaaccatggcatggatgctggatgagtactcgaaatttcatggtcactccccagcagtcgtcactgggaagccaatagatcttggcggatcactgggcagggatgcagcaacagggcgaggcgtaatgtatgctaccgaggccctactcgctgaatatggaaaatgcatttctggatcaacttttgtgatccaaggttttggcaatgttggttcatgggctgctcgacttattcacgagaaaggaatgaaggtcatgcgatgaaagacttcgatggtgcggaagttttggattcaaccgagttgttagtgcatgactgtgatgttcttgtcccctgcgccttaggtggagttcttaacaaggataatgcaccagacgtgaaggccaaatttgtaatcgaagctgctaaccatccaactgatccagaggcagacgagattctcgccaagaagggggtagtagtattacctgatatatatgctaattcaggtggcgtggtcgttagctactttgaatgggtgcagaacattcaaggtttcatgtgggatgaggagaaagttaacgatgaactagaaaagtacatgagcagtgcttttcaacacatgaaagccatgtgcaaatctctggattgcgaccttaggatgggggccttcaccttaggagttaacagggttgctcgtgccacccttttgagaggctgggaggcatgagaccattgaccgcgcattacagattcgacaggcgcattcaataattcgtgtccaacaacgttggaggatcagtgtatacggtaaaattcatccggcttggaatgagcccgttgaagggtgttgtgcttgttgatcctgagttaccaatggttggttcaccagtttttggtgatgattagtgaaaattttattcaaaaccattttattgtattttagaaagctaatttggcctcgacagagttactgtaccttttcatttttaatgaaattctggtctgaggtttgaagttcccagatgtaaatgatttgcaaaaaaattgcagaagggattcaaataaaccagttatcattcacacagtttaaagaagtgctatgactgagttaaacataagccgcaaagcaacctaataattcagtaaaagtgaacacactaaagttatcatcctgcgcattacgtttaacaatcgtgatagaaatgcttcaggtcaggtagccaagttttggagctacgggtatgacgccgctagtgtctggagaaggcaacgcgagcaaagcaatctctggatcatctgaaatctcgtcagcgctaactgggtacagtttgcgaggccg

SEQ ID NO: 14847 - DNA, 2746 bp, Zea Mays
gggcgactcggcgcgtaggaggaagaactctccctcggcgcggtggcggcctctcccacaacttttcctaattgaattcgatctcccttccctatccggcatcagcgcgcaccaccactagcgaatcccgtttggtcatcaagaagacgtacggctgtctccaatcgaagttccagtcccactccaacatcggagagagagcacatgtcagtctgacttgcgaactccttccctctcctccttcccccaggtcaggagtcccagatcgtgaagccagctattttactctactcccccctcaccacgagtcggaattcagccccgcgccgcgcgtcgatcttatcctccagtctgattccagctccgcccccgcctccacctcccctctctctcgatccctcgctattaatacatcccggcggttcactcccgatctccatccctcccggccgggcctgcctcctcgatcctcggacgaaacgcgccgccttctttcttcgtcccagcctcgcctcctgccctttttaggtcgcccggatctcgctctcgtcgtcgtcgtcgcgcgcgcgcgcgcgcttcttgtttctgtcggcgccgccgcggtgctgggaaggcggctccttttcgcggccacaacccacaacacgtcctcgtgatcctagtaccttcttcttggaaaaagttgccgccgcgatgaacgcgctcgccgccaccacccgcaacttccggcgggcatcgaagctgctcggcctcgactccaagctcgagcagagcctgctcatcccgttccgggagatcaaggtggaatgcaccatccccaaagacgacggcagcttggcgacgttcgtggggttccgcgtgcagcatgataacgcccgcgggccgatgaaaggcggcatccgctatcacaatgaggttgatccagatgaagtaaatgcccttgctcaactcatgacatggaagacagctgttgctgcagtcccatatggtggagcaaagggagggatcgggtgctctcctggtgaactaagtagaagtgagttggagcggttgacacgagtatttacccagaaaattcatgatcttatcggaacgcatacagatgtccctgctcctgacatggggaccaatgcacaaaccatggcatggatgctggatgagtactcgaaatttcatggtcactccccagcagtcgtcactgggaagccaatagatcttggcggatcactgggcagggatgcagcaacagggcgaggcgtaatgtatgctaccgaggccctactcgctgaatatggaaaatgcatttctggatcaacttttgtgatccaaggttttggcaatgttggttcatgggctgctcgacttattcacgagaaaggtggtaagattattgcaattggggatgtgacaggttcaattagaaacacggctggtatagacatacctgctttggtgaagcataggaatgaaggtcatgcgatgaaagacttcgatggtgcggaagttttggattcaaccgagttgttagtgcatgactgtgatgttcttgtcccctgcgccttaggtggagttcttaacaagtaagaaccagtgtccttgtctattgttagtttcatagctttctttgaacaattttcgcccataatatgtgttggtacctattcatggcctggtaaaatatgccagttttgttttgtgaatagactgcttttgatttgtttcctagctctgttgtagatgtaccccaggattgttgatttctggtaattggttggttttgcgcagggataatgcaccagacgtgaaggccaaatttgtaatcgaagctgctaaccatccaactgatccagaggcagacgagattctcgccaagaagggggtagtagtattacctgatatatatgctaattcaggtggcgtggtcgttagctactttgaatgggtgcagaacattcaaggtttcatgtgggatgaggagaaagttaacgatgaactagaaaagtacatgagcagtgcttttcaacacatgaaagccatgtgcaaatctctggattgcgaccttaggatgggggccttcaccttaggagttaacagggttgctcgtgccacccttttgagaggctgggaggcatgagaccattgaccgcgcattacagattcgacaggcgcattcaataattcgtgtccaacaacgttggaggatcagtgtatacggtaaaattcatccggcttggaatgagcccgttgaagggtgttgtgcttgttgatcctgagttaccaatggttggttcaccagtttttggtgatgattagtgaaaattttattcaaaaccattttattgtattttagaaagctaatttggcctcgacagagttactgtaccttttcatttttaatgaaattctggtctgaggtttgaagttcccagatgtaaatgatttgcaaaaaaattgcagaagggattcaaataaaccagttatcattcacacagtttaaagaagtgctatgactgagttaaacataagccgcaaagcaacctaataattcagtaaaagtgaacacactaaagttatcatcctgcgcattacgtttaacaatcgtgatagaaatgcttcaggtcaggtagccaagttttggagctacgggtatgacgccgctagtgtctggagaaggcaacgcgagcaaagcaatctctggatcatctgaaatctcgtcagcgctaactgggtacagtttgcgaggccg

SEQ ID NO: 14848 - DNA, 756 bp, Zea Mays
ctgacaaataaagtctgacagctcctgttatatataaaatccgaaagatgtctcaaacaggaaaaaaattaaattgagcaagctggttatataagactgttatgccccccacccacccaaaaaagaaaaccatttcaagatgaggccgcgtgtactttcttccgggtctaaaacggtacataaattttcaactaaaaatggcaatctcttaaaagctgtggtttggtttctgcgttgagatctgggggagaaccgaacccccatcctagatttgcaggtagcttcatggcaagacccatactactccgtatcacacagacgactgcacatcttcaccgttggcggtttgtggtcctgcttgcgacaggaacctgggtgtctcgctgtcctgtcctcaaggacaaccaggccaattcagtgaaagaatgtcagggtctctcaagttcccaggtgcaaacaccttgggttctttcacctgcagcaaacgtgcacacaaagagacagtaatttcttgacaggatagggaatacaaaggtggtggtatagttatagcaagatcccaaatttgatttgtttgatgagcttgttagagtatatggggcccataaggcccatgtatgaatatggtatagccaccctctagggttagcccaattaggaatttcactctttccaacatggtatccagctaggtttctctcctcccaacagccgtcggtgtcccccagctgccgccgtcccctgccgcgcgcatag

SEQ ID NO: 14849 - DNA, 129 bp, Zea Mays
atgggcgggagcggaaggtcgactgaggagcgccgggcggaagatccagcacggcggcactccggcagagacagagtgcgcgatcgccgaccggcggcgtcgacctcgccgttgcgtgcgcggagttag

SEQ ID NO: 14850 - DNA, 2128 bp, Zea Mays
ctttgcataggacgcatccgccagaccgccactttcttccgcatttcctcaaacaattcgcgcgccgccgccgccgctctccggcgtctgctactcggctccgtgcccccaccaggcagcaggccaccaccccaatccctctcttccttcagagatgcagaaggtgcggctcaaatgggtgaagaaccggggcctggatcacctgatcgagcgcaccacctcaatccgcgcgtcctgcctgctgctcgaccacctctcgcgcctccctggtacctcccccgtgccggcgcgctccctcgcacgcctccaaaagccgcttggcctgacggtgcctgtgcttcgcttccttcgccgccatcccacgctcttctccgagcaaccgcaccctcggttccccacgctgctctccttttccctcacggctgcgtcacacaccctcctgtcccgccttgccgatgcctatgcgcacgacgcgcacctccgcctcgcgcgcctcctcctcctcacccgctccaggtcgctcccgctcgcctccgtgctcccgctccgcttcgacctcggactgccgttcaacttcgccgccgcgttcccggcctcccaccccggtgtcttcgccgtcgccaacaaccgcatctccctacggtccacctccggcctccccgaggacatcgccgtctcctctctccaacgccgccacgccgcggccatcgactccgcgacctaccgcgcgctgtcccggccgccgtcctcgtcgagcgccccgctcgcgttcccgatgcgattcccgcgggggtacggcgggatgaagaaggtcaaggcctggatggatgagttccaccgccttccctacatctcgccgtacgacgacgcgtcagggatcgaccctgagagcgacatttacgagaagaggaacatcggcttgctacatgagctacttgggctaacggtgcacaagatggtgcggaggaacgccatccggcttcttcgggaagagctgggcctgccacacaagttcactaggctgttcacgcggtaccctggagtgttctacctgtcgttgaagtgcaagacaacgactgtggtgcttcgtgaggggtacgagagaggtaagctcgtggagcagcatcccctggctgctgtgagggacaaggtgcattatgtgatgcgcactggagtgctgtaccgtggaaaaggtttgtccaagcttgttctggatgaggatgtcactgaggaagagggtgcactgaatggggaggaatttgaaggggagggaatggatggggatgctgatgtcgagtgcttcagaatggagattgtggatgacgatgggtctgctgatgatgtggatgatgaaggttatagtgatggttgacatggactgatgactcttgccttcttgatttatgttttgcatttgtggcttcagtcgtgaattacagtgactgttttttattcaacttattagtggcttcaattgagaagttcagcaagttattgtagattactgtacacaaaatagaatgggaaatatgtcagccttttttattagctaaagtgcagtctcttcgtataataaggtaaattttgtttccaattgccatgctaccattctagagattgcatttgtttcataagtttatgctttatgggatttgatcatattctataggataaaaacctctaatttttatagatgactcttagctgccacctagtgtttgtgttaccttcacctttaatcatttattgaggtgttcatccagaaatagctgaagccaatttgatataaggaattacaaatctcacctctatcatcaaaagaatctcataccactatacctctggcttatgtgttggagcttttgggagatacttaaccttcattagaaagacacgttgtatctaggtaaatagtagttttcatgctatttttctagcgtggcccctgtttatctaaagatgccaccacagcttgttcactccagtgttaaatcgcactatagtgttgttggcacaactaacattgcccaaaagtcaagtcaagcacacattttgatgttagatgttctctccaaggtgacaaattggttgatgaaaagtaatgccatggcctttttgacatattgat

SEQ ID NO: 14851 - DNA, 2952 bp, Zea Mays
aatttctaagggttaatttgacaacttaattttatcaaaaaataatttaattttctttaataaaatataaatcttttaaagaaagttaccaaactagttgtagaggtaaaaactgaggaggaagaaaagcaagggaagcaaatatcatacgcccccacttccgactccgagcagagctccacaacagttaccacgcctttcgctttttcttttgtcctccactccacttcccctcttcacgagaggagagagagagagagagagagtgcgtgcgaatgcggagttactcggggactggtacgagcggagcaggggtgggcggtgggggaagcgagtggaagattgggagccaagagcacggagagtgccccgggatcttcacctcccatcattcgagtgtggagtttgtcctacttccgggagttgcttggcttggtggcgcccagaattagtctggaagcagggtggagtgctgtctgcgcagaaatctgctcaccgggtgccaggaaacaggtggctgtagagaattgcttggggattcgtcaagaaacgacccagtaggtggttgtgcacttgttatgctgagactgaatggaggctgtagacaagattgctgagcccaaagacccttttgtgctcactgcccagaaggttcagagctcggagccaccgatacctataaaggcgtcatgtgaagggaatgactcccaacagcaagaagagacggatttgccagatgatggcgaagagagcttccggagcatggattcctctgatgaaggtgtccggagctccttctctggggctagtcaccctccagagcctattgacatggatatcatgaagacagtctatgttgcaatcgacgagaagtccgagccaccggttagtttagtgcgaggagtctcggtgaaggggcctttcatagatgacctctcgatccgtgttacaggcgcaaaggcaaatctggtggtaggtgcaggcggtgctgaaggtatggctgaagagaggaaggtatctgcttctgcagtggcatcagtcaccacagcaaggtcgtctcaggctacctctttgcctcaggactcggaggagaaggagtgcgtctgggacgcttcactccctccgagtggcaatgttagccctcacagtagtattgacagcatgggtgtggtcactgctatgagcaccctcaacagctgcacgagcacatataaaagcgagaccatagctggtgaagcaatgctcaatgtggagaggaactgtgagagtgtaaagggtgttcgaggtgacttactagaaagtgcaaaaaccagcatgagtcgagcaagtgatagcagtgttgttagtgatgacagcagctggagccacatcactggaggtgccagcaagcctcacaaggggaatgatcctagatggaaggcaattcatgctgtacgaactcgtgatagcgtgcttggaatgagccattttagactactaaagcgtcttggttgtggtgacattggcagtgtttacctctcagaattaagtggaactcggtgctactttgcaatgaaggttctcttgtttggtgatggaattctgtccaggtggtgatctgcatactttgcgacagagacaaccaggaaagcatttctctgagtatgctgcaaggttttatgccgcagaagtacttctagctctggagtatctacacatgttgggagtggtctatagagatctgaagcctgaaaatgttcttgtgcgcgatgatgggcacataatgctttcagactttgacctctcgctgagatgtgcagtctcacctacactcatcagaacatcagctttcgattctgatcccagaagagcaggtggttctttctgtgtacagcctgcttgcatagaacctacttcagcttgtatccagcctgcgtgcttcctccccaaattcttcggacagaagagcaagaagaagactcgaaaggcaaggtctgagttgggacataacgccggcaccctgcccgagcttgttgccgagccaacatcagctcggtcgatgtcatttgtcgggacccatgaatacttggcccctgaaatcatcaaaggcgaagggcacggaagcgctgtcgactggtggaccttcggcatcttcctgcatgagctgctgtacggcaagaccccgttcaaggggtcagggaaccgcgccaccctgttcaacgtggtaggccagcaactgaaatttccggagtcgccgtccacaagctactcgagcagagacctcatccgtgggctcttggtcaaggagccgcagagccgcctgggcgtgaagcggggagcgacagagataaagcagcatgccttcttcgagggtgtgaactgggctctcatccggtgcagcactcctcccgaggtcccgaggcctgttgaggccgagctgcctgtgaagtatggggtggcggaggcgatcgggagcaacagcaagcgggtagtcggagcagacgtgaagtcggccggaaaatacctggactttgagttcttttaagagcagtgcgtgcccagtggcagctattgtttgcgtactgtccgtgtatggtcggttttgatgtttgtgtgattcgatatggtgatttgtgcctcgccgtcgatgcacaattgtcaggtttgaatcgaccaaaattaggtaggtgtgtgttgccatttgcctgctttggcacatttcgagtttatgtatggaactatgtatagagtatgcattgcaatttgcagcaaacctgaaaagcagctaagaaggccctttcctccttgtttatgcaatgcatctgttcctgttgccttggacccttgatgagtccgggactggtactccgcgtgagctcgccgccgcgatacgaacgcctgctcttgccgatctgtgctcgtctggggcgcacacgtgcagaaccagacgacgtttggtgctctgggaaggag

SEQ ID NO: 14852 - DNA, 2920 bp, Zea Mays
aatttctaagggttaatttgacaacttaattttatcaaaaaataatttaattttctttaataaaatataaatcttttaaagaaagttaccaaactagttgtagaggtaaaaactgaggaggaagaaaagcaagggaagcaaatatcatacgcccccacttccgactccgagcagagctccacaacagttaccacgcctttcgctttttcttttgtcctccactccacttcccctcttcacgagaggagagagagagagagagagagtgcgtgcgaatgcggagttactcggggactggtacgagcggagcaggggtgggcggtgggggaagcgagtggaagattgggagccaagagcacggagagtgccccgggatcttcacctcccatcattcgagtgtggagtttgtcctacttccgggagttgcttggcttggtggcgcccagaattagtctggaagcagggtggagtgctgtctgcgcagaaatctgctcaccgggtgccaggaaacaggtggctgtagagaattgcttggggattcgtcaagaaacgacccagtaggtggttgtgcacttgttatgctgagactgaatggaggctgtagacaagattgctgagcccaaagacccttttgtgctcactgcccagaaggttcagagctcggagccaccgatacctataaaggcgtcatgtgaagggaatgactcccaacagcaagaagagacggatttgccagatgatggcgaagagagcttccggagcatggattcctctgatgaaggtgtccggagctccttctctggggctagtcaccctccagagcctattgacatggatatcatgaagacagtctatgttgcaatcgacgagaagtccgagccaccggttagtttagtgcgaggagtctcggtgaaggggcctttcatagatgacctctcgatccgtgttacaggcgcaaaggcaaatctggtggtaggtgcaggcggtgctgaaggtatggctgaagagaggaaggtatctgcttctgcagtggcatcagtcaccacagcaaggtcgtctcaggctacctctttgcctcaggactcggaggagaaggagtgcgtctgggacgcttcactccctccgagtggcaatgttagccctcacagtagtattgacagcatgggtgtggtcactgctatgagcaccctcaacagctgcacgagcacatataaaagcgagaccatagctggtgaagcaatgctcaatgtggagaggaactgtgagagtgtaaagggtgttcgaggtgacttactagaaagtgcaaaaaccagcatgagtcgagcaagtgatagcagtgttgttagtgatgacagcagctggagccacatcactggaggtgccagcaagcctcacaaggggaatgatcctagatggaaggcaattcatgctgtacgaactcgtgatagcgtgcttggaatgagccattttagactactaaagcgtcttggttgtggtgacattggcagtgtttacctctcagaattaagtggaactcggtgctactttgcaatgaaggtggtgatctgcatactttgcgacagagacaaccaggaaagcatttctctgagtatgctgcaaggttttatgccgcagaagtacttctagctctggagtatctacacatgttgggagtggtctatagagatctgaagcctgaaaatgttcttgtgcgcgatgatgggcacataatgctttcagactttgacctctcgctgagatgtgcagtctcacctacactcatcagaacatcagctttcgattctgatcccagaagagcaggtggttctttctgtgtacagcctgcttgcatagaacctacttcagcttgtatccagcctgcgtgcttcctccccaaattcttcggacagaagagcaagaagaagactcgaaaggcaaggtctgagttgggacataacgccggcaccctgcccgagcttgttgccgagccaacatcagctcggtcgatgtcatttgtcgggacccatgaatacttggcccctgaaatcatcaaaggcgaagggcacggaagcgctgtcgactggtggaccttcggcatcttcctgcatgagctgctgtacggcaagaccccgttcaaggggtcagggaaccgcgccaccctgttcaacgtggtaggccagcaactgaaatttccggagtcgccgtccacaagctactcgagcagagacctcatccgtgggctcttggtcaaggagccgcagagccgcctgggcgtgaagcggggagcgacagagataaagcagcatgccttcttcgagggtgtgaactgggctctcatccggtgcagcactcctcccgaggtcccgaggcctgttgaggccgagctgcctgtgaagtatggggtggcggaggcgatcgggagcaacagcaagcgggtagtcggagcagacgtgaagtcggccggaaaatacctggactttgagttcttttaagagcagtgcgtgcccagtggcagctattgtttgcgtactgtccgtgtatggtcggttttgatgtttgtgtgattcgatatggtgatttgtgcctcgccgtcgatgcacaattgtcaggtttgaatcgaccaaaattaggtaggtgtgtgttgccatttgcctgctttggcacatttcgagtttatgtatggaactatgtatagagtatgcattgcaatttgcagcaaacctgaaaagcagctaagaaggccctttcctccttgtttatgcaatgcatctgttcctgttgccttggacccttgatgagtccgggactggtactccgcgtgagctcgccgccgcgatacgaacgcctgctcttgccgatctgtgctcgtctggggcgcacacgtgcagaaccagacgacgtttggtgctctgggaaggag

SEQ ID NO: 14853 - DNA, 2804 bp, Zea Mays
gggaaagttctgaatgcggtttgggtgcattttccgggtagcgaacgggggatttcaggtgtggttcttgggattttgcgtcggcgagggagtcgtgggatttaagcaacgcaggaataatttgtgtggagtttgtcctacttccgggagttgcttggcttggtggcgcccagaattagtctggaagcagggtggagtgctgtctgcgcagaaatctgctcaccgggtgccaggaaacaggtggctgtagagaattgcttggggattcgtcaagaaacgacccagtaggtggttgtgcacttgttatgctgagactgaatggaggctgtagacaagattgctgagcccaaagacccttttgtgctcactgcccagaaggttcagagctcggagccaccgatacctataaaggcgtcatgtgaagggaatgactcccaacagcaagaagagacggatttgccagatgatggcgaagagagcttccggagcatggattcctctgatgaaggtgtccggagctccttctctggggctagtcaccctccagagcctattgacatggatatcatgaagacagtctatgttgcaatcgacgagaagtccgagccaccggttagtttagtgcgaggagtctcggtgaaggggcctttcatagatgacctctcgatccgtgttacaggcgcaaaggcaaatctggtggtaggtgcaggcggtgctgaaggtatggctgaagagaggaaggtatctgcttctgcagtggcatcagtcaccacagcaaggtcgtctcaggctacctctttgcctcaggactcggaggagaaggagtgcgtctgggacgcttcactccctccgagtggcaatgttagccctcacagtagtattgacagcatgggtgtggtcactgctatgagcaccctcaacagctgcacgagcacatataaaagcgagaccatagctggtgaagcaatgctcaatgtggagaggaactgtgagagtgtaaagggtgttcgaggtgacttactagaaagtgcaaaaaccagcatgagtcgagcaagtgatagcagtgttgttagtgatgacagcagctggagccacatcactggaggtgccagcaagcctcacaaggggaatgatcctagatggaaggcaattcatgctgtacgaactcgtgatagcgtgcttggaatgagccattttagactactaaagcgtcttggttgtggtgacattggcagtgtttacctctcagaattaagtggaactcggtgctactttgcaatgaaggtaatggacaaggcatccttggcaagtaggaaaaagttaaatagggctcaaactgaaagggagattctacagcttcttgaccacccattcctcccaacgttgtatacacattttgaaaccgacaggttctcttgtttggtgatggaattctgtccaggtggtgatctgcatactttgcgacagagacaaccaggaaagcatttctctgagtatgctgcaaggttttatgccgcagaagtacttctagctctggagtatctacacatgttgggagtggtctatagagatctgaagcctgaaaatgttcttgtgcgcgatgatgggcacataatgctttcagactttgacctctcgctgagatgtgcagtctcacctacactcatcagaacatcagctttcgattctgatcccagaagagcaggtggttctttctgtgtacagcctgcttgcatagaacctacttcagcttgtatccagcctgcgtgcttcctccccaaattcttcggacagaagagcaagaagaagactcgaaaggcaaggtctgagttgggacataacgccggcaccctgcccgagcttgttgccgagccaacatcagctcggtcgatgtcatttgtcgggacccatgaatacttggcccctgaaatcatcaaaggcgaagggcacggaagcgctgtcgactggtggaccttcggcatcttcctgcatgagctgctgtacggcaagaccccgttcaaggggtcagggaaccgcgccaccctgttcaacgtggtaggccagcaactgaaatttccggagtcgccgtccacaagctactcgagcagagacctcatccgtgggctcttggtcaaggagccgcagagccgcctgggcgtgaagcggggagcgacagagataaagcagcatgccttcttcgagggtgtgaactgggctctcatccggtgcagcactcctcccgaggtcccgaggcctgttgaggccgagctgcctgtgaagtatggggtggcggaggcgatcgggagcaacagcaagcgggtagtcggagcagacgtgaagtcggccggaaaatacctggactttgagttcttttaagagcagtgcgtgcccagtggcagctattgtttgcgtactgtccgtgtatggtcggttttgatgtttgtgtgattcgatatggtgatttgtgcctcgccgtcgatgcacaattgtcaggtttgaatcgaccaaaattaggtaggtgtgtgttgccatttgcctgctttggcacatttcgagtttatgtatggaactatgtatagagtatgcattgcaatttgcagcaaacctgaaaagcagctaagaaggccctttcctccttgtttatgcaatgcatctgttcctgttgccttggacccttgatgagtccgggactggtactccgcgtgagctcgccgccgcgatacgaacgcctgctcttgccgatctgtgctcgtctggggcgcacacgtgcagaaccagacgacgtttggtgctctgggaaggag

SEQ ID NO: 14854 - DNA, 1195 bp, Zea Mays
ggcgaaattcgcaatattcattcatcatcagtaaccaaaatttcgactttttttttaaaaaaaatacactataaccgagagcgtctgaaaaatgggaacaaactagcaactgaagcgtactaacaaaaagcgcccgattcgcctcgcaaaatcgccgccgccatcacctacctactcacagaagttccgccttcctttcctccggcgcgcgccgcgcctgtcgccatggtgaagcgatggcttcccctcgaggccaaccccgacgtcatgaaccagttcatgtggggactgggggtccccgaggacgtggggttctgcgacgtgtacggcctcgatgacgagttgctcgccatggtgccccagccggtgctcgcggtcctacttctctacccccaggaccggagcaaggagtcccaagcttcagctacctcgtcggtggagaccaaggagcccagcaagaacgtatatttcacaaagcaaactgttgggaatgcctgtggcacagttggtattattcatgcactggggaatgctacttccagaatcaagtgaggggtcatattttgatagattttataaacgaactgctgacatggatcctatccagcgtgctgcatttcttgaggaggacgaggaaatggagaatgctcattccattgccgctactgctggtgacacagaggccaaggacggtgtaattgaacattacatttgtttctcttgtgtcgatggagagctttatgagcttgatggggggacatcacagccaataccccatgggccttccactcctgataccttgttgcaggatgctgcagaagttataaaagcaagaatcgccatgtattcacagtcaaacaacttcaatgtcatggctctttcaggcaaagcgatatagcattatagcactttcagtcataggcactcgatatcccacatttgctttgcagcagccttagtccaacactgcagtatgttctattgttttcttgccttcgttttattatttaaacacgttaaaacaagataaataaaagcgtggctacagaaaagttcccgttggtagtatcacttctcttaagagctaatgtgccgtttcgttcacacaaaatgtaatgtaacgtaaatggattcacgctggaataccggtggtaaagtttaaataagccggtatctatttctagtgttatattaa

SEQ ID NO: 14855 - DNA, 1796 bp, Zea Mays
ggcgaaattcgcaatattcattcatcatcagtaaccaaaatttcgactttttttttaaaaaaaatacactataaccgagagcgtctgaaaaatgggaacaaactagcaactgaagcgtactaacaaaaagcgcccgattcgcctcgcaaaatcgccgccgccatcacctacctactcacagaagttccgccttcctttcctccggcgcgcgccgcgcctgtcgccatggtgaagcgatggcttcccctcgaggccaaccccgacgtcatgaaccaggtacacccacccatcccctcatctgttctgagttttgatacctcacggctcgttcccactcggccccttggccttcctcgctcacggcgccctttcgttccctgcacgatcggtgtagttcatgtggggactgggggtccccgaggacgtggggttctgcgacgtgtacggcctcgatgacgagttgctcgccatggtgccccagccggtgctcgcggtcctacttctctacccccaggaccggagcaaggagtcccaagcttcagctacctcgtcggtggagaccaaggagcccagcaagaacgtatatttcacaaagcaaactgttgggaatgcctgtggcacagttggtattattcatgcactggggaatgctacttccagaatcaagttaggtgaggggtcatattttgatagattttataaacgaactgctgacatggatcctatccagcgtgctgcatttcttgaggaggacgaggaaatggagaatgctcattccattgccgctactgctggtgacacagaggtttataacatgtgcacagtacttagttctttgttcaagatttgtgggtgttattctttttgatgaaatgtatgcagttaattcttataatttttgttgtcagtgcttctcagaatcaaagtggtttccggttaccagtatctgagaactgactgctatcacttgtttactcatctggaaaagaacagtttgctgaccagctagagttacaggttcctagccagattgaaatctatatgctagtagtatatgcccctttactccttccgttgcatttgtgtgcctgaatatctgagattcatgttgaattttgttggtcatgtgtcattgtaagtgaggattggacgtgtcaattcacagtatcagctgtaacagtcgatattaaagaactgtatcagctgtaacaagtcaattagttgaaactatggtctgagcttatcttatctttgattaccatcagtgctcatggatcctatattattatgcaggccaaggacggtgtaattgaacattacatttgtttctcttgtgtcgatggagagctttatgagcttgatggggggacatcacagccaataccccatgggccttccactcctgataccttgttgcagaagttataaaagcaagaatcgccatgtattcacagtcaaacaacttcaatgtcatggctctttcaggcaaagcgatatagcattatagcactttcagtcataggcactcgatatcccacatttgctttgcagcagccttagtccaacactgcagtatgttctattgttttcttgccttcgttttattatttaaacacgttaaaacaagataaataaaagcgtggctacagaaaagttcccgttggtagtatcacttctcttaagagctaatgtgccgtttcgttcacacaaaatgtaatgtaacgtaaatggattcacgctggaataccggtggtaaagtttaaataagccggtatctatttctagtgttatattaa

SEQ ID NO: 14856 - DNA, 1629 bp, Zea Mays
ggcgaaattcgcaatattcattcatcatcagtaaccaaaatttcgactttttttttaaaaaaaatacactataaccgagagcgtctgaaaaatgggaacaaactagcaactgaagcgtactaacaaaaagcgcccgattcgcctcgcaaaatcgccgccgccatcacctacctactcacagaagttccgccttcctttcctccggcgcgcgccgcgcctgtcgccatggtgaagcgatggcttcccctcgaggccaaccccgacgtcatgaaccagttcatgtggggactgggggtccccgaggacgtggggttctgcgacgtgtacggcctcgatgacgagttgctcgccatggtgccccagccggtgctcgcggtcctacttctctacccccaggaccggagcaaggagtcccaagcttcagctacctcgtcggtggagaccaaggagcccagcaagaacgtatatttcacaaagcaaactgttgggaatgcctgtggcacagttggtattattcatgcactggggaatgctacttccagaatcaagttagcgtgctgcatttcttgaggaggacgaggaaatggagaatgctcattccattgccgctactgctggtgacacagaggtttataacatgtgcacagtacttagttctttgttcaagatttgtgggtgttattctttttgatgaaatgtatgcagttaattcttataatttttgttgtcagtgcttctcagaatcaaagtggtttccggttaccagtatctgagaactgactgctatcacttgtttactcatctggaaaagaacagtttgctgaccagctagagttacaggttcctagccagattgaaatctatatgctagtagtatatgcccctttactccttccgttgcatttgtgtgcctgaatatctgagattcatgttgaattttgttggtcatgtgtcattgtaagtgaggattggacgtgtcaattcacagtatcagctgtaacagtcgatattaaagaactgtatcagctgtaacaagtcaattagttgaaactatggtctgagcttatcttatctttgattaccatcagtgctcatggatcctatattattatgcaggccaaggacggtgtaattgaacattacatttgtttctcttgtgtcgatggagagctttatgagcttgatggggggacatcacagccaataccccatgggccttccactcctgataccttgttgcaggatgctgcagaagttataaaagcaagaatcgccatgtattcacagtcaaacaacttcaatgtcatggctctttcaggcaaagcgatatagcattatagcactttcagtcataggcactcgatatcccacatttgctttgcagcagccttagtccaacactgcagtatgttctattgttttcttgccttcgttttattatttaaacacgttaaaacaagataaataaaagcgtggctacagaaaagttcccgttggtagtatcacttctcttaagagctaatgtgccgtttcgttcacacaaaatgtaatgtaacgtaaatggattcacgctggaataccggtggtaaagtttaaataagccggtatctatttctagtgttatattaa

SEQ ID NO: 14857 - DNA, 1580 bp, Zea Mays
ggcgaaattcgcaatattcattcatcatcagtaaccaaaatttcgactttttttttaaaaaaaatacactataaccgagagcgtctgaaaaatgggaacaaactagcaactgaagcgtactaacaaaaagcgcccgattcgcctcgcaaaatcgccgccgccatcacctacctactcacagaagttccgccttcctttcctccggcgcgcgccgcgcctgtcgccatggtgaagcgatggcttcccctcgaggccaaccccgacgtcatgaaccagttcatgtggggactgggggtccccgaggacgtggggttctgcgacgtgtacggcctcgatgacgagttgctcgccatggtgccccagccggtgctcgcggtcctacttctctacccccaggaccggagcaaggagtcccaagcttcagctacctcgtcggtggagaccaaggagcccagcaagaacgtatatttcacaaagcaaactgttgggaatgcctgtggcacagttggtattattcatgcactggggaatgctacttccagaatcaagtgaggggtcatattttgatagattttataaacgaactgctgacatggatcctatccagcgtgctgcatttcttgaggaggacgaggaaatggagaatgctcattccattgccgctactgctggtgacacagagtgcttctcagaatcaaagtggtttccggttaccagtatctgagaactgactgctatcacttgtttactcatctggaaaagaacagtttgctgaccagctagagttacaggttcctagccagattgaaatctatatgctagtagtatatgcccctttactccttccgttgcatttgtgtgcctgaatatctgagattcatgttgaattttgttggtcatgtgtcattgtaagtgaggattggacgtgtcaattcacagtatcagctgtaacagtcgatattaaagaactgtatcagctgtaacaagtcaattagttgaaactatggtctgagcttatcttatctttgattaccatcagtgctcatggatcctatattattatgcaggccaaggacggtgtaattgaacattacatttgtttctcttgtgtcgatggagagctttatgagcttgatggggggacatcacagccaataccccatgggccttccactcctgataccttgttgcaggatgctgcagaagttataaaagcaagaatcgccatgtattcacagtcaaacaacttcaatgtcatggctctttcaggcaaagcgatatagcattatagcactttcagtcataggcactcgatatcccacatttgctttgcagcagccttagtccaacactgcagtatgttctattgttttcttgccttcgttttattatttaaacacgttaaaacaagataaataaaagcgtggctacagaaaagttcccgttggtagtatcacttctcttaagagctaatgtgccgtttcgttcacacaaaatgtaatgtaacgtaaatggattcacgctggaataccggtggtaaagtttaaataagccggtatctatttctagtgttatattaa

SEQ ID NO: 14858 - DNA, 748 bp, Zea Mays
ttaagctcatttttcttatcgttcaaaccagaacattcacattctacataggcaacaaaagttacagcttagctatgaagtacatcgaccctgcgctttacttcagttttcgaccgaacctccctgagcctcccatcggttccatagtctctctccatcaccaggttgataccttcttcggagtaccacccaactccgatacagagtatgccgtcttcgctgatgtcaacataggcagtgacgccaccaggtaaccaaagcacggtgacatcctgcacgtcgagcatctcctcctccccaaagaaaactgaactctctggcaggtttctcttcttcaccgtctccatgcacaagtagaccaatggagaaccgccctctagttcttgcactttatcactgaaaattggcgttgcactgacttcgtatactttccaggagcctgtcagttctgacggtttggtccggcttctttgagagaatggtttaaggtcaacaagtgcttactcttcaacatggatatttgctgggctggcccatttttcttcatacacagcaacccttacaatttgtatgttagctcctccttcgttaaactcaattgtatgcacaatccgcaatcttttgtggcaacctttaacaaggcactgtatagaaatgggtgtaagctatcaattggtaaaccagagtgccaggcacacaggcagcatcaagaaacaagaatcacagtcatctagacacaaaacaggag

SEQ ID NO: 14859 - DNA, 3171 bp, Zea Mays
atagacactggatgtctggatggcatagcgctaaatttgagaccggcaaaatagcaatttttccccctgtgagcccgcgacgcagcgcgaggtgcggccccgtcccctcgccaccggaggagcaggacgacgaggtggcgccggcgcgaggtagtcgcgcgcctggaagagcggcggcatcagagtcgcaggcggaggcgaggaagtgaggggagagccctatagccaccgccgcggggcgtcctgctcgctgcacgcactcccaccattttgtcccaactcgaagctcagactcgtgctgtcgtgcacttcccctcccctagcatcccaagctcctcactgagaaaacaggagatgggaagagacggggaacagactaggcgccggagccgcaagagatcccgcgacgcctccccctcctcgtcggattccgattccttcgactccccatcctctccgagcagtagccctgagcgacggagccgcagcagtaagcggaatagatcatcctcatcgcaccgccacagccgcaagaaaagcgaccggtcgcggagatcccgcgacgaggaccgccggcggcggagaagacggggccaggagagaaagcggcacggtggggatggtggcaggtcctccgactcccaatcgtcggaggaggatagggcggaggaggcgcgggagatcgtccgagatatactcatcgaattgccggccatagccgaagagcttcgccagcttctccaaattatagacagtggtgaaagcattgatatttctggaatttctgacaaactattggtgaagcgcttgaagaaacttttccgatctctgagattgaaagaaagtgcaagtggggcttacttgttgccttcaaaaaatgttcctacgcttgatattgttggatcattactattagcaagttccaaacttgcagacaacaaaagtggaaagccagtgtcaccaaatagagaagcactacaacaggctaactttgatgtgcaaaataaagataaagattatattgtttccgaagagccaaaaattgttgatgtggaagaggaacctcctaaaagaaggataattggtcctgcaatgccatctcgtgaattattggctgcagcagctgaaatgacagaggctcttaggtgccgggatgctgaactggaagccaatgatgatttgctcataggccctccaccgcctgccgtagttgctgaagctgcatctgcaaatgaagctgagcgatttgaagaggttactagaatattggcagctgacacaaattcaccttatgaggttttgggggtaaattggaagatgtcaactgataacatgaagaaaaggtattggaagttgtctcttttagtgcacccggacaaatgtccacatccttccgcacaagaggcattcgtgaaattaaataatgccttcaaagacttacaagaccctgataagcaaaattcaatgttctccccctctatttatcatatggcgtgaccgtcgtggcgagcggaggggcgagtgcaaggtcagcagggactgggaactcgaggggagcaggtagcgaggaagaacggcggtgggctcttcgctggtgacaactgctgaatctcctaatggcaccgtcgaaggggaaacctcaccctgacacagggaggtttatttccttctttgatacttgattacaatcctaaagtgcccctttatagattaggagcactctccaacaattattcaatcatatctcctaaaatctgccctctaattctctttcctaagtcctaattaacccagccttagccaagcttgggctggacggacgcttgggacggtgccggtattggcgtcccacaaacgagtccacaacactccctttagtgcagcactgcagcttagggcgtgtttgtaagcaaagtatttcaaaatcatggttttaaaatgtcatgatacaaccgtagtattttttatatcactccaacaaatacttgtttggagacaaagtatctcaaaccatggtatttagtatacatgtactagaagctagtcatagacaaaaactttgggttggagtggtgttttaaatactccaaaaataccatggtaactactaaacctgtaaaccatgatattcaaaacagggttttttcccatggtagccaaacatctcttagcaaaaaatatcataatattcttcaataccatggttttatctcaaaactgcaaaaatactttgcttccaaacacccccttaattttttttgtttctggcattttcttcattgcagagaggtgcaatagacgagaagataaaaaagaaagaggagatggaacaatttgaggttgagcttaaagcaatgcgtgaggctgcggaatggagacgaatacaaggtgtatcactcgcaggtgatgatgaacttttagcaggtccaaaagagtcacagagacctacgagagatgaatggatgaccacattgccacctgagagaaaagcaggagtgccaatgcattcaactacatcatttagtatgaatggtaaagaaggacgtggagacacaagtgtctggactgatacccctcttgatagagcacaaaaagcacaacaaagctatctagaagcctacaataagacaaaggcaattgcagaaggcgacgacgtgaagagcaagaacccggatgcttcaatcgtagataaatacaacacctccaaacgatcagtgtcccttgtgcagaagcaccgagagagtaaaaaggagaaaaagaagcaaaagcagcaggagaaagaggaatgggagggaagccacccatggaagccatgggaccgggagaaggatctgtctgctgggcgccagaatgtggccttagacgcagagaacatgtcgcaaggattatcttcccgtttcgcatctggtgctgttcagcggaacttcctgtgagctgtgtggaaagatactcctggagcttggtctaatcgatgattaatgtccagttattacatcctggtcggcagatggcaaagataatgctgacatataaaaacgagttatgttaccaaggaccatcgtcctgtaatatcgatcgtgcttgttgtgcttattttctcagtgtattatcgggtgagctaaaatggtgccatagtttgttcgtacgatacaattactttttttttcaaac

SEQ ID NO: 14860 - DNA, 3372 bp, Zea Mays
atagacactggatgtctggatggcatagcgctaaatttgagaccggcaaaatagcaatttttccccctgtgagcccgcgacgcagcgcgaggtgcggccccgtcccctcgccaccggaggagcaggacgacgaggtggcgccggcgcgaggtagtcgcgcgcctggaagagcggcggcatcagagtcgcaggcggaggcgaggaagtgaggggagagccctatagccaccgccgcggggcgtcctgctcgctgcacgcactcccaccattttgtcccaactcgaagctcagactcgtgctgtcgtgcacttcccctcccctagcatcccaagctcctcactgagaaaacaggagatgggaagagacggggaacagactaggcgccggagccgcaagagatcccgcgacgcctccccctcctcgtcggattccgattccttcgactccccatcctctccgagcagtagccctgagcgacggagccgcagcagtaagcggaatagatcatcctcatcgcaccgccacagccgcaagaaaagcgaccggtcgcggagatcccgcgacgaggaccgccggcggcggagaagacggggccaggagagaaagcggcacggtggggatggtggcaggtcctccgactcccaatcgtcggaggaggatagggcggaggaggcgcgggagatcgtccgagatatactcatcgaattgccggccatagccgaagagcttcgccagcttctccaaattatagacagtggtgaaagcattgatatttctggaatttctgacaaactattggtgaagcgcttgaagaaacttttccgatctctgagattgaaagaaagtgcaagtggggcttacttgttgccttcaaaaaatgttcctacgcttgatattgttggatcattactattagcaagttccaaacttgcagacaacaaaagtggaaagccagtgtcaccaaatagagaagcactacaacaggctaactttgatgtgcaaaataaagataaagattatattgtttccgaagagccaaaaattgttgatgtggaagaggaacctcctaaaagaaggataattggtcctgcaatgccatctcgtgaattattggctgcagcagctgaaatgacagaggctcttaggtgccgggatgctgaactggaagccaatgatgatttgctcataggccctccaccgcctgccgtagttgctgaagctgcatctgcaaatgaagctgagcgatttgaagaggttactagaatattggcagctgacacaaattcaccttatgaggttttgggggtaaattggaagatgtcaactgataacatgaagaaaaggtattggaagttgtctcttttagtgcacccggacaaatgtccacatccttccgcacaagaggcattcgtgaaattaaataatgccttcaaagacttacaagaccctgataaggtgcgtgagttttccacacactgaaactaggttcatatttctatcaaagttcatttgccaaattttgccaagtacaggactactattacatttgtcttatttggagaaaatagtacacttaaactgtggccattaaagaagatactattgaagagataaaaacatttcatgaaggttccagcatagtttgtctttgactagcaaaattcaatgttctccccctctatttatcatatggcgtgaccgtcgtggcgagcggaggggcgagtgcaaggtcagcagggactgggaactcgaggggagcaggtagcgaggaagaacggcggtgggctcttcgctggtgacaactgctgaatctcctaatggcaccgtcgaaggggaaacctcaccctgacacagggaggtttatttccttctttgatacttgattacaatcctaaagtgcccctttatagattaggagcactctccaacaattattcaatcatatctcctaaaatctgccctctaattctctttcctaagtcctaattaacccagccttagccaagcttgggctggacggacgcttgggacggtgccggtattggcgtcccacaaacgagtccacaacactccctttagtgcagcactgcagcttagggcgtgtttgtaagcaaagtatttcaaaatcatggttttaaaatgtcatgatacaaccgtagtattttttatatcactccaacaaatacttgtttggagacaaagtatctcaaaccatggtatttagtatacatgtactagaagctagtcatagacaaaaactttgggttggagtggtgttttaaatactccaaaaataccatggtaactactaaacctgtaaaccatgatattcaaaacagggttttttcccatggtagccaaacatctcttagcaaaaaatatcataatattcttcaataccatggttttatctcaaaactgcaaaaatactttgcttccaaacacccccttaattttttttgtttctggcattttcttcattgcagagaggtgcaatagacgagaagataaaaaagaaagaggagatggaacaatttgaggttgagcttaaagcaatgcgtgaggctgcggaatggagacgaatacaaggtgtatcactcgcaggtgatgatgaacttttagcaggtccaaaagagtcacagagacctacgagagatgaatggatgaccacattgccacctgagagaaaagcaggagtgccaatgcattcaactacatcatttagtatgaatggtaaagaaggacgtggagacacaagtgtctggactgatacccctcttgatagagcacaaaaagcacaacaaagctatctagaagcctacaataagacaaaggcaattgcagaaggcgacgacgtgaagagcaagaacccggatgcttcaatcgtagataaatacaacacctccaaacgatcagtgtcccttgtgcagaagcaccgagagagtaaaaaggagaaaaagaagcaaaagcagcaggagaaagaggaatgggagggaagccacccatggaagccatgggaccgggagaaggatctgtctgctgggcgccagaatgtggccttagacgcagagaacatgtcgcaaggattatcttcccgtttcgcatctggtgctgttcagcggaacttcctgtgagctgtgtggaaagatactcctggagcttggtctaatcgatgattaatgtccagttattacatcctggtcggcagatggcaaagataatgctgacatataaaaacgagttatgttaccaaggaccatcgtcctgtaatatcgatcgtgcttgttgtgcttattttctcagtgtattatcgggtgagctaaaatggtgccatagtttgttcgtacgatacaattactttttttttcaaac

SEQ ID NO: 14861 - DNA, 2337 bp, Zea Mays
atagacactggatgtctggatggcatagcgctaaatttgagaccggcaaaatagcaatttttccccctgtgagcccgcgacgcagcgcgaggtgcggccccgtcccctcgccaccggaggagcaggacgacgaggtggcgccggcgcgaggtagtcgcgcgcctggaagagcggcggcatcagagtcgcaggcggaggcgaggaagtgaggggagagccctatagccaccgccgcggggcgtcctgctcgctgcacgcactcccaccattttgtcccaactcgaagctcagactcgtgctgtcgtgcacttcccctcccctagcatcccaagctcctcactgagaaaacaggagatgggaagagacggggaacagactaggcgccggagccgcaagagatcccgcgacgcctccccctcctcgtcggattccgattccttcgactccccatcctctccgagcagtagccctgagcgacggagccgcagcagtaagcggaatagatcatcctcatcgcaccgccacagccgcaagaaaagcgaccggtcgcggagatcccgcgacgaggaccgccggcggcggagaagacggggccaggagagaaagcggcacggtggggatggtggcaggtcctccgactcccaatcgtcggaggaggatagggcggaggaggcgcgggagatcgtccgagatatactcatcgaattgccggccatagccgaagagcttcgccagcttctccaaattatagacagtggtgaaagcattgatatttctggaatttctgacaaactattggtgaagcgcttgaagaaacttttccgatctctgagattgaaagaaagtgcaagtggggcttacttgttgccttcaaaaaatgttcctacgcttgatattgttggatcattactattagcaagttccaaacttgcagacaacaaaagtggaaagccagtgtcaccaaatagagaagcactacaacaggctaactttgatgtgcaaaataaagataaagattatattgtttccgaagagccaaaaattgttgatgtggaagaggaacctcctaaaagaaggataattggtcctgcaatgccatctcgtgaattattggctgcagcagctgaaatgacagaggctcttaggtgccgggatgctgaactggaagccaatgatgatttgctcataggccctccaccgcctgccgtagttgctgaagctgcatctgcaaatgaagctgagcgatttgaagaggttactagaatattggcagctgacacaaattcaccttatgaggttttgggggtaaattggaagatgtcaactgataacatgaagaaaaggtattggaagttgtctcttttagtgcacccggacaaatgtccacatccttccgcacaagaggcattcgtgaaattaaataatgccttcaaagacttacaagaccctgataagagaggtgcaatagacgagaagataaaaaagaaagaggagatggaacaatttgaggttgagcttaaagcaatgcgtgaggctgcggaatggagacgaatacaaggtgtatcactcgcaggtgatgatgaacttttagcaggtccaaaagagtcacagagacctacgagagatgaatggatgaccacattgccacctgagagaaaagagtgccaatgcattcaactacatcatttagtatgaatggtaaagaaggacgtggagacacaagtgtctggactgatacccctcttgatagagcacaaaaagcacaacaaagctatctagaagcctacaataagacaaaggcaattgcagaaggcgacgacgtgaagagcaagaacccggatgcttcaatcgtagataaatacaacacctccaaacgatcagtgtcccttgtgcagaagcaccgagagagtaaaaaggagaaaaagaagcaaaagcagcaggagaaagaggaatgggagggaagccacccatggaagccatgggaccgggagaaggatctgtctgctgggcgccagaatgtggccttagacgcagagaacatgtcgcaaggattatcttcccgtttcgcatctggtgctgttcagcggaacttcctgtgagctgtgtggaaagatactcctggagcttggtctaatcgatgattaatgtccagttattacatcctggtcggcagatggcaaagataatgctgacatataaaaacgagttatgttaccaaggaccatcgtcctgtaatatcgatcgtgcttgttgtgcttattttctcagtgtattatcgggtgagctaaaatggtgccatagtttgttcgtacgatacaattactttttttttcaaac

SEQ ID NO: 14862 - DNA, 2335 bp, Zea Mays
atagacactggatgtctggatggcatagcgctaaatttgagaccggcaaaatagcaatttttccccctgtgagcccgcgacgcagcgcgaggtgcggccccgtcccctcgccaccggaggagcaggacgacgaggtggcgccggcgcgaggtagtcgcgcgcctggaagagcggcggcatcagagtcgcaggcggaggcgaggaagtgaggggagagccctatagccaccgccgcggggcgtcctgctcgctgcacgcactcccaccattttgtcccaactcgaagctcagactcgtgctgtcgtgcacttcccctcccctagcatcccaagctcctcactgagaaaacaggagatgggaagagacggggaacagactaggcgccggagccgcaagagatcccgcgacgcctccccctcctcgtcggattccgattccttcgactccccatcctctccgagcagtagccctgagcgacggagccgcagcagtaagcggaatagatcatcctcatcgcaccgccacagccgcaagaaaagcgaccggtcgcggagatcccgcgacgaggaccgccggcggcggagaagacggggccaggagagaaagcggcacggtggggatggtggcaggtcctccgactcccaatcgtcggaggaggatagggcggaggaggcgcgggagatcgtccgagatatactcatcgaattgccggccatagccgaagagcttcgccagcttctccaaattatagacagtggtgaaagcattgatatttctggaatttctgacaaactattggtgaagcgcttgaagaaacttttccgatctctgagattgaaagaaagtgcaagtggggcttacttgttgccttcaaaaaatgttcctacgcttgatattgttggatcattactattagcaagttccaaacttgcagacaacaaaagtggaaagccagtgtcaccaaatagagaagcactacaacaggctaactttgatgtgcaaaataaagataaagattatattgtttccgaagagccaaaaattgttgatgtggaagaggaacctcctaaaagaaggataattggtcctgcaatgccatctcgtgaattattggctgcagcagctgaaatgacagaggctcttagggatgctgaactggaagccaatgatgatttgctcataggccctccaccgcctgccgtagttgctgaagctgcatctgcaaatgaagctgagcgatttgaagaggttactagaatattggcagctgacacaaattcaccttatgaggttttgggggtaaattggaagatgtcaactgataacatgaagaaaaggtattggaagttgtctcttttagtgcacccggacaaatgtccacatccttccgcacaagaggcattcgtgaaattaaataatgccttcaaagacttacaagaccctgataagagaggtgcaatagacgagaagataaaaaagaaagaggagatggaacaatttgaggttgagcttaaagcaatgcgtgaggctgcggaatggagacgaatacaaggtgtatcactcgcaggtgatgatgaacttttagcaggtccaaaagagtcacagagacctacgagagatgaatggatgaccacattgccacctgagagaaaagcaggagtgccaatgcattcaactacatcatttagtatgaatggtaaagaaggacgtggagacacaagtgtctggactgatacccctcttgatagagcacaaaaagcacaacaaagctatctagaagcctacaataagacaaaggcaattgcagaaggcgacgacgtgaagagcaagaacccggatgcttcaatcgtagataaatacaacacctccaaacgatcagtgtcccttgtgcagaagcaccgagagagtaaaaaggagaaaaagaagcaaaagcagcaggagaaagaggaatgggagggaagccacccatggaagccatgggaccgggagaaggatctgtctgctgggcgccagaatgtggccttagacgcagagaacatgtcgcaaggattatcttcccgtttcgcatctggtgctgttcagcggaacttcctgtgagctgtgtggaaagatactcctggagcttggtctaatcgatgattaatgtccagttattacatcctggtcggcagatggcaaagataatgctgacatataaaaacgagttatgttaccaaggaccatcgtcctgtaatatcgatcgtgcttgttgtgcttattttctcagtgtattatcgggtgagctaaaatggtgccatagtttgttcgtacgatacaattactttttttttcaaac

SEQ ID NO: 14863 - DNA, 949 bp, Zea Mays
ggcgagtgcaaggtcagcagggactgggaactcgaggggagcaggtagcgaggaagaacggcgagaggtgcaatagacgagaagataaaaaagaaagaggagatggaacaatttgaggttgagcttaaagcaatgcgtgaggctgcggaatggagacgaatacaaggtgtatcactcgcaggtgatgatgaacttttagcaggtccaaaagagtcacagagacctacgagagatgaatggatgaccacattgccacctgagagaaaagcaggagtgccaatgcattcaactacatcatttagtatgaatggtaaagaaggacgtggagacacaagtgtctggactgatacccctcttgatagagcacaaaaagcacaacaaagctatctagaagcctacaataagacaaaggcaattgcagaaggcgacgacgtgaagagcaagaacccggatgcttcaatcgtagataaatacaacacctccaaacgatcagtgtcccttgtgcagaagcaccgagagagtaaaaaggagaaaaagaagcaaaagcagcaggagaaagaggaatgggagggaagccacccatggaagccatgggaccgggagaaggatctgtctgctgggcgccagaatgtggccttagacgcagagaacatgtcgcaaggattatcttcccgtttcgcatctggtgctgttcagcggaacttcctgtgagctgtgtggaaagatactcctggagcttggtctaatcgatgattaatgtccagttattacatcctggtcggcagatggcaaagataatgctgacatataaaaacgagttatgttaccaaggaccatcgtcctgtaatatcgatcgtgcttgttgtgcttattttctcagtgtattatcgggtgagctaaaatggtgccatagtttgttcgtacgatacaattactttttttttcaaac

SEQ ID NO: 14864 - DNA, 927 bp, Zea Mays
cctaatggcaccgtcgaaggggaaacctcaccctgacacagggaggtgcaatagacgagaagataaaaaagaaagaggagatggaacaatttgaggttgagcttaaagcaatgcgtgaggctgcggaatggagacgaatacaaggtgtatcactcgcaggtgatgatgaacttttagcaggtccaaaagagtcacagagacctacgagagatgaatggatgaccacattgccacctgagagaaaagcaggagtgccaatgcattcaactacatcatttagtatgaatggtaaagaaggacgtggagacacaagtgtctggactgatacccctcttgatagagcacaaaaagcacaacaaagctatctagaagcctacaataagacaaaggcaattgcagaaggcgacgacgtgaagagcaagaacccggatgcttcaatcgtagataaatacaacacctccaaacgatcagtgtcccttgtgcagaagcaccgagagagtaaaaaggagaaaaagaagcaaaagcagcaggagaaagaggaatgggagggaagccacccatggaagccatgggaccgggagaaggatctgtctgctgggcgccagaatgtggccttagacgcagagaacatgtcgcaaggattatcttcccgtttcgcatctggtgctgttcagcggaacttcctgtgagctgtgtggaaagatactcctggagcttggtctaatcgatgattaatgtccagttattacatcctggtcggcagatggcaaagataatgctgacatataaaaacgagttatgttaccaaggaccatcgtcctgtaatatcgatcgtgcttgttgtgcttattttctcagtgtattatcgggtgagctaaaatggtgccatagtttgttcgtacgatacaattactttttttttcaaac

SEQ ID NO: 14865 - DNA, 614 bp, Zea Mays
aaaaaactgacctgcaaattaatgcttctatagctagctccatattggctttgccgcctgctgtaagttgactgctgctaatggactgtcaatgttgttgtcatgccctgagaacgctgcggttgcaactccaatcttaggacgagaacagatcatacatatataatgcaatgaaatgcacattatgtattgcagcgcatcagatcttggcagtgatgctgtggagagtgcgaatttgaaggggtgttatcatatgttgggacatacaacaatcggaattgcccaacaaaaactaccttaaggagtccaatataatggcacgagcaaaaaaggacaaagtaatagtagcgaaggtaaaactgagtcagatttcaaaccatatatgaaagcaataacaattgattaattcgtctaacttaattctctatatacgtacctatatatattgtaaagccaacacaagaatttgaatggccgaaacaaaaaatggagaacaagtgttaagaagaagactactctatagatcctatcatcaaaaagttataatgaaatatcaaaaggcgaagaaggtagcgacggaaggaagaatttttcaattttccttttatactctc

SEQ ID NO: 14866 - DNA, 2770 bp, Zea Mays
ctcctccctcactcttttgacaagtcaccatggccgcggtgcgcgatcagggtttgcagtgcgctggtccgtagcctagccgccacactcttgcgcgcttggcaagctaggcttcacgctgccgttgcgacggccgacggcgccgcttcccagagacgatggagcgaggacggggtggtagtggcggtcgcggtggcggccgcacgtttcagaggaacaatgcgggggaggagtggcccaacctcgtcggcgtggtgctgtcgtggagcctagcggatgtcatgaacaaggacctcttcaaggacaaggtcaagcagataccgtccacgttccccaacctcaagagctacctggagtgctacacctctccattgctggaggagctgagagctgagatgtcgtccagcctggaatccctgtcaaccgtgccttctgtcaggatctcacggatagaagaaaagagagacaaacacgaaatttatctggcttctgattgccaggttgctaagccacacaatcgccctgaatgctacactccaagtgtcggtgatgtaattctcttgtccgatgtgaagccgggccacatttctgatactactcgcaacggaaggccgtaccgagttgcctttgtcacagatgcggatggaggggatgaatacgacgactcaccaccggctaagtatggcatcgtagcgtcaggcaaaatcgatgccgccgatgacgaacgccaagatggtaaaagtacctcactttttgctgcttgtctgctcaacattgtgacatacatccggatatggcgttgccttgattatgaagcactcagaacaaaccgaggccttatagagaagatggtaaactatcagccgatttcatctacttcagagaacagcacggaggatgctggtccaactgacagcgtggagatatggaccaagttgtctgcaatggaacttaacacttctcagaacgatgctgtcttgaactgcatttccaaaatgcactccaagagcagcacatttacccttatctggggtcctcctggcacagggaagacaaaaacaatcagtgtgctgctttggttaatgagagaaatgaagcatggtacgctcgtatgcgcaccaacaaaccttgccatcaaacaggttgcttcacgtttcttgaagctggtccaagagcactctggcgacacaaggtgcttgggagatgtcctattgattggcaacaaagagcgcatgtgtgttgatggtgacctcaaacaaatatatttatatgaccgtgtaaggaggctttttggctgctttgcaccattgaccggatggaaacatcacctatcttccctgtctgattttcttgagaatggctactcacagtacctccaacatctacaagacagtcaggaaggtgatacgccttcctttttctcttacgccagaaaaagatttgccgttatttatatggagctcagaagatgtttcaatgatttgttgttacatgtcccaaaatccagtattctggaagtgaattacaacacctctttgaaaggttgagttcacttggacacgaaaagcatctacttaatatgcaatacagaatgcatccttccattagtattttcccgaacactagcttttatgaagggaggatctcagatgccactaatgtcatggaaaaagaacaccgaaggatgtatcttccaggttctatgtttggtccttactcatttataaatattgaagatggaagggaggaacgtgatgaacttggccatagcaaaagaaactttgtagaagctgctgtcattgaagaaatattataccgtctccgaagagcttgctttaaaaccaaaaggaaagtcacggttggtgtcatatgcccatacaatgctcaagttgtagcaatccaagggaaaatagagaaaatgaggttcgacccattgcaagtaaaaactaattctgtcgatggctttcaaggtggtgaagaagacatcatcattttatcaactgtgaggtcaaactcggttgggaaggtaggttttctttcaaacgcacagcgggcaaatgtgtgtttgacacgggcaagacattgcctttggatcctaggaaatgcaacaactctagcaagcagtggatctatttggtctgatctagttcgtgatgcaaaggataggcggtgtttcttcaatgccagtagcgactatgttatctctcacgtgattgctaagcaaaggagagatctcgacagagttaatgttgaaaagagcatccatatctcaagttccaaaaactgcagggtttgggttgaaacgcgatccccaaatgacctgaatgaacagggcacttcttcgacgagtgtttcacattacgctggaatcccgtcaagtgacattgttgttgtttctgaattccagcgtccaagcaataaaaatgaggatgtcgaggatataactgtcattccaaataaagagaatgataaggatatcaatgctatgcccgttattccagataaagggaatgtcgttgatggcaaccatatcctcgccattccttgcgccatgttgagtaatctagctagatggtgtatccgttcgttccgatcttaattgttcctttatgtctcctatccctttttactcctaagtttacagcattatatataagtgtctctccataacatggtcggatgtttgatttttgtaatgtgggtttgaataatgaaaatgtatgtttgggcctttttagcctcccttgactgttgagagaaaaaaaagcta

SEQ ID NO: 14867 - DNA, 3089 bp, Zea Mays
ctcctccctcactcttttgacaagtcaccatggccgcggtgcgcgatcagggtttgcagtgcgctggtccgtagcctagccgccacactcttgcgcgcttggcaagctaggcttcacgctgccgttgcgacggccgacggcgccgcttcccagagacgatggagcgaggacggggtggtagtggcggtcgcggtggcggccgcacgtttcagaggaacaatgcgggggaggagtggcccaacctcgtcggcgtggtgctgtcgtggagcctagcggatgtcatgaacaaggacctcttcaaggacaaggtcaagcagataccgtccacgttccccaacctcaagagctacctggagtgctacacctctccattgctggaggagctgagagctgagatgtcgtccagcctggaatccctgtcaaccgtgccttctgtcaggatctcacggatagaagaaaagagagacaaacacgaaatttatctggcttctgattgccaggttgctaagccacacaatcgccctgaatgctacactccaagtgtcggtgatgtaattctcttgtccgatgtgaagccgggccacatttctgatactactcgcaacggaaggccgtaccgagttgcctttgtcacagatgcggatggaggggatgaatacgacgactcaccaccggctaagtatggcatcgtagcgtcaggcaaaatcgatgccgccgatgacgaacgccaagatgagaacagcacggaggatgctggtccaactgacagcgtggagatatggaccaagttgtctgcaatggaacttaacacttctcagaacgatgctgtcttgaactgcatttccaaaatgcactccaagagcagcacatttacccttatctggggtcctcctggcacagggaagacaaaaacaatcagtgtgctgctttggttaatgagagaaatgaagcatggtacgctcgtatgcgcaccaacaaaccttgccatcaaacaggttgcttcacgtttcttgaagctggtccaagagcactctggcgacacaaggtgcttgggagatgtcctattgattggcaacaaagagcgcatgtgtgttgatggtgacctcaaacaaatatatttatatgaccgtgtaaggaggctttttggctgctttgcaccattgaccggatggaaacatcacctatcttccctgtctgattttcttgagaatggctactcacagtacctccaacatctacaagacagtcaggaaggtgatacgccttcctttttctcttacgccagaaaaagatttgccgttatttatatggagctcagaagatgtttcaatgatttgttgttacatgtcccaaaatccagtattctggaagtgaattacaacagtatccttttacttcttgaaatgcttgaagagttcaaccacatgattcagtgcaggtattttggggatgaaattaggaaagttttcttgtacagtaatgatgaacctgatcagacaaactcgagtgtagtcactcttggcaaaatgaggataaaatgccttgaggaactgagcactctgttaagttgcttgaagcttcctctaacatcctcaaagcctaccattcgtgatttctgcattaaaagcgcttccatagttttctgtactgtatctagctccacaaaaataaccgctaacaaaaaggtagagtttcttgtggttgatgaggctgcccagctgaaagaatgtgaaacactgatccctttgcgtctgtggaccttaaagcatgctgttctaattggtgatgagtgccaattaccagcaacagtcaaaagcaaggtttgcactgatgcattatttggaagaagcctctttgaaaggttgagttcacttggacacgaaaagcatctacttaatatgcaatacagaatgcatccttccattagtattttcccgaacactagcttttatgaagggaggatctcagatgccactaatgtcatggaaaaagaacaccgaaggatgtatcttccaggttctatgtttggtccttactcatttataaatattgaagatggaagggaggaacgtgatgaacttggccatagcaaaagaaactttgtagaagctgctgtcattgaagaaatattataccgtctccgaagagcttgctttaaaaccaaaaggaaagtcacggttggtgtcatatgcccatacaatgctcaagttgtagcaatccaagggaaaatagagaaaatgaggttcgacccattgcaagtaaaaactaattctgtcgatggctttcaaggtggtgaagaagacatcatcattttatcaactgtgaggtcaaactcggttgggaaggtaggttttctttcaaacgcacagcgggcaaatgtgtgtttgacacgggcaagacattgcctttggatcctaggaaatgcaacaactctagcaagcagtggatctatttggtctgatctagttcgtgatgcaaaggataggcggtgtttcttcaatgccagtagcgactatgttatctctcacgtgattgctaagcaaaggagagatctcgacagagttaatgttgaaaagagcatccatatctcaagttccaaaaactgcagggtttgggttgaaacgcgatccccaaatgacctgaatgaacagggcacttcttcgacgagtgtttcacattacgctggaatcccgtcaagtgacattgttgttgtttctgaattccagcgtccaagcaataaaaatgaggatgtcgaggatataactgtcattccaaataaagagaatgataaggatatcaatgctatgcccgttattccagataaagggaatgtcgttgatggcaaccatatcctcgccattccttgcgccatgttgagtaatctagctagatggtgtatccgttcgttccgatcttaattgttcctttatgtctcctatccctttttactcctaagtttacagcattatatataagtgtctctccataacatggtcggatgtttgatttttgtaatgtgggtttgaataatgaaaatgtatgtttgggcctttttagcctcccttgactgttgagagaaaaaaaagcta

SEQ ID NO: 14868 - DNA, 3096 bp, Zea Mays
ctcctccctcactcttttgacaagtcaccatggccgcggtgcgcgatcagggtttgcagtgcgctggtccgtagcctagccgccacactcttgcgcgcttggcaagctaggcttcacgctgccgttgcgacggccgacggcgccgcttcccagagacgatggagcgaggacggggtggtagtggcggtcgcggtggcggccgcacgtttcagaggaacaatgcgggggaggagtggcccaacctcgtcggcgtggtgctgtcgtggagcctagcggatgtcatgaacaaggacctcttcaaggacaaggtcaagcagataccgtccacgttccccaacctcaagagctacctggagtgctacacctctccattgctggaggagctgagagctgagatgtcgtccagcctggaatccctgtcaaccgtgccttctgtcaggatctcacggatagaagaaaagagagacaaacacgaaatttatctggcttctgattgccaggttgctaagccacacaatcgccctgaatgctacactccaagtgtcggtgatgtaattctcttgtccgatgtgaagccgggccacatttctgatactactcgcaacggaaggccgtaccgagttgcctttgtcacagatgcggatggaggggatgaatacgacgactcaccaccggctaagtatggcatcgtagcgtcaggcaaaatcgatgccgccgatgacgaacgccaagatggtaaaagtacctcactttttgctgcttgtctgctcaacattgtgacatacatccggatatggcgttgccttgattatgaagcactcagaacaaaccgaggccttatagagaagatggtaaactatcagccgatttcatctacttcagagaacagcacggaggatgctggtccaactgacagcgtggagatatggaccaagttgtctgcaatggaacttaacacttctcagaacgatgctgtcttgaactgcatttccaaaatgcactccaagagcagcacatttacccttatctggggtcctcctggcacagggaagacaaaaacaatcagtgtgctgctttggttaatgagagaaatgaagcatggtacgctcgtatgcgcaccaacaaaccttgccatcaaacaggttgcttcacgtttcttgaagctggtccaagagcactctggcgacacaaggtgcttgggagatgtcctattgattggcaacaaagagcgcatgtgtgttgatggtgacctcaaacaaatatatttatatgaccgtgtaaggaggctttttggctgctttgcaccattgaccggatggaaacatcacctatcttccctgtctgattttcttgagaatggctactcacagtacctccaacatctacaagacagtcaggaaggtgatacgccttcctttttctcttacgccagaaaaagatttgccgttatttatatggagctcagaagatgtttcaatgatttgttgttacatgtcccaaaatccagtattctggaagtgaattacaacagtatccttttacttcttgaaatgcttgaagagttcaaccacatgattcagtgcaggtattttggggatgaaattaggaaagttttcttgtacagtaatgatgaacctgatcagacaaactcgagtgtagtcactcttggcaaaatgaggataaaatgccttgaggaactgagcactctgttaagttgcttgaagcttcctctaacatcctcaaagcctaccattcgtgatttctgcattaaaagcgcttccatagttttctgtactgtatctagctccacaaaaataaccgctaacaaaaaggtagagtttcttgtggttgatgaggctgcccagctgaaagaatgtgaaacactgatccctttgcgtctgtggaccttaaagcatgctgttctaattggtgatgagtgccaattaccagcaacagtcaaaagcaaggtttgcactgatgcattatttggaagaagcctctttgaaaggttgagttcacttggacacgaaaagcatctacttaatatgcaatacagaatgcatccttccattagtattttcccgaacactagcttttatgaagggaggatctcagatgccactaatgtcatggaaaaagaacaccgaaggatgtatcttccaggttctatgtttggtccttactcatttataaatattgaagatggaagggaggaacgtgatgaacttggccatagcaaaagaaactttgtagaagctgctgtcattgaagaaatattataccgtctccgaagagcttgctttaaaaccaaaaggaaagtcacggttggtgtcatatgcccatacaatgctcaagttgtagcaatccaagggaaaatagagaaaatgaggttcgacccattgcaagtaaaaactaattctgtcgatggctttcaaggtggtgaagaagacatcatcattttatcaactgtgaggtcaaactcggttgggaagacattgcctttggatcctaggaaatgcaacaactctagcaagcagtggatctatttggtctgatctagttcgtgatgcaaaggataggcggtgtttcttcaatgccagtagcgactatgttatctctcacgtgattgctaagcaaaggagagatctcgacagagttaatgttgaaaagagcatccatatctcaagttccaaaaactgcagggtttgggttgaaacgcgatccccaaatgacctgaatgaacagggcacttcttcgacgagtgtttcacattacgctggaatcccgtcaagtgacattgttgttgtttctgaattccagcgtccaagcaataaaaatgaggatgtcgaggatataactgtcattccaaataaagagaatgataaggatatcaatgctatgcccgttattccagataaagggaatgtcgttgatggcaaccatatcctcgccattccttgcgccatgttgagtaatctagctagatggtgcatggaggttctgccttggtctccatgtgggtacggttgtacacctctgtagagatcattttggatgcataaacttcgggcataagcatttggttttttttctttt

SEQ ID NO: 14869 - DNA, 2920 bp, Zea Mays
cagggtttgcagtgcgctggtccgtagcctagccgccacactcttgcgcgcttggcaagctaggcttcacgctgccgttgcgacggccgacggcgccgcttcccagagacgatggagcgaggacggggtggtagtggcggtcgcggtggcggccgcacgtttcagaggaacaatgcgggggaggagtggcccaacctcgtcggcgtggtgctgtcgtggagcctagcggatgtcatgaacaaggacctcttcaaggacaaggtcaagcagataccgtccacgttccccaacctcaagagctacctggagtgctacacctctccattgctggaggagctgagagctgagatgtcgtccagcctggaatccctgtcaaccgtgccttctgtcaggatctcacggatagaagaaaagagagacaaacacgaaatttatctggcttctgattgccaggttgctaagccacacaatcgccctgaatgctacactccaagtgtcggtgatatgcggatggaggggatgaatacgacgactcaccaccggctaagtatggcatcgtagcgtcaggcaaaatcgatgccgccgatgacgaacgccaagatggtaaaagtacctcactttttgctgcttgtctgctcaacattgtgacatacatccggatatggcgttgccttgattatgaagcactcagaacaaaccgaggccttatagagaagatggtaaactatcagccgatttcatctacttcagagaacagcacggaggatgctggtccaactgacagcgtggagatatggaccaagttgtctgcaatggaacttaacacttctcagaacgatgctgtcttgaactgcatttccaaaatgcactccaagagcagcacatttacccttatctggggtcctcctggcacagggaagacaaaaacaatcagtgtgctgctttggttaatgagagaaatgaagcatggtacgctcgtatgcgcaccaacaaaccttgccatcaaacaggttgcttcacgtttcttgaagctggtccaagagcactctggcgacacaaggtgcttgggagatgtcctattgattggcaacaaagagcgcatgtgtgttgatggtgacctcaaacaaatatatttatatgaccgtgtaaggaggctttttggctgctttgcaccattgaccggatggaaacatcacctatcttccctgtctgattttcttgagaatggctactcacagtacctccaacatctacaagacagtcaggaaggtattttggggatgaaattaggaaagttttcttgtacagtaatgatgaacctgatcagacaaactcgagtgtagtcactcttggcaaaatgaggataaaatgccttgaggaactgagcactctgttaagttgcttgaagcttcctctaacatcctcaaagcctaccattcgtgatttctgcattaaaagcgcttccatagttttctgtactgtatctagctccacaaaaataaccgctaacaaaaaggtagagtttcttgtggttgatgaggctgcccagctgaaagaatgtgaaacactgatccctttgcgtctgtggaccttaaagcatgctgttctaattggtgatgagtgccaattaccagcaacagtcaaaagcaaggtttgcactgatgcattatttggaagaagcctctttgaaaggttgagttcacttggacacgaaaagcatctacttaatatgcaatacagaatgcatccttccattagtattttcccgaacactagcttttatgaagggaggatctcagatgccactaatgtcatggaaaaagaacaccgaaggatgtatcttccaggttctatgtttggtccttactcatttataaatattgaagatggaagggaggaacgtgatgaacttggccatagcaaaagaaactttgtagaagctgctgtcattgaagaaatattataccgtctccgaagagcttgctttaaaaccaaaaggaaagtcacggttggtgtcatatgcccatacaatgctcaagttgtagcaatccaagggaaaatagagaaaatgaggttcgacccattgcaagtaaaaactaattctgtcgatggctttcaaggtggtgaagaagacatcatcattttatcaactgtgaggtcaaactcggttgggaaggtaggttttctttcaaacgcacagcgggcaaatgtgtgtttgacacgggcaagacattgcctttggatcctaggaaatgcaacaactctagcaagcagtggatctatttggtctgatctagttcgtgatgcaaaggataggcggtgtttcttcaatgccagtagcgactatgttatctctcacgtgattgctaagcaaaggagagatctcgacagagttaatgttgaaaagagcatccatatctcaagttccaaaaactgcagggtttgggttgaaacgcgatccccaaatgacctgaatgaacagggcacttcttcgacgagtgtttcacattacgctggaatcccgtcaagtgacattgttgttgtttctgaattccagcgtccaagcaataaaaatgaggatgtcgaggatataactgtcattccaaataaagagaatgataaggatatcaatgctatgcccgttattccagataaagggaatgtcgttgatggcaaccatatcctcgccattccttgcgccatgttgagtaatctagctagatggtgtatccgttcgttccgatcttaattgttcctttatgtctcctatccctttttactcctaagtttacagcattatatataagtgtctctccataacatggtcggatgtttgatttttgtaatgtgggtttgaataatgaaaatgtatgtttgggcctttttagcctcccttgactgttgagagaaaaaaaagcta

SEQ ID NO: 14870 - DNA, 891 bp, Zea Mays
gctgaaaggacaacacttgcagagttccgcctctcggaacctcactccttcctctcccagtccccagcttcaccgaggcatacggcataccataccggcaccggcagcgagcagtcgggagccatggctccgccgctcctgctcttcttcctcctcctccccctcctcacggccctcgctgacggacaccagcacctgtcctcctacggctcctccgcgctctccgattggcgccccgccaaggcatcctactacgccgccgaccccgaagacgccatcgtgttaagtgcctccgcgaaggtggtgtcaggttctccgtcaacggtcggcacttcttcttcacagtcctaatcagcaacgttggtggcgcgggtgatgttaggtctgtgaagatcaaaggaacggagctaggatggctccctatgggccgcaactggggccaggtgtggcacatcaactgtgacatgaggggacagcctctatcgtttgagctcagctcaagcgatagcaagacgctgaccagtttcaacgtcgtgcccaaggattgggagttcggcaagacatacacggggaagcagtttcttctgtagagaatggagtgccgcaagatcagcttacagttcctcatttttcttctgatcctacgagttgggctgtggtgtatgtatattcctctgcagaagaagcaatatcgttattaggagaaaatcacttagtgcagggctcagatagttactatggctcataacgccttttcatgtacccttcatagttgtctaaagaggcttgatgtatcattcaaaataggaggccggattcgggtatgtccggtgtattacaatatattttttttcctggcaagcaatgataaaatgtctctccatttctgta

SEQ ID NO: 14871 - DNA, 623 bp, Zea Mays
gcgcatggcaggtgttaagtgcctccgcgaaggtggtgtcaggttctccgtcaacggtcggcacttcttcttcacagtcctaatcagcaacgttggtggcgcgggtgatgttaggtctgtgaagatcaaaggaacggagctaggatggctccctatgggccgcaactggggccaggtgtggcacatcaactgtgacatgaggggacagcctctatcgtttgagctcagctcaagcgatagcaagacgctgaccagtttcaacgtcgtgcccaaggattgggagttcggcaagacatacacggggaagcagtttcttctgtagagaatggagtgccgcaagatcagcttacagttcctcatttttcttctgatcctacgagttgggctgtggtgtatgtatattcctctgcagaagaagcaatatcgttattaggagaaaatcacttagtgcagggctcagatagttactatggctcataacgccttttcatgtacccttcatagttgtctaaagaggcttgatgtatcattcaaaataggaggccggattcgggtatgtccggtgtattacaatatattttttttcctggcaagcaatgataaaatgtctctccatttctgta

SEQ ID NO: 14872 - DNA, 1536 bp, Zea Mays
gtaaaattgacaatgactaaataataaaactaaaaaaaactatacaactgaaaacagttcaaaaccctcggccgaatagtaaggcaaagccgcaaaggcttatccttccgagtttccaccctttacaatggcgagcgctcccgccggctttgcccccaccgtcgctgcttccacaagcttcggcttcagccgcttcactatcgtggcatgccccttcccctcgcgcactcatcttccagcggcctcctccgttggggttcgcaatcagcagcgcgcgtccactgccaccgcctgcctgccgccgccgaatacctcccatggcgccgccaccaggctgtacgtcagcggtctttcgttccgcacaaccgaacggagcctccgggacgcgttcgagaagtttggtgaccttacggaagtttgtctcgtgatggatagagtagcgaagcgaccgagaggtttcgctttcctttcttacaccggggaggaggaagccaggggcgccatggaagggatgcacgggaagttcctggatggcagagtgatctttgtcgaggttgcgaaacgaagagctgaagcctgaaggatcgcgcccaaatattgctaaaaaaaaacttgattgttggttccagcaaagtccctgatgagacacacattgatgcaggcaaggtttaggtgaagtttagatgtgaacagaggaaccgaagaaaccttagggcttgtttgggtaaccttggattagaatggattgagggggtataaggtgtattgaagtgtaatatgaactaatttctctttcaatccctaaaatacacttcaatccacttcaatccctctttatccaaacaaggccttagcaacattcggtcgtgtagctgttgtcatttcattgttttacaaaacaacattcgtaatttacatatataggtcatacaatatggtctcctactacaactattacactgcttgctgcattgtcttgaactatacaaatgacagacaggaaccacagccagtcagtcacctccatcccttttgtggaaggctgcttcaccagtgtcaatctgcctctcataagtaacagcagaacgcctgaatggccgtcctgcaaaacatcagcactgctgtactgtacagtcatacgtcttcaatatcagcaaaaaaatatatatatccagagcagcggtggctggcgagggcgcaaaaattttacaggcacagccttgtcatctctctatctgcctccccaggtgcctctgactgcagcagcatcttgctctgaggcgtgcgcttgcacggtgcaaaacctcgaaggcagtctggaactacgctcgcgcatttccttgaacctggaacaggtgccactttgtctccgtcgttgtttactttcgtggattctacagaatctgaattctgagctgtttcaaccacgctgctggaggaggttgtgacggacggctccgtccacgatccttgtgccctcgtgacctcgcagtctgctgcggcttgagacggttggttgtcctgctgcttgtttga

SEQ ID NO: 14873 - DNA, 1538 bp, Zea Mays
gtaaaattgacaatgactaaataataaaactaaaaaaaactatacaactgaaaacagttcaaaaccctcggccgaatagtaaggcaaagccgcaaaggcttatccttccgagtttccaccctttacaatggcgagcgctcccgccggctttgcccccaccgtcgctgcttccacaagcttcggcttcagccgcttcactatcgtggcatgccccttcccctcgcgcactcatcttccagcggcctcctccgttggggttcgcaatcagcagcgcgcgtccactgccaccgcctgcctgccgccgccgaatacctcccatggcgccgccaccaggctgtacgtcagcggtctttcgttccgcacaaccgaacggagcctccgggacgcgttcgagaagtttggtgaccttacggaagtttgtctcgtgatggatagagtagcgaagcgaccgagaggtttcgctttcctttcttacaccggggaggaggaagccaggggcgccatggaagggatgcacgggaagagttcctggatggcagagtgatctttgtcgaggttgcgaaacgaagagctgaagcctgaaggatcgcgcccaaatattgctaaaaaaaaacttgattgttggttccagcaaagtccctgatgagacacacattgatgcaggcaaggtttaggtgaagtttagatgtgaacagaggaaccgaagaaaccttagggcttgtttgggtaaccttggattagaatggattgagggggtataaggtgtattgaagtgtaatatgaactaatttctctttcaatccctaaaatacacttcaatccacttcaatccctctttatccaaacaaggccttagcaacattcggtcgtgtagctgttgtcatttcattgttttacaaaacaacattcgtaatttacatatataggtcatacaatatggtctcctactacaactattacactgcttgctgcattgtcttgaactatacaaatgacagacaggaaccacagccagtcagtcacctccatcccttttgtggaaggctgcttcaccagtgtcaatctgcctctcataagtaacagcagaacgcctgaatggccgtcctgcaaaacatcagcactgctgtactgtacagtcatacgtcttcaatatcagcaaaaaaatatatatatccagagcagcggtggctggcgagggcgcaaaaattttacaggcacagccttgtcatctctctatctgcctccccaggtgcctctgactgcagcagcatcttgctctgaggcgtgcgcttgcacggtgcaaaacctcgaaggcagtctggaactacgctcgcgcatttccttgaacctggaacaggtgccactttgtctccgtcgttgtttactttcgtggattctacagaatctgaattctgagctgtttcaaccacgctgctggaggaggttgtgacggacggctccgtccacgatccttgtgccctcgtgacctcgcagtctgctgcggcttgagacggttggttgtcctgctgcttgtttga

SEQ ID NO: 14874 - DNA, 1595 bp, Zea Mays
aaaaaaactatacaactgaaaacagttcaaaaccctcggccgaatagtaaggcaaagccgcaaaggcttatccttccgagtttccaccctttacaatggcgagcgctcccgccggctttgcccccaccgtcgctgcttccacaagcttcggcttcagccgcttcactatcgtggcatgccccttcccctcgcgcactcatcttccagcggcctcctccgttggggttcgcaatcagcagcgcgcgtccactgccaccgcctgcctgccgccgccgaatacctcccatggcgccgccaccaggctgtacgtcagcggtaggcgctccgatctcagacttcgctcctagatttggtaatcctatgctaggcgccccgactcagcgcactctcttggctcctagatttggtctttcgttccgcacaaccgaacggagcctccgggacgcgttcgagaagtttggtgaccttacggaagtttgtctcgtgatggatagagtagcgaagcgaccgagaggtttcgctttcctttcttacaccggggaggaggaagccaggggcgccatggaagggatgcacgggaagttcctggatggcagagtgatctttgtcgaggttgcgaaacgaagagctgaagcctgaaggatcgcgcccaaatattgctaaaaaaaaacttgattgttggttccagcaaagtccctgatgagacacacattgatgcaggcaaggtttaggtgaagtttagatgtgaacagaggaaccgaagaaaccttagggcttgtttgggtaaccttggattagaatggattgagggggtataaggtgtattgaagtgtaatatgaactaatttctctttcaatccctaaaatacacttcaatccacttcaatccctctttatccaaacaaggccttagcaacattcggtcgtgtagctgttgtcatttcattgttttacaaaacaacattcgtaatttacatatataggtcatacaatatggtctcctactacaactattacactgcttgctgcattgtcttgaactatacaaatgacagacaggaaccacagccagtcagtcacctccatcccttttgtggaaggctgcttcaccagtgtcaatctgcctctcataagtaacagcagaacgcctgaatggccgtcctgcaaaacatcagcactgctgtactgtacagtcatacgtcttcaatatcagcaaaaaaatatatatatccagagcagcggtggctggcgagggcgcaaaaattttacaggcacagccttgtcatctctctatctgcctccccaggtgcctctgactgcagcagcatcttgctctgaggcgtgcgcttgcacggtgcaaaacctcgaaggcagtctggaactacgctcgcgcatttccttgaacctggaacaggtgccactttgtctccgtcgttgtttactttcgtggattctacagaatctgaattctgagctgtttcaaccacgctgctggaggaggttgtgacggacggctccgtccacgatccttgtgccctcgtgacctcgcagtctgctgcggcttgagacggttggttgtcctgctgcttgtttga

SEQ ID NO: 14875 - DNA, 1541 bp, Zea Mays
aaaaaaactatacaactgaaaacagttcaaaaccctcggccgaatagtaaggcaaagccgcaaaggcttatccttccgagtttccaccctttacaatggcgagcgctcccgccggctttgcccccaccgtcgctgcttccacaagcttcggcttcagccgcttcactatcgtggcatgccccttcccctcgcgcactcatcttccagcggcctcctccgttggggttcgcaatcagcagcgcgcgtccactgccaccgcctgcctgccgccgccgaatacctcccatggcgccgccaccaggctgtacgtcagcggtaggcgctccgatctcagacttcgctcctagatttggtctttcgttccgcacaaccgaacggagcctccgggacgcgttcgagaagtttggtgaccttacggaagtttgtctcgtgatggatagagtagcgaagcgaccgagaggtttcgctttcctttcttacaccggggaggaggaagccaggggcgccatggaagggatgcacgggaagttcctggatggcagagtgatctttgtcgaggttgcgaaacgaagagctgaagcctgaaggatcgcgcccaaatattgctaaaaaaaaacttgattgttggttccagcaaagtccctgatgagacacacattgatgcaggcaaggtttaggtgaagtttagatgtgaacagaggaaccgaagaaaccttagggcttgtttgggtaaccttggattagaatggattgagggggtataaggtgtattgaagtgtaatatgaactaatttctctttcaatccctaaaatacacttcaatccacttcaatccctctttatccaaacaaggccttagcaacattcggtcgtgtagctgttgtcatttcattgttttacaaaacaacattcgtaatttacatatataggtcatacaatatggtctcctactacaactattacactgcttgctgcattgtcttgaactatacaaatgacagacaggaaccacagccagtcagtcacctccatcccttttgtggaaggctgcttcaccagtgtcaatctgcctctcataagtaacagcagaacgcctgaatggccgtcctgcaaaacatcagcactgctgtactgtacagtcatacgtcttcaatatcagcaaaaaaatatatatatccagagcagcggtggctggcgagggcgcaaaaattttacaggcacagccttgtcatctctctatctgcctccccaggtgcctctgactgcagcagcatcttgctctgaggcgtgcgcttgcacggtgcaaaacctcgaaggcagtctggaactacgctcgcgcatttccttgaacctggaacaggtgccactttgtctccgtcgttgtttactttcgtggattctacagaatctgaattctgagctgtttcaaccacgctgctggaggaggttgtgacggacggctccgtccacgatccttgtgccctcgtgacctcgcagtctgctgcggcttgagacggttggttgtcctgctgcttgtttga

SEQ ID NO: 14876 - DNA, 3436 bp, Zea Mays
gccgaaaccaaggcggtaggaggaggacgaaggccgctgcggaccttcgtctcaccctcgctgcaccttccttccccccctaccggcccaccccacgccgcgattaattaagcgcgcaccggacctgagtacctgacctcacgcatccatcgaccaaaacggcagctccttttctcccgcggcgttgccgtcgcactcgcacgcacgcactcaccgccggcctgagcctaatcctaatcctaatcctaatccacataccgggacaatccagacgaacgagcgaaccaacgcacggacggccaccagccgctgcgtgcgttcgctttcccccgaaacgtgacccgagccgagctgcagagagagaaaggagaagccgccatgaagcagcagcagctgcagctgcctcctagtcgtcaacgttaaatccctgctcgccaagccactactacgactacgagcaccagccccagtttttctcctctcgcccccgttccccgtcccgactcccgacccaacccatatcagaggttccgtccgttggtggcgctggcgttcccgtgagtcggcccgcgcgcgaaggcggccgtgaccgaccgtccggagcttcatgcgccaggggcggcggctccaccccgtcgtttgatgggcaacgcatgcggcggcgcccttagatccaagtaccagcacagcttcaagcacgccgcgtcgtcgcagcgccgcgcctcctccgagtacagcgccagcgccgtggccgacgactcgcccaggaagcccacgcagccgcccgccaccacggacgcccacgcgccgccaccgccgcccgccaccgccgcagccgccatgaggcgcggcggggccggcgcgccgccggacctggggtccgtgctcggccaccccacccccaacctccgcgacctctacgcgctcggcaggaagctcgggcaggggcagttcggcaccaccttcctctgcaccgagctcgccacgggggtcgactacgcctgcaagtccatctccaagcgcaagctcatcaccagggaggacgtcgacgacgtgcgccgcgagatccagatcatgcaccacctctccggccacaccaacgtcgtcgccatcaagggcgcctacgaggaccagctctacgtccacatcgtcatggagctctgcgccgggggcgagctcttcgaccggatcatacagcgcggccactacagcgagcgcaaggccgccgagctcaccaggatcatcgtcggcgtcgtcgaggcctgccactcgctcggggtcatgcaccgcgacctcaagcccgagaacttcctgctcgtcaacaaggacgacgacctctcgctcaaggccatcgatttcggactctctgtcttcttcaagcctggtcaagttttcaccgatgttgttggtagcccatattatgtagctccagaagttttgttgaaaaattatggaccagcagctgatgtatggacagctggcgtcattctttacattctactaagtggcgtgcctccgttttgggcagaaacacaacaaggaatatttgatgctgtattgaaaggtgtcattgattttgattctgatccgtggcctgtcatatctgatagtgcaaaagatcttataagacggatgctgaatcctcgctctgccaagcgcttaacagcacatgaagttctatgtaatagctgagagcctatcagaagaggaaattgcggggttgaaggaaatgttccagaccatggacactgacaacagtggcgcaattacctacgatgaactaaaagaaggattgagaaaatatggttccacactgaaggacactgagattcgtgatcttatggatgcagctgatatcgacaacaatggaacaattgactacattgaattcatcgctgcaactttgcatctcaataagctggagcgcgaagaacatctcgtggcggccttttcatatttcgacaaagatggtagtggctatatcacagtggatgaactacagcaagcttgcaaagagcataacatgccggatgcttttcttgatgatgtcatcaacgaagctgatcaggataacgatggccgcattgactatggagagtttgttgccatgatgaccaagggcaatatgggagtcggtcgacggacaatgagaaacagcttgaatatcagcatgagggacgcacctggtgcattctgaaacttaacacgatgtacagcttgtggcctagtcacttcggccctgtttgtttcggcttctggcagcttctggccaccaaaagctgctgcggactgccaaacgctcagcttttcagccagcttctataaaattcgttgcggcaaaaaccatccaaaatcaacataaacacataatcggttgagtcgttgtaatagtaggaatccgtcactttctagatcctgagccctataaacaactttatcttcctccacacgtaatcgtaatgatactcagattcttcccacagccagattttcagaaaagctggtcagaaaaaagccgaaacaaacagggccaactgtcttgtcttgctgccctaccaaaccttctgcaaaattttttttcaagatgtttgtcaggtgtatgtgtggatgtgttttttctgattcaactcttgtgattgattccatgaaatgcataacaagatgtccatgccatgcgtgaaagtgaagccgattgtaaatgacggcgctgcccctgcttgactctcagaaacacaaacacccatgttctgaactagctcgccatgtatgcctccagtctcccttgattcatggcatccattcttcatgatgtggatcaagatactctattatgctctcctcaaggcctcaaccaatgccaacaaaaagaactacgcacgaatccatggtcaccactcaccagtaatccctgcaagagcaggaaccaccactgtagtggtggaatcgcacagcatctcgaatcgcgaactcccgaccagtcaccgtgaagatcagcttgatcacagtgtggattcttcatgatgtggatcggcatccagagggcaagctcatgagcccaaacgctgcagctagcttctagctgtggtgaataactgttgatgaagtcatgtatgggagagttgcaccgaaagggaaatttgaggttctctggtggacgtcgcacttgccgccgtattacagctgcatagccaactgtgagattcttgattcaaagtgtgtgcagggggaaaggcgctctaagaagaggaaagaagcgaggtggcgagttctacacagactaatatgtcatagtgggaatctgtttcttacatatatataaacaatgcatatcttgatttttttcaaataattatagtgcttaataatgctacacatgtagaatgaagcgaaattgtagactcgatatttcttatccaacacattttttagataatgg

SEQ ID NO: 14877 - DNA, 3552 bp, Zea Mays
gccgaaaccaaggcggtaggaggaggacgaaggccgctgcggaccttcgtctcaccctcgctgcaccttccttccccccctaccggcccaccccacgccgcgattaattaagcgcgcaccggacctgagtacctgacctcacgcatccatcgaccaaaacggcagctccttttctcccgcggcgttgccgtcgcactcgcacgcacgcactcaccgccggcctgagcctaatcctaatcctaatcctaatccacataccgggacaatccagacgaacgagcgaaccaacgcacggacggccaccagccgctgcgtgcgttcgctttcccccgaaacgtgacccgagccgagctgcagagagagaaaggagaagccgccatgaagcagcagcagctgcagctgcctcctagtcgtcaacgttaaatccctgctcgccaagccactactacgactacgagcaccagccccagtttttctcctctcgcccccgttccccgtcccgactcccgacccaacccatatcagaggttccgtccgttggtggcgctggcgttcccgtgagtcggcccgcgcgcgaaggcggccgtgaccgaccgtccggagcttcatgcgccaggggcggcggctccaccccgtcgtttgatgggcaacgcatgcggcggcgcccttagatccaagtaccagcacagcttcaagcacgccgcgtcgtcgcagcgccgcgcctcctccgagtacagcgccagcgccgtggccgacgactcgcccaggaagcccacgcagccgcccgccaccacggacgcccacgcgccgccaccgccgcccgccaccgccgcagccgccatgaggcgcggcggggccggcgcgccgccggacctggggtccgtgctcggccaccccacccccaacctccgcgacctctacgcgctcggcaggaagctcgggcaggggcagttcggcaccaccttcctctgcaccgagctcgccacgggggtcgactacgcctgcaagtccatctccaagcgcaagctcatcaccagggaggacgtcgacgacgtgcgccgcgagatccagatcatgcaccacctctccggccacaccaacgtcgtcgccatcaagggcgcctacgaggaccagctctacgtccacatcgtcatggagctctgcgccgggggcgagctcttcgaccggatcatacagcgcggccactacagcgagcgcaaggccgccgagctcaccaggatcatcgtcggcgtcgtcgaggcctgccactcgctcggggtcatgcaccgcgacctcaagcccgagaacttcctgctcgtcaacaaggacgacgacctctcgctcaaggccatcgatttcggactctctgtcttcttcaagcctggtcaagttttcaccgatgttgttggtagcccatattatgtagctccagaagttttgttgaaaaattatggaccagcagctgatgtatggacagctggcgtcattctttacattctactaagtggcgtgcctccgttttgggcagaaacacaacaaggaatatttgatgctgtattgaaaggtgtcattgattttgattctgatccgtggcctgtcatatctgatagtgcaaaagatcttataagacggatgctgaatcctcgctctgccaagcgcttaacagcacatgaagttctatgccatccatggattcgtgatcatggagtagctcctgaccgtccactggatccagctgtcttatctcgcattaagcaattctctgcaatgaataagttgaagaaaatggctttgcgagtaatagctgagagcctatcagaagaggaaattgcggggttgaaggaaatgttccagaccatggacactgacaacagtggcgcaattacctacgatgaactaaaagaaggattgagaaaatatggttccacactgaaggacactgagattcgtgatcttatggatgcagctgatatcgacaacaatggaacaattgactacattgaattcatcgctgcaactttgcatctcaataagctggagcgcgaagaacatctcgtggcggccttttcatatttcgacaaagatggtagtggctatatcacagtggatgaactacagcaagcttgcaaagagcataacatgccggatgcttttcttgatgatgtcatcaacgaagctgatcaggataacgatggccgcattgactatggagagtttgttgccatgatgaccaagggcaatatgggagtcggtcgacggacaatgagaaacagcttgaatatcagcatgagggacgcacctggtgcattctgaaacttaacacgatgtacagcttgtggcctagtcacttcggccctgtttgtttcggcttctggcagcttctggccaccaaaagctgctgcggactgccaaacgctcagcttttcagccagcttctataaaattcgttgcggcaaaaaccatccaaaatcaacataaacacataatcggttgagtcgttgtaatagtaggaatccgtcactttctagatcctgagccctataaacaactttatcttcctccacacgtaatcgtaatgatactcagattcttcccacagccagattttcagaaaagctggtcagaaaaaagccgaaacaaacagggccaactgtcttgtcttgctgccctaccaaaccttctgcaaaattttttttcaagatgtttgtcaggtgtatgtgtggatgtgttttttctgattcaactcttgtgattgattccatgaaatgcataacaagatgtccatgccatgcgtgaaagtgaagccgattgtaaatgacggcgctgcccctgcttgactctcagaaacacaaacacccatgttctgaactagctcgccatgtatgcctccagtctcccttgattcatggcatccattcttcatgatgtggatcaagatactctattatgctctcctcaaggcctcaaccaatgccaacaaaaagaactacgcacgaatccatggtcaccactcaccagtaatccctgcaagagcaggaaccaccactgtagtggtggaatcgcacagcatctcgaatcgcgaactcccgaccagtcaccgtgaagatcagcttgatcacagtgtggattcttcatgatgtggatcggcatccagagggcaagctcatgagcccaaacgctgcagctagcttctagctgtggtgaataactgttgatgaagtcatgtatgggagagttgcaccgaaagggaaatttgaggttctctggtggacgtcgcacttgccgccgtattacagctgcatagccaactgtgagattcttgattcaaagtgtgtgcagggggaaaggcgctctaagaagaggaaagaagcgaggtggcgagttctacacagactaatatgtcatagtgggaatctgtttcttacatatatataaacaatgcatatcttgatttttttcaaataattatagtgcttaataatgctacacatgtagaatgaagcgaaattgtagactcgatatttcttatccaacacattttttagataatgg

SEQ ID NO: 14878 - DNA, 602 bp, Zea Mays
cccaagcgctgcgctacacgcccgcgccgtctcctcctcggactgtctcgtccccgagctgcatcggctgcatctgtgattcctgcggtcgacggaagagctgcatcagctgttcgtcgaggccttcttctccgatccaaaaataggtgcctcacaacaacttagaattggttagaacaaatttggaggaaatgagagagaagcgtaggaagaagaggcagagagtagcatcattatttgttacaactgtcatgggtatgattgcggactattattatcggaaaagacctagacattttatggatccctctgagatgatagagagagatgtagctggtcagaaacaaatgctaaggaatatgtatcaaggatcaaatgtttattgcacatgtatatgactcatcaaggcacatgcgcgtagcaaggaacatgtgtatttcgttgtgtacaagttaacatgtaatgtgtacaagttgatgtggttacttccctccaaatatgtaaattccatatataactacccaaacaggatattgaatttgattcatggaaataatttcattagcatccaaacaaaaaaattgaattgaatcaaattctaa

SEQ ID NO: 14879 - DNA, 477 bp, Zea Mays
ctcaaagggaacctggcatccatttgccaagcttcgtctggctggcctcaacctctgtttcgagatacgttggacatcaaaatttcgcgactatcgatcataacgacgtcctgaaacgccgtgtacatttacacctcaggcctcatcaacctctaacccactcacagcccaaaagatcccatcagggaagggaaaacagaaacaagaggagcagaggcgcagagcacgtatggcgtcgatatccaagttttcaacccgcgggttgtctggatctgtctcctactcgccttcttcagctttcgactgtcgactctttcagatccaccccccgctcacaaagctcgtgcggcgcaggccacggacgtcgccatgcctcgtctgctctctggcctattatggcctgatgctggcctctagcgcagctttgccagatggtcttgctgctttggagtgtgaggaaagagagttcctctgctc

SEQ ID NO: 14880 - DNA, 2175 bp, Zea Mays
caagcccagtcattcttttctgctacagtaccgtgcctggcgattccgcgtccacgcacctctcagttagggtttcggactcgaggccaagttcatctccggacgagcataccgtgagccccaacgctccaggtggtcagcttcacttccgagcgcccctctcccgacagccgtctcctcctcaccgctgcttcatcacctagccgtcgccacccatcgcctacagcgacagccgtcttccgtcacagcggagcgcccctcagatccaagggacgctgcacgagcgcaagagcaggttgttgagaaggggaatataatcatggatatcatgcagactagtgactcttcacatcatggaattgtagaaaatagcccgtacagaattccatatgacagacatgcagaaggtggtcaacttggtgcttcatggtattttagtagaaaagaaatagaggagaattccctttcgaggagagacggcattgatctgaagaaagagtcttatcttcgcaagtcatattgcacatttctgcaggatttggggatgagacttaaagtacctcaagtgacaattgctactgctatagtgttctgtcatcggttctttcttcgtcaatcgcatgccaaaaatgacagacggacaattgcaacagtatgcatgttcttggcgggaaaagttgaagaaacacccagacctctgaaggatgtcatacttctttcatatgagatcatccacaaaaaggatcctgctgcagttcaacgaataaaacagaaggaagtatatgaacaacaaaaggaacttattttactcggggaacgtgttgtgcttgtgacacttggttttgatttgaatgtgaaccatccttacaagcccttggttgaagcaataaaaatattcaaggttgctcaaaatgcacttgctcaagttgcctggaattttgtcaatgatgggctccgcacttcactttgcctgcaatttaaaccgcaccatattgcggctggtgcaatcttcctcgctgcgaagtttctcaaagtcaagcttccatcagatggcgagaaggtctggtggcaagagtttgatgtaactccgtggcagctggaagaggttagcaaccagatgttggaactgtatgagcaaaaccgtgttcaaccaccaccatcacaaggcaatgatactgaaggcagttctgcaagtgttgcgaatcaacgtgttcctggtaaagttccaggagtagctgatgaacctcctgcccatgaccataaccaagcacccagaccatcgagccagcagaacatgttagaccaccgtggttatgaccaccctcacccagataagcaaaactataggatacctccaaatgatgcaagggatggcactgctaatagcaacgaaggtcccaatgtgtcgtcttcaatgatggatgcgatgaagaaggtaaacaaggataaggtgaaagcggcactggagaagcgtaggaaatcgaaaggtgatttttcaagaaaggtcgatgtgatggatgacgatgacctcattgagagggagctggaacatggcgtggagttggctgccgaggatgagaaggtcaagcaggagagaaagcagagctggcctcatcttgcacaccaccagagcaccaaccgtgagaataccgaagagggtgagctgtccatggacagtcaagaataccgttctccggagcatgacaatcggaagagaaaggatgtgcgtgagtaccggaactacgatcgtgacgaaagggaccttaaaaggctaagatcatgagagttgcacttttgtcggagtctcatgttgttcgtgccataacatgatgtggaacctctatctttctgtcacaggtgtacttgatgcttatttggtatgctgggggatttgaactgttacatatataagtttataagatggtttccccacggtcatgtatgtgtttagccatgttggcaattgagatggcgctgtgccttgagtattccacaggtttatgctggaaacaacatttaaggaagctgcgtcctacgggtatctgaaatgtatgtattttgattccaaggtttcctcaactctaatggtagcctgcgtttttttatccgtctatctgggaacacgggtactggggatgaggtcgtgcacataatgttgttgattttgataccatg

SEQ ID NO: 14881 - DNA, 2023 bp, Zea Mays
caagcccagtcattcttttctgctacagtaccgtgcctggcgattccgcgtccacgcacctctcagttagggtttcggactcgaggccaagttcatctccggacgagcataccgtgagccccaacgctccaggtggtcagcttcacttccgagcgcccctctcccgacagccgtctcctcctcaccgctgcttcatcacctagccgtcgccacccatcgcctacagcgacagccgtcttccgtcacagcggagcgcccctcagatccaagggacgctgcacgagcgcaagagcaggttgttgagaaggggaatataatcatggatatcatgcagactagtgactcttcacatcatggaattgtagaaaatagcccgtacagaattccatatgacagacatgcagaaggtggtcaacttggtgcttcatggtattttagtagaaaagaaatagaggagaattccctttcgaggagagacggcattgatctgaagaaagagtcttatcttcgcaagtcatattgcacatttctgcaggatttggggatgagacttaaagtacctcaagtgacaattgctactgctatagtgttctgtcatcggttctttcttcgtcaatcgcatgccaaaaatgacagacggacaattgcaacagtatgcatgttcttggcgggaaaagttgaagaaacacccagacctctgaaggatgtcatacttctttcatatgagatcatccacaaaaaggatcctgctgcagttcaacgaataaaacagaaggaagtatatgaacaacaaaaggaacttattttactcggggaacgtgttgtgcttgtgacacttggttttgatttgaatgtgaaccatccttacaagcccttggttgaagcaataaaaatattcaaggttgctcaaaatgcacttgctcaagttgcctggaattttgtcaatgatggaggttagcaaccagatgttggaactgtatgagcaaaaccgtgttcaaccaccaccatcacaaggcaatgatactgaaggcagttctgcaagtgttgcgaatcaacgtgttcctggtaaagttccaggagtagctgatgaacctcctgcccatgaccataaccaagcacccagaccatcgagccagcagaacatgttagaccaccgtggttatgaccaccctcacccagataagcaaaactataggatacctccaaatgatgcaagggatggcactgctaatagcaacgaaggtcccaatgtgtcgtcttcaatgatggatgcgatgaagaaggtaaacaaggataaggtgaaagcggcactggagaagcgtaggaaatcgaaaggtgatttttcaagaaaggtcgatgtgatggatgacgatgacctcattgagagggagctggaacatggcgtggagttggctgccgaggatgagaaggtcaagcaggagagaaagcagagctggcctcatcttgcacaccaccagagcaccaaccgtgagaataccgaagagggtgagctgtccatggacagtcaagaataccgttctccggagcatgacaatcggaagagaaaggatgtgcgtgagtaccggaactacgatcgtgacgaaagggaccttaaaaggctaagatcatgagagttgcacttttgtcggagtctcatgttgttcgtgccataacatgatgtggaacctctatctttctgtcacaggtgtacttgatgcttatttggtatgctgggggatttgaactgttacatatataagtttataagatggtttccccacggtcatgtatgtgtttagccatgttggcaattgagatggcgctgtgccttgagtattccacaggtttatgctggaaacaacatttaaggaagctgcgtcctacgggtatctgaaatgtatgtattttgattccaaggtttcctcaactctaatggtagcctgcgtttttttatccgtctatctgggaacacgggtactggggatgaggtcgtgcacataatgttgttgattttgataccatg

SEQ ID NO: 14882 - DNA, 1841 bp, Zea Mays
cagtcattcttttctgctacagtaccgtgcctggcgattccgcgtccacgcacctctcagttagggtttcggactcgaggccaagttcatctccggacgagcataccgtgagccccaacgctccaggtggtcagcttcacttccgagcgcccctctcccgacagccgtctcctcctcaccgctgcttcatcacctagccgtcgccacccatcgcctacagcgacagccgtcttccgtcacagcggagcgcccctcagatccaagggacgctgcacgagcgcaagagcaggttgttgagaaggggaatataatcatggatatcatgcagactagtgactcttcacatcatggaattgtagaaaatagcccgtacagaattccatatgacagacatgcagaaggtggtcaacttggtgcttcatggtattttagtagaaaagaaatagaggagaattccctttcgaggagagacggcattgatctgaagaaagagtcttatcttcgcaagtcatattgcacatttctgcaggatttggggatgagacttaaagtacctcaagtgacaattgctactgctatagtgttctgtcatcggttctttcttcgtcaatcgcatgccaaaaatgacagacggacaattgcaacagtatgcatgttcttggcgggaaaagttgaagaaacacccagacctctgaaggatgtcatacttctttcatatgagatcatccacaaaaaggatcctgctgcagttcaacgaataaaacagaagaggttagcaaccagatgttggaactgtatgagcaaaaccgtgttcaaccaccaccatcacaaggcaatgatactgaaggcagttctgcaagtgttgcgaatcaacgtgttcctggtaaagttccaggagtagctgatgaacctcctgcccatgaccataaccaagcacccagaccatcgagccagcagaacatgttagaccaccgtggttatgaccaccctcacccagataagcaaaactataggatacctccaaatgatgcaagggatggcactgctaatagcaacgaaggtcccaatgtgtcgtcttcaatgatggatgcgatgaagaaggtaaacaaggataaggtgaaagcggcactggagaagcgtaggaaatcgaaaggtgatttttcaagaaaggtcgatgtgatggatgacgatgacctcattgagagggagctggaacatggcgtggagttggctgccgaggatgagaaggtcaagcaggagagaaagcagagctggcctcatcttgcacaccaccagagcaccaaccgtgagaataccgaagagggtgagctgtccatggacagtcaagaataccgttctccggagcatgacaatcggaagagaaaggatgtgcgtgagtaccggaactacgatcgtgacgaaagggaccttaaaaggctaagatcatgagagttgcacttttgtcggagtctcatgttgttcgtgccataacatgatgtggaacctctatctttctgtcacaggtgtacttgatgcttatttggtatgctgggggatttgaactgttacatatataagtttataagatggtttccccacggtcatgtatgtgtttagccatgttggcaattgagatggcgctgtgccttgagtattccacaggtttatgctggaaacaacatttaaggaagctgcgtcctacgggtatctgaaatgtatgtattttgattccaaggtttcctcaactctaatggtagcctgcgtttttttatccgtctatctgggaacacgggtactggggatgaggtcgtgcacataatgttgttgattttgataccatg

SEQ ID NO: 14883 - DNA, 735 bp, Zea Mays
cttttctgctacagtaccgtgcctggcgattccgcgtccacgcacctctcagttagggtttcggactcgaggccaagttcatctccggacgagcataccgtgagccccaacgctccaggtggtcagcttcacttccgagcgcccctctcccgacagccgtctcctcctcaccgctgcttcatcacctagccgtcgccacccatcgcctacagcgacagccgtcttccgtcacagcggagcgcccctcagatccaagggacgctgcacgagcgcaagagcaggttgttgagaaggggaatataatcatggatatcatgcagactagtgactcttcacatcatggaattgtagaaaatagcccgtacagaattccatatgacagacatgcagaaggtggtcaacttggtgcttcatggtattttagtagaaaagaaatagaggagaattccctttcgaggagagacggcattgatctgaagaaagagtcttatcttcgcaagtcatattgcacatttctgcaggatttggggatgagacttaaagtacctcaagtgacaattgctactgctatagtgttctgtcatcggttctttcttcgtcaatcgcatgccaaaaatgacagacgggggaccggcgtataattatattaagaagaaagggaccaaaggttacagaaaacccgaaagaaacagccaggttttaggcaactaagaagcctaaaaacctagcctaaaa

SEQ ID NO: 14884 - DNA, 681 bp, Zea Mays
ctgctacagtaccgtgcctggcgattccgcgtccacgcacctctcagttagggtttcggactcgaggccaagttcatctccggacgagcataccgtgagccccaacgctccaggtggtcagcttcacttccgagcgcccctctcccgacagccgtctcctcctcaccgctgcttcatcacctagccgtcgccacccatcgcctacagcgacagccgtcttccgtcacagcggagcgcccctcagatccaagggacgctgcacgagcgcaagagcaggttgttgagaaggggaatataatcatggatatcatgcagactagtgactcttcacatcatggaattgtagaaaatagcccgtacagaattccatatgacagacatgcagaaggtggtcaacttggtgcttcatggtattttagtagaaaagaaatagaggagaattccctttcgaggagagacggcattgatctgaagaaagagtcttatcttcgcaagtcatattgcacatttctgcaggatttggggatgagacttaaagtacctcaagtgacaattgctactgctatagtgttctgtcatcggttctttcttcgtcaatcgcatgccaaaaatgacagacgggctagaaggggatggatccattgaacaagacttcataggcagacttggctgagtatatcc

SEQ ID NO: 14885 - DNA, 786 bp, Zea Mays
cccatctcaaccgaaggaggcaaagacgcaacgcgaggtctcatgggcgaccgggccattcgtcgtctccgttgtctttgttgcagatcggtgctcctctcaccaccaggccgccacagctcgccggctttcccctccctgccatcgagcaccacctgagcaaacagagcaaggaaatagtttaagaatggctgcgcggagcagttctatggttgccgaggatgactacgagacggatcagaagaagcaagctgctgcagatgttctttttcactattcacaatttgttatggtttgcattggtgaggatgttcgccctactgatctcaggttacatcttatgaaggaagtttcaggaatgtccacttctctgaaggagcctcaacaggctgctgcctcaccggcttccagtggggaaccgtcttcctctggaacgatgaaaggtgacaagaatgaaatctcctaagcttcataaattattatccaactcaggacttcttctgttccttacgcactgagaagattgtaatgttcagaacttcggatgatgaggcttacttgcaatataggaatgtaaatatgttaggaacattgttcatagctgtctgctgttctgctgctttagcttctttcgtgacagcctgcttcatgtatgaaactttgaatccatttttattcagggggcagtaacgtaaatgctgctgtatttttttttaaatggcaggtgaatattgtattctgaataagtcatgtttactagaatcgttgctgtggctttgattggat

SEQ ID NO: 14886 - DNA, 704 bp, Zea Mays
aaccgaaggaggcaaagacgcaacgcgaggtctcatgggcgaccgggccattcgtcgtctccgttgtctttgttgcagatcggtgctcctctcaccaccaggccgccacagctcgccggctttcccctccctgccatcgagcaccacctgacggatcagaagaagcaagctgctgcagatgttctttttcactattcacaatttgttatggtttgcattggtgaggatgttcgccctactgatctcaggttacatcttatgaaggaagtttcaggaatgtccacttctctgaaggagcctcaacaggctgctgcctcaccggcttccagtggggaaccgtcttcctctggaacgatgaaaggtgacaagaatgaaatctcctaagcttcataaattattatccaactcaggacttcttctgttccttacgcactgagaagattgtaatgttcagaacttcggatgatgaggcttacttgcaatataggaatgtaaatatgttaggaacattgttcatagctgtctgctgttctgctgctttagcttctttcgtgacagcctgcttcatgtatgaaactttgaatccatttttattcagggggcagtaacgtaaatgctgctgtatttttttttaaatggcaggtgaatattgtattctgaataagtcatgtttactagaatcgttgctgtggctttgattggat

SEQ ID NO: 14887 - DNA, 837 bp, Zea Mays
ggcaaagacgcaacgcgaggtctcatgggcgaccgggccattcgtcgtctccgttgtctttgttgcagatcggtgctcctctcaccaccaggccgccacagctcgccggctttcccctccctgccatcgagcaccacctggtacgctctccgcttgatctccccttcctgctgcggagccgtgcgagcaaaccttaacgtagtccgtagagcaaacagagcaaggaaatagtttaagaatggctgcgcggagcagttctatggttgccgaggatgactacgagacggatcagaagaagcaagctgctgcagatgttctttttcactattcacaatttgttatggtttgcattggtgaggatgttcgccctactgatctcaggttacatcttatgaaggaagtttcaggaatgtccacttctctgaaggagcctcaacaggctgctgcctcaccggcttccagtggggaaccgtcttcctctggaacgatgaaaggtgacaagaatgaaatctcctaagcttcataaattattatccaactcaggacttcttctgttccttacgcactgagaagattgtaatgttcagaacttcggatgatgaggcttacttgcaatataggaatgtaaatatgttaggaacattgttcatagctgtctgctgttctgctgctttagcttctttcgtgacagcctgcttcatgtatgaaactttgaatccatttttattcagggggcagtaacgtaaatgctgctgtatttttttttaaatggcaggtgaatattgtattctgaataagtcatgtttactagaatcgttgctgtggctttgattggat

SEQ ID NO: 14888 - DNA, 759 bp, Zea Mays
agacgcaacgcgaggtctcatgggcgaccgggccattcgtcgtctccgttgtctttgttgcagatcggtgctcctctcaccaccaggccgccacagctcgccggctttcccctccctgccatcgagcaccacctgagcaaacagagcaaggaaatagtttaagaatggctgcgcggagcagttctatggttgccgaggatgactacgagacggatcagaagaagcaagctgctgcagatgttctttttcactattcacaatttgttatggtttgcattggtgaggatgttcgccctactgatctcaggttacatcttatgaagtttcaggaatgtccacttctctgaaggagcctcaacaggctgctgcctcaccggcttccagtggggaaccgtcttcctctggaacgatgaaaggtgacaagaatgaaatctcctaagcttcataaattattatccaactcaggacttcttctgttccttacgcactgagaagattgtaatgttcagaacttcggatgatgaggcttacttgcaatataggaatgtaaatatgttaggaacattgttcatagctgtctgctgttctgctgctttagcttctttcgtgacagcctgcttcatgtatgaaactttgaatccatttttattcagggggcagtaacgtaaatgctgctgtatttttttttaaatggcaggtgaatattgtattctgaataagtcatgtttactagaatcgttgctgtggctttgattggat

SEQ ID NO: 14889 - DNA, 200 bp, Zea Mays
tcatgggcgaccgggccattcgtcgtctccgttgtctttgttgcagatcggtgctcctctcaccaccaggccgccacagctcgccggctttcccctccctgccatcgagcaccacctgagcaaacagagcaaggaaatagtttaagaatggctgcgcggagcagttctatggttgccgaggatgactacgagtgagtgat

SEQ ID NO: 14890 - DNA, 805 bp, Zea Mays
tcatgggcgaccgggccattcgtcgtctccgttgtctttgttgcagatcggtgctcctctcaccaccaggccgccacagctcgccggctttcccctccctgccatcgagcaccacctggtacgctctccgcttgatctccccttcctgctgcggagccgtgcgagcaaaccttaacgtagtccgtagagcaaacagagcaaggaaatagtttaagaatggctgcgcggagcagttctatggttgccgaggatgactacgagacggatcagaagaagcaagctgctgcagatgttctttttcactattcacaatttgttatggtttgcattggtgaggatgttcgccctactgatctcaggttacatcttatgaaggaatgtccacttctctgaaggagcctcaacaggctgctgcctcaccggcttccagtggggaaccgtcttcctctggaacgatgaaaggtgacaagaatgaaatctcctaagcttcataaattattatccaactcaggacttcttctgttccttacgcactgagaagattgtaatgttcagaacttcggatgatgaggcttacttgcaatataggaatgtaaatatgttaggaacattgttcatagctgtctgctgttctgctgctttagcttctttcgtgacagcctgcttcatgtatgaaactttgaatccatttttattcagggggcagtaacgtaaatgctgctgtatttttttttaaatggcaggtgaatattgtattctgaataagtcatgtttactagaatcgttgctgtggctttgattggat

SEQ ID NO: 14891 - DNA, 733 bp, Zea Mays
tcatgggcgaccgggccattcgtcgtctccgttgtctttgttgcagatcggtgctcctctcaccaccaggccgccacagctcgccggctttcccctccctgccatcgagcaccacctgagcaaggaaatagtttaagaatggctgcgcggagcagttctatggttgccgaggatgactacgagacggatcagaagaagcaagctgctgcagatgttctttttcactattcacaatttgttatggtttgcattggtgaggatgttcgccctactgatctcaggttacatcttatgaagtttcaggaatgtccacttctctgaaggagcctcaacaggctgctgcctcaccggcttccagtggggaaccgtcttcctctggaacgatgaaaggtgacaagaatgaaatctcctaagcttcataaattattatccaactcaggacttcttctgttccttacgcactgagaagattgtaatgttcagaacttcggatgatgaggcttacttgcaatataggaatgtaaatatgttaggaacattgttcatagctgtctgctgttctgctgctttagcttctttcgtgacagcctgcttcatgtatgaaactttgaatccatttttattcagggggcagtaacgtaaatgctgctgtatttttttttaaatggcaggtgaatattgtattctgaataagtcatgtttactagaatcgttgctgtggctttgattggat

SEQ ID NO: 14892 - DNA, 737 bp, Zea Mays
tcatgggcgaccgggccattcgtcgtctccgttgtctttgttgcagatcggtgctcctctcaccaccaggccgccacagctcgccggctttcccctccctgccatcgagcaccacctgagcaaggaaatagtttaagaatggctgcgcggagcagttctatggttgccgaggatgactacgagacggatcagaagaagcaagctgctgcagatgttctttttcactattcacaatttgttatggtttgcattggtgaggatgttcgccctactgatctcaggttacatcttatgaaggaagtttcaggaatgtccacttctctgaaggagcctcaacaggctgctgcctcaccggcttccagtggggaaccgtcttcctctggaacgatgaaaggtgacaagaatgaaatctcctaagcttcataaattattatccaactcaggacttcttctgttccttacgcactgagaagattgtaatgttcagaacttcggatgatgaggcttacttgcaatataggaatgtaaatatgttaggaacattgttcatagctgtctgctgttctgctgctttagcttctttcgtgacagcctgcttcatgtatgaaactttgaatccatttttattcagggggcagtaacgtaaatgctgctgtatttttttttaaatggcaggtgaatattgtattctgaataagtcatgtttactagaatcgttgctgtggctttgattggat

SEQ ID NO: 14893 - DNA, 811 bp, Zea Mays
tcatgggcgaccgggccattcgtcgtctccgttgtctttgttgcagatcggtgctcctctcaccaccaggccgccacagctcgccggctttcccctccctgccatcgagcaccacctggtacgctctccgcttgatctccccttcctgctgcggagccgtgcgagcaaaccttaacgtagtccgtagagcaaacagagcaaggaaatagtttaagaatggctgcgcggagcagttctatggttgccgaggatgactacgagacggatcagaagaagcaagctgctgcagatgttctttttcactattcacaatttgttatggtttgcattggtgaggatgttcgccctactgatctcaggttacatcttatgaagtttcaggaatgtccacttctctgaaggagcctcaacaggctgctgcctcaccggcttccagtggggaaccgtcttcctctggaacgatgaaaggtgacaagaatgaaatctcctaagcttcataaattattatccaactcaggacttcttctgttccttacgcactgagaagattgtaatgttcagaacttcggatgatgaggcttacttgcaatataggaatgtaaatatgttaggaacattgttcatagctgtctgctgttctgctgctttagcttctttcgtgacagcctgcttcatgtatgaaactttgaatccatttttattcagggggcagtaacgtaaatgctgctgtatttttttttaaatggcaggtgaatattgtattctgaataagtcatgtttactagaatcgttgctgtggctttgattggat

SEQ ID NO: 14894 - DNA, 3464 bp, Zea Mays
aaacatctcaatagtactgggaaaataatcatagaaaatgtcatgtgtacacaacacaaaattcatatgtatctcatcgaatataaaaaaaggaaaaagtggaacataaataataaaaataagtaatcaaatgattaatcgtagtaacacaaagaaaaataaactggaataaagcgaaaagatacaatagaaaaaagggtaagaagaaaagaacaaaataataaaaaaataaacttattcgagccttgtgagacgcacatgagcggttcaccgtgtttgctgttattgggcttacataaactgtagaaaacagcccaaaaacagccaagcagtccaaccgcagtccacaaccaactttgtgaaccctaacgtttggtgggctcatatcgaatatatctctaagggtatcacgtctatatatataaagtatgtacccttcatatggaatgaagagaaaaatgccagaggtccaacactacatcatgtgtctcgtgtgttctctgtcgtgcttctgaaaagggagacaaatcttctacaaattcttgtgtctaatctgctgatgaaagagaagggagttgatctggtgatccgtgataacgtagttattcaacatagctaaccggatggaccggattatgtactgacacaatatatggttattttggctccatacagacacaatacaacacaacacaacaataaccatgctcgggtcgacccgaggctcatgatagaccgtgcttaggctggcggaagaggccattggttgacacatgcacgattcatttactgttagctcatttagttcgatgctagatacaaatagttcatcagaccgagcatgatacgacacacgatatatttgtggtctgacctttcttactctaatatagtcgactatatatatacacacacacaaatgaccaacctaacctccattttcgagttatttcttagctctgctaaagaaagagaaaaatgacctataaaaaagtagagaaaaagttatttttagcgttgttcactaccagaattttgctctttgccgagtgccacattctttgccgagtgccacgtaaaaaacactcggtaaaagaaaacactcggcgaataaactctttgccgagtgttttatttttaacacccggcaaagagtttctttgccgagtatcgtttctttgccgagtgtcacaaatacaacactcgacaaagagctctttgccgagtgttttttctccaacactaggcaaagacaatttaaaaatcacattttaaagtagtaaattaatctccgtcccccttgctcgcgtccttcctcccttacaccctgacctgctcgccaccgctgctcacccctctcctagcccccctcctactagaaagtggatctcgaccttgctcacctgctagaaagccgctcgcctagctccaccggtcccagctactagcaccgccaacctgctaggcactccctcgagccgaaggtgagggccatgccctacccctttttggttagatctaaatttccgtggaggtgagcgtggacgaggtcaggtatgtcgcctccttctcttcctccaccgtcttctatacgctccaggctcgcgctggtgttgccggccattccttatgctcgacctcgcgtctgcgttgaactccgcccctctgccactgtctccagcgcggacgttgaagcccattgtccctactcaccctggcgagcaggctacacgccagctttattacattctgacctgtgggagtgtgggtagcgttttattgagtagcacctagaatggtgtgatgttatgttagttgggtcagatacacatgcagcatccttgcaacgggatgcagtcttggtttggagccctttcttttctctcataaagcaaatccatttgttgagaaaagaggtatatgattggagatgtagttgactgttactgaatttcactactctgagcttgtatattgtttcaactcattatactaactactccctccgtacttctttttttttgtcacgatttagttcaaaaatgaactagcgtgcgacaaatattcgagaacggaggtagtattattttctacatcttctccctctactcattgacgctcttaattctgaatagttcatctgcaaactttgagttctgctatataattaccatagtgtaatgcaagtctcccttcttgaattttgtaatttgaagtgaatagcctgtttatctagcctgtagtgtacaaacttatttgatgcattttttcgggcagtgaaaaaaatgcatcaatgttgactctagatggagttgacgtcatgggggaacgcttagcaaatgaggtaagtaatgcagacaactaattcaagaactagctattggtccatagtaatttgtaataaaattttattctttatcaaactgttctctggcacagttcctattgtctgaacaatcagtctagatgctaacttgcattctcctcttactcaggtgctctttatcaagctgaatgttgcactcagcttgcattgatggtaagcttacagaaaatgcactttgttcatatttgtgcagaacactgagcaggtcgtatccaatcagaccaccttggcaccttcacatgttatcaaaatactttttatctccctccatttctttgggtttaacaaaccattttagggatttggaagatcgaacgaagaatttagacctaatattgttgaagagatacaattttcaaaagaagttgcttgtggaggttaccatccttttgttgtaacaggtattggtgtttgtgcagtctttgttttgtatcttgttaatgcggaattatcaaaattttcagttgttaacttgtcgtacaattttgaaaattatgcgctgatgttttgatagatagctgtgatctgtattcttgggattcaaatgaaaatggatgccttggtctggggtattttatcagtgactgcgggagggccttttaaacatccacttttattttatccgtaattgtgggcctgcagctaccatatacacaaaggagagccttttaaacaatgtcttggctgctattcctccatatcttacaaatgaggagtggtcagctgcattgccaagggcattagttgctggtttcgtgaaaacagataaagacttccaaacaaaaggtatgatttgtgaaaacagataaatacttgttggcgtttcgagacaggggggtccctaagccgacgagtgagtgtgctgcgtgccccagcccagatgggtcgagcgcgtgggcgagcgtgaaggggggagaggcgaggtggccggagccgagcgtgagagaggtggaagtcccgcgaccttcgtgttcgtcctgcgcccaggtcgggtgcgcttgcagtaggggggttacaagcgtccacgcgggtgagggaagcgagcggccccaagagagcgcctgtcccgtcctcggtc

SEQ ID NO: 14895 - DNA, 1117 bp, Zea Mays
gttgcttgcagagcttgagtccgcccttgacgagtccgccaaggcgcttgctgaggcgcttgccggagctgccgagcagagggatgcggacctcgcggccatgtccgaggccgtctcggacttttatcgtgtcctgggctccggcgatgtcccttcaggaagctcccctcagagccgccttcgagccttgggtgatcacgcgcgcggcagagtccgcgaagcgctacaccacggcgtcaggcgggccttcgccgtgcttgcttcccactatgttgtggacctggagcgggttagtgaggggtactgtcttcctgacgaagacgatgctgccctagcggaggtccagcggctcgacgcggtcgccgcgggtccgagcgcggtgctggcgaccacctttgaggcggagatccttccccctgcgacgtcaccggaggccgagatggaccccaccgacggcagggatggagctgagggcgcggctccttcccaaggcggcgcctaattcttgtttgaacagtttcttgttggatgtgcgtctcaccgcggctgctgaggcctgaacactttgtctttcttgcatggagtcgtactctcctttctttccatctgcatgttcgtcctggcttgtcaataatagggtggcttctcgagttgggccattcttcgtggcaggtgatgagtgaggtgtccctaacccggaggcacaggagcccctcggctcagtcggccttgccatttacatgtacccgcgttcgctcctcgagaccccgcttctgacatagccgggagaacgcaagaggccccttttttgattgaaaatttttgacacgaagaagtatgcccgatcttgacgcagagatgttcccccttcttagcccccgagggagggtcgggctctgccaaggcgaggccgacccttccttgatgaccgaggcgcagaggctgcctgacggatcgggctccggcccggatatccagcgagtgtttggcgacatccctcggtatgccgggcatgtccgaaggactccgcgcaaagacgtcggcgtctgcgcgaagaaagtcgacgagcactgcttcctatttggggtcgagcccggaaccgatccggatctgcttg

SEQ ID NO: 14896 - DNA, 1760 bp, Zea Mays
aggaagatcaccgtcctccggcatgccgagatggttgccttcggagggatcccctagctcgatgtggaaacattcgcggcttgggccgcagctctcatcgccaaggctgcggcttccgtcggaactgtgacggaacctccaaagtaattaggcccacctacagttgtccttgtctaacagacatcagacatcctgtagatgttcctaagtcacttgacaagttcggtatctttccttaccttaccaggaacgtctcacccgtcttgcagacattacagaacatcggagatatagaaatgcgaaagcaattacataaacttacatttatttagaaagtaagatcaagttacttattacagaccagagctataaacgagtgctgagtagttacacatatcaagggaggcacagactcctcccgatagctattaaacaaaagtcctatatggaggaccacgtcctcccgcatcttcattccagttttccttcatttggtaccaccttggagcaaaagcaacaaaaatttgtcgcttcctcacctaaaaacaacaaagggataaaccctgagtatggaattactcagcaagtcttacccgactaaggaaaagactctcaagggtatgctggttaaataggagtcaaggagaggttttagcaaaaatcaacttatacttttgcagaagtagcttactaaagtgagtccttactttcaatcttttaacgccatgttaagtattaatagactctatttgcatctagtctaatttcacatcacatcaagacaacatcatttttatccttcgtgttcacatcctgacttaggttgtaggtcggagctcaagtctccactgtccggggatataacggcgatccgaatcgatttactcagctgaggatctctaaccacacgacatatgtttctcataaaccttgatgtctactattcccacggatcctccactgcatgaacaggtccgcgccacccgagagtacaccaccctttttaggcgatccgttgccaggagggtacgtgccactctcgccatctctccacgcccagtgcgcgattgtcttttcatgaatggaatagccgggttcaagcttaccctgtcccattctcagggcatgtggctagataagatagtccttgatcaacaggcctacatacgcatccaatccttaattgacccgggcggagcatcatctgttcctagcccaagtctcgatttaagtatttccatccttaggattgtgtctgttccttaggatgaaagagcatcacggggaactttgcagtaagatcccactattgctccaaatgaaaatattcttgcaggtagaagccatcctctcccgggttaaattgaggacaacctttatccacaagatctaagcaaggctaagcatttttgtaaatcataattttgatacttcacagaagtatctataaaggtatggatatcatggaaagcaatgcatcaaagggtttcaagcaattcctatgaacctaatgcacatttcactagacgtaagtgtgcgaaaagtatttaaaaacacaaggaaaggggttgcatgcaccggggcttgcctttgttagtaggcgagtcaggctcggactcgcagatgtcgaagtagagccaagtctctgcctgagattccaaaggtggtgatgtcttttcttcagtcatttcaccctcttctccgttttctaaatataaccatataggtatatatataagaatgaatgccatgtaatgcaa

SEQ ID NO: 14897 - DNA, 2056 bp, Zea Mays
ccgggcatttcgaatttgaattttgatgagaacgccgagccccgccagtgtcgtcagtcatcaccaattcaccaagactcaccagcccgctcgtcggctctcagatctactatacccgtctagactctgctccgccatggatgacagcgccggcgaagccgatggccgaagtcagagccgccggacatcaagaattggttctcgagctatgtttatgactctcctgaggttacggagcatgttgctgatcacgacggcggcgacggcagcgagacccaagacccattcgaggatggtggagttgctttgacagaaagtggttttggaggccaatctgagcctgagaattttcctagaaaatatttggtcccggtcgatgggaatgcgacgaagcccgcccccaaaaggaagcaaagcctgcgggcgttgtttggagcgagttttcttagtgaggttgaggaagttaatgcaactgaaagtcatggtctgttccctgtgcagctaaatgcactgaagcacgtgccagattgtagaagccttcctcttaatgaaatatgtgagacgcattcagaaaaaatagattgcacaacaagcttgcctgatgctactagacatagccaagaagccacaattgagcacaaggcgctggtcaattttgatcgtattagttcagctgacactcgagaaagcacccctgcagatgaggaggttgagagtaaaacgtctgctaactgtgatgatgcacttttggctgatactggagaaggctttgcagaagacatcaacggccatattgaattgcctggcagttttaacaatatcactcgagctgggactggggaaaagatccaagatggtgttgaccacagcacacatattgttagtcgcaacagacccagtttagctgagactgaagataattgtgcattacgcgaaactgacagtgaagagaattctcccctaggggaagctgaccgctgcaagctttcatcagacagtaaaaggcgacaagaaatagttgcatcagatggttttatcgctgtaaagaggaaaaggaagcaaccagaggaacacataacaaataaaaatctgaggcacctaactgggggagagaagcaaaagaggaacttaaaagagaatgtcagcattccagaccagaaggttttggtccaagagcaaaccagacgtcccttggcggataggactaatttttcagaagtaaacgcatctccagcaccagagccgagcagcaaatggaagtgtcctcgcaaaggcaagccctatgttggtcgtccaatgaagcagctccggttggggcagtgggtgcgccgtatgaattgacacctcaacgtctgcatcctgttcagaagagtatgcatcatcaagttgacagtttggaccagtttcagctcttccagtctgtaggagcgcatgtcgctcaagtaggactagatcattataatatctttatggttgtagctatcttcttgtgctactgctatcccagtacaattttttcatagcaccagggtacgtatcagcagaagaccgaactgagacaaattaaatgatgggtaccaaattctgtaaatcttgttttcagatgagattctatgtttttttgttgatgttttgcgaatctctgttgatattagaatacatgggtgaacttagaacttgtagaagttagctatatcatgcaatctatcaattgtttatctatatatattatatggagtggtgtatgtttgtatctatgtttatgtctagaataatgttgtttttgaaatggagcaagaaatctggaatgaatagatcaaatagggaatatgtcatacctcaataataaagacgactgtgatttaccatccgtctttaaaaaaccgatttgtagagatagctctgaattcagaaccatctttgaaaatacagttactaaagatggataggcaactacctctgtaaatcgctgatgcatagaggtgcctatagaggcatcccagtctcccagtggcggacccagctgctatgtttagggtgtgccaagaaaaaaata

SEQ ID NO: 14898 - DNA, 2788 bp, Zea Mays
cgagaacagagaaccacccacaggccacagtacagaatgacagaagcgaggcgcgcccactgcccacgccacgcactcctatactcctatgctatgcctctcctcccctccacagagtggcagtggcggggtgaggggggaaggaggaggaccaaggcaggcagtcggcagcgaggaggtgaaaagggcagcagctgcccgtgccgtaggagaggccgggcggcggccgcgtacgtccgttgcagcgcgcgcgcgcgcgctctggcctccgtgcgataccacgcgacgctgaatcgccgatcgacatgacgctggaggctctgtgcccgaccagcagcgacgtcctcgtctacgacaccttcaacgccgccgccgcatgcgccgctgcttctgcggggaccttccttttcggcaatgcaccaccggtggaggtgccggcggcggcggcggcccaggcgaacggggagaacagcgtgcagcaggggcggaggaagcggcggcgacggcagaggagcaccaagaacgccgaggacgccgagagccagcggatgacccacatcgccgtcgagcgcaaccgccgccgccagatgaacgagtacctcgccgcgctccgctcgctcatgccggactcctacgtccaccggagcgatcaggcgtccgtggtcagtggcgcaatcgatttcgtgaaggagctggagcagcagctgcaatccctggaggcccagaagctggcgctgaagcggcagctgcagcagcagcagcagcgcagcgtcacggccgcgatacgcgacgacgcggcgcagccggctcgaggccgtgatgacatcggcgcgggcgcgggcggggacgccgcggcgcgcagcgaggtgtcggcgccggagccagacccgcctccgttcgcgcggttcttccggtacccgcagtacgcgcggcggcacgcggcggcgcgggaggacgccggcgcggaggagacgagccgcgcctccgcggtggcggacgtggaggtgggcgtggtggtggacgcgcacgccagcctgcgcgtgatggcgccgcggaggcccgggcagcttctgcggatggtggccgggatgcaggcgctcggcctcgccgtgctgcacctcaacgtggccaccgccgcggtcgacgcgacggcgctctacacgctcagcctcaaggtacgacggcggcgcacactaccggacggatgggtagctagcaaagcgacggtccctttctccttccgtccacggacacggaccaaccgtcgtcgtcaaagcctcgttgcttgtcacacactggctcgttttcttgtgcctgaaatggtgctatcgccgtgctctaacatgcactttggtcaccaccggtgccactgcccctgagcaagtacgtgaccaaaatcctctgtccttttcttttttacaacaaaaagctctctgatgcggagatcgctagattacgtccaccgaaacaaagggacatgatgccagatagtatagcatcccgtccaccgaaaatccgagagagtagagtgtagaggccatttgtatgacacggcaccgcactagcagcagaggcgtccaaacgcagtagcaccgcagcaccattgtccatcgcactgactttgtgcctgctgggccagatctccaaatacagagacatgtagaacacagtacacaccacagtggcttcccctgcgagcccagcacgactgcaccacgagccatgggcgcttgcttttgaccgggagagagagagagagtccagtccagagctcgaaagctgtttgctgcgtttggcaagctgtagcactgggcttttgacgtccctgtctgaacaccttcaaattcgagcagataggataggagtacagtaaaaaaaagaaaaggctgtgtattttcaccgttctcttttttttcgcactaaaggctacgtaaaggagaaaaggacgatcatggagaatcctctcttggcttggcgagcagagcaggcacctggcccgtcgtccattgacatggcgaggagatcgatgtggactgcagagaaagattgtgttgtgtgccgctgccctgcctttttcttttctagtgctgcgtgtttcaggacagcagagactgactgctgagtaagctatatgtgtttgtgtgccccggagccgagccggacccctcaacgtagcaggtggaggaagggtgcgccctggcgacggcggaggagatcgccgcggcggtgcaccacgtcctatgcatcatcgacgccgaggcgacgccgcagaggctgctcgctgccggagcaccagggacagggcagccggacgtctagctagtcaggatgattcaggacgaggtcttcccggcgtaacggggcggcatgggctgcgcggggtgtctgcttccgtttcttgtaaagtgcagtggcgtgcgtgcgtggctggccagcacacgagagcctgatggcgtagcgtaggtacagagtatgtaacgggcaataacacgcaggttcgtgtctggacctgtggtctctcgttcgtgcatgcctatgcgtgcccttgtgtttgcgtgtgacgggaattggaattgaggacgggaagcaggaatgcaggaacagggaagggatcggacgttgttttcttcatgcgctcagcacaactgcgcaagggaaggggagccgtgctgaatcttgctactcgtacgctacagtgcttcacgcattctttccaatctacgcccaagtaacggtcattcttcttcctgggcctggccggccggcccactccaccatccttcgcagc

SEQ ID NO: 14899 - DNA, 2430 bp, Zea Mays
cgagaacagagaaccacccacaggccacagtacagaatgacagaagcgaggcgcgcccactgcccacgccacgcactcctatactcctatgctatgcctctcctcccctccacagagtggcagtggcggggtgaggtgagagagagtgagactgtgagagtgagagaccactccatctctccttttactctcctctcccctcccgctcgcttttttcagcggggggagagaggccgcggcggcagcttgcagcaccagagagagagagagagcgagcgagcgagcaaaggccaacagatcacagctagctccgccccgccccgcctaccagagttttcaatttcaccgcgacgtcaaaagaaagcagcttttggtggtaatctcttggagcattgcagcggcgagcgagatctgccacgacgcgccagctcctgcagcggcccggcggccccggcctgccactgctactcatctgcgccgctggcagaggagctgccgctaccgctgccgccgcacccattgcctgcccctgcagcctgcccaagcagcaagcacaaagccccatcccgcatcaccctcaggctactccaaactactgcaccgtccactgtcgcccgcgcgcctcagccacgcagtcttatgcatcaatgcatgccctagcattctgcggcttcccccgtgcggcgcccaccgctggagagtagagacacgcggatagcaccaagaccagcgccggctacgtagctgctgctcggtgtctcttcagactcttcttactaggggggaaggaggaggaccaaggcaggcagtcggcagcgaggaggtgaaaagggcagcagctgcccgtgccgtaggagaggccgggcggcggccgcgtacgtccgttgcagcgcgcgcgcgcgcgctctggcctccgtgcgataccacgcgacgctgaatcgccgatcgacatgacgctggaggctctgtgcccgaccagcagcgacgtcctcgtctacgacaccttcaacgccgccgccgcatgcgccgctgcttctgcggggaccttccttttcggcaatgcaccaccggtggaggtgccggcggcggcggcggcccaggcgaacggggagaacagcgtgcagcaggggcggaggaagcggcggcgacggcagaggagcaccaagaacgccgaggacgccgagagccagcggatgacccacatcgccgtcgagcgcaaccgccgccgccagatgaacgagtacctcgccgcgctccgctcgctcatgccggactcctacgtccaccggagcgatcaggcgtccgtggtcagtggcgcaatcgatttcgtgaaggagctggagcagcagctgcaatccctggaggcccagaagctggcgctgaagcggcagctgcagcagcagcagcagcgcagcgtcacggccgcgatacgcgacgacgcggcgcagccggctcgaggccgtgatgacatcggcgcgggcgcgggcggggacgccgcggcgcgcagcgaggtgtcggcgccggagccagacccgcctccgttcgcgcggttcttccggtacccgcagtacgcgcggcggcacgcggcggcgcgggaggacgccggcgcggaggagacgagccgcgcctccgcggtggcggacgtggaggtgggcgtggtggtggacgcgcacgccagcctgcgcgtgatggcgccgcggaggcccgggcagcttctgcggatggtggccgggatgcaggcgctcggcctcgccgtgctgcacctcaacgtggccaccgccgcggtcgacgcgacggcgctctacacgctcagcctcaaggtggaggaagggtgcgccctggcgacggcggaggagatcgccgcggcggtgcaccacgtcctatgcatcatcgacgccgaggcgacgccgcagaggctgctcgctgccggagcaccagggacagggcagccggacgtctagctagtcaggatgattcaggacgaggtcttcccggcgtaacggggcggcatgggctgcgcggggtgtctgcttccgtttcttgtaaagtgcagtggcgtgcgtgcgtggctggccagcacacgagagcctgatggcgtagcgtaggtacagagtatgtaacgggcaataacacgcaggttcgtgtctggacctgtggtctctcgttcgtgcatgcctatgcgtgcccttgtgtttgcgtgtgacgggaattggaattgaggacgggaagcaggaatgcaggaacagggaagggatcggacgttgttttcttcatgcgctcagcacaactgcgcaagggaaggggagccgtgctgaatcttgctactcgtacgctacagtgcttcacgcattctttccaatctacgcccaagtaacggtcattcttcttcctgggcctggccggccggcccactccaccatccttcgcagc

SEQ ID NO: 14900 - DNA, 2593 bp, Zea Mays
gctatgcctctcctcccctccacagagtggcagtggcggggtgaggtgagagagagtgagactgtgagagtgagagaccactccatctctccttttactctcctctcccctcccgctcgcttttttcagcggggggagagaggccgcggcggcagcttgcagcaccagagagagagagagagcgagcgagcgagcaaaggccaacagatcacagctagctccgccccgccccgcctaccagagttttcaatttcaccgcgacgtcaaaagaaagcagcttttggtggtaatctcttggagcattgcagcggcgagcgagatctgccacgacgcgccagctcctgcagcggcccggcggccccggcctgccactgctactcatctgcgccgctggcagaggagctgccgctaccgctgccgccgcacccattgcctgcccctgcagcctgcccaagcagcaagcacaaagccccatcccgcatcaccctcaggctactccaaactactgcaccgtccactgtcgcccgcgcgcctcagccacgcagtcttatgcatcaatgcatgccctagcattctgcggcttcccccgtgcggcgcccaccgctggagagtagagacacgcggatagcaccaagaccagcgccggctacgtagctgctgctcggtgtctcttcagactcttcttactaggggggaaggaggaggaccaaggcaggcagtcggcagcgaggaggtgaaaagggcagcagctgcccgtgccgtaggagaggccgggcggcggccgcgtacgtccgttgcagcgcgcgcgcgcgcgctctggcctccgtgcgataccacgcgacgctgaatcgccgatcgacatgacgctggaggctctgtgcccgaccagcagcgacgtcctcgtctacgacaccttcaacgccgccgccgcatgcgccgctgcttctgcggggaccttccttttcggcaatgcaccaccggtggaggtgccggcggcggcggcggcccaggcgaacggggagaacagcgtgcagcaggggcggaggaagcggcggcgacggcagaggagcaccaagaacgccgaggacgccgagagccagcggatgacccacatcgccgtcgagcgcaaccgccgccgccagatgaacgagtacctcgccgcgctccgctcgctcatgccggactcctacgtccaccggagcgatcaggcgtccgtggtcagtggcgcaatcgatttcgtgaaggagctggagcagcagctgcaatccctggaggcccagaagctggcgctgaagcggcagctgcagcagcagcagcagcgcagcgtcacggccgcgatacgcgacgacgcggcgcagccggctcgaggccgtgatgacatcggcgcgggcgcgggcggggacgccgcggcgcgcagcgaggtgtcggcgccggagccagacccgcctccgttcgcgcggttcttccggtacccgcagtacgcgcggcggcacgcggcggcgcgggaggacgccggcgcggaggagacgagccgcgcctccgcggtggcggacgtggaggtgggcgtggtggtggacgcgcacgccagcctgcgcgtgatggcgccgcggaggcccgggcagcttctgcggatggtggccgggatgcaggcgctcggcctcgccgtgctgcacctcaacgtggccaccgccgcggtcgacgcgacggcgctctacacgctcagcctcaaggctacgtaaaggagaaaaggacgatcatggagaatcctctcttggcttggcgagcagagcaggcacctggcccgtcgtccattgacatggcgaggagatcgatgtggactgcagagaaagattgtgttgtgtgccgctgccctgcctttttcttttctagtgctgcgtgtttcaggacagcagagactgactgctgagtaagctatatgtgtttgtgtgccccggagccgagccggacccctcaacgtagcaggtggaggaagggtgcgccctggcgacggcggaggagatcgccgcggcggtgcaccacgtcctatgcatcatcgacgccgaggcgacgccgcagaggctgctcgctgccggagcaccagggacagggcagccggacgtctagctagtcaggatgattcaggacgaggtcttcccggcgtaacggggcggcatgggctgcgcggggtgtctgcttccgtttcttgtaaagtgcagtggcgtgcgtgcgtggctggccagcacacgagagcctgatggcgtagcgtaggtacagagtatgtaacgggcaataacacgcaggttcgtgtctggacctgtggtctctcgttcgtgcatgcctatgcgtgcccttgtgtttgcgtgtgacgggaattggaattgaggacgggaagcaggaatgcaggaacagggaagggatcggacgttgttttcttcatgcgctcagcacaactgcgcaagggaaggggagccgtgctgaatcttgctactcgtacgctacagtgcttcacgcattctttccaatctacgcccaagtaacggtcattcttcttcctgggcctggccggccggcccactccaccatccttcgcagc

SEQ ID NO: 14901 - DNA, 2521 bp, Zea Mays
tggcagtggcggggtgaggtgagagagagtgagactgtgagagtgagagaccactccatctctccttttactctcctctcccctcccgctcgcttttttcagcggggggagagaggccgcggcggcagcttgcagcaccagagagagagagagagcgagcgagcgagcaaaggccaacagatcacagctagctccgccccgccccgcctaccagagttttcaatttcaccgcgacgtcaaaagaaagcagcttttggtggtaatctcttggagcattgcagcggcgagcgagatctgccacgacgcgccagctcctgcagcggcccggcggccccggcctgccactgctactcatctgcgccgctggcagaggagctgccgctaccgctgccgccgcacccattgcctgcccctgcagcctgcccaagcagcaagcacaaagccccatcccgcatcaccctcaggctactccaaactactgcaccgtccactgtcgcccgcgcgcctcagccacgcagtcttatgcatcaatgcatgccctagcattctgcggcttcccccgtgcggcgcccaccgctggagagtagagacacgcggatagcaccaagaccagcgccggctacgtagctgctgctcggtgtctcttcagactcttcttactaggggggaaggaggaggaccaaggcaggcagtcggcagcgaggaggtgaaaagggcagcagctgcccgtgccgtaggagaggccgggcggcggccgcgtacgtccgttgcagcgcgcgcgcgcgcgctctggcctccgtgcgataccacgcgacgctgaatcgccgatcgacatgacgctggaggctctgtgcccgaccagcagcgacgtcctcgtctacgacaccttcaacgccgccgccgcatgcgccgctgcttctgcggggaccttccttttcggcaatgcaccaccggtggaggtgccggcggcggcggcggcccaggcgaacggggagaacagcgtgcagcaggggcggaggaagcggcggcgacggcagaggagcaccaagaacgccgaggacgccgagagccagcggatgacccacatcgccgtcgagcgcaaccgccgccgccagatgaacgagtacctcgccgcgctccgctcgctcatgccggactcctacgtccaccggagcgatcaggcgtccgtggtcagtggcgcaatcgatttcgtgaaggagctggagcagcagctgcaatccctggaggcccagaagctggcgctgaagcggcagctgcagcagcagcagcagcgcagcgtcacggccgcgatacgcgacgacgcggcgcagccggctcgaggccgtgatgacatcggcgcgggcgcgggcggggacgccgcggcgcgcagcgaggtgtcggcgccggagccagacccgcctccgttcgcgcggttcttccggtacccgcagtacgcgcggcggcacgcggcggcgcgggaggacgccggcgcggaggagacgagccgcgcctccgcggtggcggacgtggaggtgggcgtggtggtggacgcgcacgccagcctgcgcgtgatggcgccgcggaggcccgggcagcttctgcggatggtggccgggatgcaggcgctcggcctcgccgtgctgcacctcaacgtggccaccgccgcggtcgacgcgacggcgctctacacgctcagcctcaaggtacgacggcggcgcacactaccggacggatgggtagctagcaaagcgacggtccctttctccttccgtccacggacacggaccaaccgtcgtcgtcaaagcctcgttgcttgtcacacactggctcgttttcttgtgcctgaaatggtgctatcgccgtgctctaacatgcactttggtcaccaccggtgccactgcccctgagcaagtggaggaagggtgcgccctggcgacggcggaggagatcgccgcggcggtgcaccacgtcctatgcatcatcgacgccgaggcgacgccgcagaggctgctcgctgccggagcaccagggacagggcagccggacgtctagctagtcaggatgattcaggacgaggtcttcccggcgtaacggggcggcatgggctgcgcggggtgtctgcttccgtttcttgtaaagtgcagtggcgtgcgtgcgtggctggccagcacacgagagcctgatggcgtagcgtaggtacagagtatgtaacgggcaataacacgcaggttcgtgtctggacctgtggtctctcgttcgtgcatgcctatgcgtgcccttgtgtttgcgtgtgacgggaattggaattgaggacgggaagcaggaatgcaggaacagggaagggatcggacgttgttttcttcatgcgctcagcacaactgcgcaagggaaggggagccgtgctgaatcttgctactcgtacgctacagtgcttcacgcattctttccaatctacgcccaagtaacggtcattcttcttcctgggcctggccggccggcccactccaccatccttcgcagc

SEQ ID NO: 14902 - DNA, 2774 bp, Zea Mays
tggcagtggcggggtgaggtgagagagagtgagactgtgagagtgagagaccactccatctctccttttactctcctctcccctcccgctcgcttttttcagcggggggagagaggccgcggcggcagcttgcagcaccagagagagagagagagcgagcgagcgagcaaaggccaacagatcacagctagctccgccccgccccgcctaccagagttttcaatttcaccgcgacgtcaaaagaaagcagcttttggtggtaatctcttggagcattgcagcggcgagcgagatctgccacgacgcgccagctcctgcagcggcccggcggccccggcctgccactgctactcatctgcgccgctggcagaggagctgccgctaccgctgccgccgcacccattgcctgcccctgcagcctgcccaagcagcaagcacaaagccccatcccgcatcaccctcaggctactccaaactactgcaccgtccactgtcgcccgcgcgcctcagccacgcagtcttatgcatcaatgcatgccctagcattctgcggcttcccccgtgcggcgcccaccgctggagagtagagacacgcggatagcaccaagaccagcgccggctacgtagctgctgctcggtgtctcttcagactcttcttactaggggggaaggaggaggaccaaggcaggcagtcggcagcgaggaggtgaaaagggcagcagctgcccgtgccgtaggagaggccgggcggcggccgcgtacgtccgttgcagcgcgcgcgcgcgcgctctggcctccgtgcgataccacgcgacgctgaatcgccgatcgacatgacgctggaggctctgtgcccgaccagcagcgacgtcctcgtctacgacaccttcaacgccgccgccgcatgcgccgctgcttctgcggggaccttccttttcggcaatgcaccaccggtggaggtgccggcggcggcggcggcccaggcgaacggggagaacagcgtgcagcaggggcggaggaagcggcggcgacggcagaggagcaccaagaacgccgaggacgccgagagccagcggatgacccacatcgccgtcgagcgcaaccgccgccgccagatgaacgagtacctcgccgcgctccgctcgctcatgccggactcctacgtccaccggagcgatcaggcgtccgtggtcagtggcgcaatcgatttcgtgaaggagctggagcagcagctgcaatccctggaggcccagaagctggcgctgaagcggcagctgcagcagcagcagcagcgcagcgtcacggccgcgatacgcgacgacgcggcgcagccggctcgaggccgtgatgacatcggcgcgggcgcgggcggggacgccgcggcgcgcagcgaggtgtcggcgccggagccagacccgcctccgttcgcgcggttcttccggtacccgcagtacgcgcggcggcacgcggcggcgcgggaggacgccggcgcggaggagacgagccgcgcctccgcggtggcggacgtggaggtgggcgtggtggtggacgcgcacgccagcctgcgcgtgatggcgccgcggaggcccgggcagcttctgcggatggtggccgggatgcaggcgctcggcctcgccgtgctgcacctcaacgtggccaccgccgcggtcgacgcgacggcgctctacacgctcagcctcaaggtacgacggcggcgcacactaccggacggatgggtagctagcaaagcgacggtccctttctccttccgtccacggacacggaccaaccgtcgtcgtcaaagcctcgttgcttgtcacacactggctcgttttcttgtgcctgaaatggtgctatcgccgtgctctaacatgcactttggtcaccaccggtgccactgcccctgagcaagctacgtaaaggagaaaaggacgatcatggagaatcctctcttggcttggcgagcagagcaggcacctggcccgtcgtccattgacatggcgaggagatcgatgtggactgcagagaaagattgtgttgtgtgccgctgccctgcctttttcttttctagtgctgcgtgtttcaggacagcagagactgactgctgagtaagctatatgtgtttgtgtgccccggagccgagccggacccctcaacgtagcaggtggaggaagggtgcgccctggcgacggcggaggagatcgccgcggcggtgcaccacgtcctatgcatcatcgacgccgaggcgacgccgcagaggctgctcgctgccggagcaccagggacagggcagccggacgtctagctagtcaggatgattcaggacgaggtcttcccggcgtaacggggcggcatgggctgcgcggggtgtctgcttccgtttcttgtaaagtgcagtggcgtgcgtgcgtggctggccagcacacgagagcctgatggcgtagcgtaggtacagagtatgtaacgggcaataacacgcaggttcgtgtctggacctgtggtctctcgttcgtgcatgcctatgcgtgcccttgtgtttgcgtgtgacgggaattggaattgaggacgggaagcaggaatgcaggaacagggaagggatcggacgttgttttcttcatgcgctcagcacaactgcgcaagggaaggggagccgtgctgaatcttgctactcgtacgctacagtgcttcacgcattctttccaatctacgcccaagtaacggtcattcttcttcctgggcctggccggccggcccactccaccatccttcgcagc

SEQ ID NO: 14903 - DNA, 430 bp, Zea Mays
tacacatgtacgcgtcgaggggggaccccgagcctcggccattgtttggcgaaatccagtactgaaaggaagctccaaagcttgtttgtacgccgaacgtttcgcgggaaagggaccgagcaagtacggtggtggtggcccctccccgttgctttcgccgtggaaaaccagttgcgacggatggggatcggacaggtgtgcgtgtgcgtcacgcgcggggggcacggtggtggtggcggtggcggcggcggcctggtgcctggtgggcgcgggagcattttccagacacttgcccgcgctgcgccggcgcgcgcgactgggacggacgccgcacaaggcacggctggcatctccacaccacacggccatgcgtgaagtcgtctgaagctccgtcgcccttgcgcctctccacacggccatgcgccggcgg

SEQ ID NO: 14904 - DNA, 730 bp, Zea Mays
cttgtgaagataactcttattttgtttctctgtttgcattatttgaatttagactatcagaatgcctcgaggacaatgctcttctgtgtcaacccgtgagaatcccaaagttgatcgggcaactgattcaaatgatgacagccgcaagaataggaggggtgcttatttgctactgggattgctgatagtgttcattcatggatcatggtctgtttatcatatccagtttggaagccttcctttgccccttgatgctgagcaggctggaaagaggggtttctccgaagcttcggcgctgaagcatgttaagtatttgacaggcttgggtcctcacccagtcggttcagatcccctcgatcatgctattcagatataggcgcaaatcgtctatctggtggtctttttaagggaatctgaacatgcggcgcgcattttccaaccagtccaagcgtgcagcatcaatgatacactaatgatatgaaactcaggagtgtgtacaaaagagaataattaactcccccccaaagaataaaatgtgttttcgatatataaacacaatttctgctgtaatattacaacccaaaaagaactaaaatctatactgctaaagttcgtgtatcagctcaaagagaaaaaagtgaactctatggtacaaaccgtatgaagtgagccaatccttcacctttccaggatatgggttactttaccaagcctaagttccattagttca

SEQ ID NO: 14905 - DNA, 2134 bp, Zea Mays
gcaaatggcaatggtgcatcgaaaaacccaaatttcagcaaaagtatgcctacaagccaaaacgagctccgaatccgtttcaaccactatcaaatctccgcttcggattttttggttaagacttaagaatgagacatccactccctcctctcccacacgcgtgcttcttgaatgctggacgcggccaaacagcgccagcagcaaatctccaggctgcacagcagcagcagcgaccgcccgcaggcatgcaacagcagcagcggcacggggagaaaaaggtgggccaaaccgggcacgaaaccgaagcgctcaccgtccctcacccaaatcgccgaccgtgaggagagaagccgagctgaagagagggagggcagcaggcggcagcgcggaggggaaatggggaatgcgcgaccagtgtgagcctctcacccccgcgaaatcccaccgcttctgattccgccggctaaattagctgggctaaacggtggacggcggcttcgagagctcctcctcacctcggcatcgtcggccgcctccaactgcgtcccggacgccgtctcggtctcccgggtgtccgccaacctcacggcggcggagaagcagctgccccctccggccgcagctgtgtccacggcgacgacgctgcagcacgtggtgttcggcatcgcggcgtcgtcgcggttctgggacaagcgtaaggagtacatcaaggtgtggtggcgcccgcgcggcgccatgcgtggttacgtgtggctggaccggaaggtgcgcgagtccaacatgtccacggcgcgcacggggctcccggacatcaggatatcgtccgacacctccgccttcccctacacgcaccgccgcggccaccgctccgccatccgcatctcccgcatcgtctccgagacgttccgcctcgacctccccggcgtgcgctggttcgtcatgggcgacgacgacaccgtcttcttcccggacaacctactcaccgtgctcaacaagttcgaccaccgccagcactactacatcggctccctatccgagagccacctgcagaacatatacttctcctacgggatggcgtacggcggcgctgggcgtgccgctcaccaagcacccggggttccaccagtacgacgtgtacggcgacctcctcggcctcctcgcgtcccacccggtcgcgccgattgtgacgctgcaccacctcgacgtcgtgaagccgctgttcccggaggtgaggtcgcgcgccgcagcggtgcggcggctgtttgacgggccggtgaagctggacacggcggggctgatgcagcagtccatctgctacgacggcgccaaccgttggacggtgtccgtcgcgtgggggttcacggtgctggtggcaaggggcataatgtcgcctcgggagatggagatgccggcgcgcacgttcctcaactggtaccggcgcgccgactacacggcgtacgcgttcaacacgaggcccctggcgcgcagcccgtgccagaagcccgccgtgtactacctgtcgtcggcgcggcgtgcggccttgcgtggcggggtgaccacggagacgcggtacgaccggtggcgccacccgaacgagacgcggcccgcgtgccggtgggacataaccgacccggacgcgcatctcgatcacatcgtcgtgctcaagaagcctgaccccgggctctgggacaggtctccaaggcgaaattgctgccgagtggtgtcttcgcccaaggatggcaagaacggggagaagacgatgaccatcgatgtaggcgtatgcagagaaggcgagttcagccaagtagccggagcgtgaactttcatatagagatagatgaagataggaagcttcaaattcttttcttttcttgcgcgaatccattcttcttgtagggcatgaactagtcgaaacacctctctttgcgcctcacgggcgtctagctgtaactgcagttcacaaaacgccagaaggccaggactagaagttttggccgggcgttccggcatggtgacggcagtcaacccgccgccctacgcgcaactagcgacggctacggtgcctagattttgggtatagtatgtgctaaacttggcctttttattatggaaacaaaatatttcagccttttgc

SEQ ID NO: 14906 - DNA, 653 bp, Zea Mays
ccaaataactgcagcacatgatgcattgcaatttagagaggactgacaactgggcaacgcacatactggccaagtggccagcattgttgcttgcttggattagaatacgcagccagctactccatgtccgtaagaggcaaggcaagcttaaagaaaacagaaattgcaatgccaatacatgttcctttcgtctacaaaagaatataaatatgtctccaaggcgaaattgctgccgagtggtgtcttcgcccaaggatggcaagaacggggagaagacgatgaccatcgatgtaggcgtatgcagagaaggcgagttcagccaagtagccggagcgtgaactttcatatagagatagatgaagataggaagcttcaaattcttttcttttcttgcgcgaatccattcttcttgtagggcatgaactagtcgaaacacctctctttgcgcctcacgggcgtctagctgtaactgcagttcacaaaacgccagaaggccaggactagaagttttggccgggcgttccggcatggtgacggcagtcaacccgccgccctacgcgcaactagcgacggctacggtgcctagattttgggtatagtatgtgctaaacttggcctttttattatggaaacaaaatatttcagccttttgc

SEQ ID NO: 14907 - DNA, 2369 bp, Zea Mays
taaaaaagcaaaacctaggtattcagcccaacagccgtagcctcccttggcccctgcttccttccgtggccgcaccaggcacagccgccgcaggcgcacaagacgtccgctcccgcccggccgcctgctcgtcgttacgtgcacccgccgcgaccgcctccgtatggctggccgccggctatccgaatacgactgcgcacccgtgccttacggagtcaccgcctcgcaggttctagcctcgcgcgcttgctagcctgctggttggccgtgcttcgccagacgactactgcttggtgctcagtttgctgcttactagcctgcttcggctgcttgcttggcttagctgcttgcaagcctgttgctagttgctagacggcctcttccctagcctgcttttgctgcttgctagttgctagcctgctgccctgcttgatttcaaaaagattggtttgagcaatataattggttggaatacagtttgcttatatttggttaaattgctgatttgacatatagtctacatcagattcttgatctaagggcaaccctgtaggcatcatggaagaaaacgagtgagttcagcagccattacaacagatgggaatacagacaaactctttgaattcttggaacaacggttaggcaagccattgctaataacatcggcagccaatttggtatcagcagaaccctgaaatgatcaaaaacgacgtttcccatgacaggaagaatgtccagctcgacgtgcttggtccgaatttttgaaacataatgttatcgactctactttttttttatatagaatacaaaccacttcgaaagcaatcagaaaactttgaccggaccttttgtcaacatttgtaccgaccattttcaaatcttagcatgaagagaaaaggccttttacgattcacaacaaaacaaatcaccccagagactggagatagcctcccctagtgcacaaggcaatcttcagcagatcctctatcccattcattatccgtcacatattttaaatttatctctgtgaagagtgtcatcataatttctgaaccctattttacacaaaccactagaggacagtccaagaactccaatctaccaacctaccgccgcaacgagcagaggtgctgcgacgaggcagcaagttccaaggtcgtcaaaatgtactgtcgatcctttcgcgagtaagatctgcattgctcagtattatgaatgatcttctcatggatgccagaagcatctccgaagtctgacatgcgaagtttgttcacaattcatcaccacaatttcaatttgcaacgaggcaaacactggaacagaggaaactgatcgactcgacgcaaaaaaaagggcttttgctcgagatcagaaggaaaacagagacggttgtcagtcactgaaaaaaatcagaaacacggaccaatctttccttcatcacatccagcgcagatccagattcacaaacgaacacaaaaaggggggaaacggcgacagcagaagcatttgcgatggcagcacgtaggccatcagagacttaaaactaggaatcatgtcctggatcattttgttgcagttattctctaatcatctgaccatgcacaccattgcagccgagagatgcaaaaaaatgatcggaaaaaaaactgcgaagagcgaaataaacactgcaccaaggagaggagaggagacgagacgattgattggagagaaacgaagcgaaggaggaagagagacagccgcacttgcagtccgcacccagcagcgccggaatgcccgcgcatccaagattcattttgcttctgcatataaagacgtcgagtgaagaaaccctaggagcccctgtcctgtgtcgcggctaacaagggccaagcccatgaacaagtacggtcgaaagtcctgaatccgccgtgggacgacggctgcagaggtccggtcacgttggcgggtggtcagtgcggagctagtgagctagctagcgggactcgcgtggcgcaacgcaaggccagttgtgtggctgcaggggccaggccagggggcacacctgcgtggcactgtttggcttgtacaggacgtgtgacaggattaattgggacgaaaacaaaagactcaagttgtcagtcatgtgtgcgaagtttaacctttgttttcttcttctaagattcaaaccgaagtttcacgagaacgcacgtgctccggaattggcggttctggatacagtcagacaaagatggcagcatacgtagtatttttccatggcgcatgcgcacggttccgaacacatgcggaaacactgccggtcgattgaattgaactattgcggttgcggaaggacagacatatgggggtggggctatggcatgcatgcg

SEQ ID NO: 14908 - DNA, 1524 bp, Zea Mays
ttccttccgtggccgcaccaggcacagccgccgcaggcgcacaagacgtccgctcccgcccggccgcctgctcgtcgttacgtgcacccgccgcgaccgcctccgtatggctggccgccggctatccgaatacgactgcgcacccgtgccttacggagtcaccgcctcgcagcttatatttggttaaattgctgatttgacatatagtctacatcagattcttgatctaagaggacagtccaagaactccaatctaccaacctaccgccgcaacgagcagaggtgctgcgacgaggcagcaagttccaaggtcgtcaaaatgtactgtcgatcctttcgcgagtaagatctgcattgctcagtattatgaatgatcttctcatggatgccagaagcatctccgaagtctgacatgcgaagtttgttcacaattcatcaccacaatttcaatttgcaacgaggcaaacactggaacagaggaaactgatcgactcgacgcaaaaaaaagggcttttgctcgagatcagaaggaaaacagagacggttgtcagtcactgaaaaaaatcagaaacacggaccaatctttccttcatcacatccagcgcagatccagattcacaaacgaacacaaaaaggggggaaacggcgacagcagaagcatttgcgatggcagcacgtaggccatcagagacttaaaactaggaatcatgtcctggatcattttgttgcagttattctctaatcatctgaccatgcacaccattgcagccgagagatgcaaaaaaatgatcggaaaaaaaactgcgaagagcgaaataaacactgcaccaaggagaggagaggagacgagacgattgattggagagaaacgaagcgaaggaggaagagagacagccgcacttgcagtccgcacccagcagcgccggaatgcccgcgcatccaagattcattttgcttctgcatataaagacgtcgagtgaagaaaccctaggagcccctgtcctgtgtcgcggctaacaagggccaagcccatgaacaagtacggtcgaaagtcctgaatccgccgtgggacgacggctgcagaggtccggtcacgttggcgggtggtcagtgcggagctagtgagctagctagcgggactcgcgtggcgcaacgcaaggccagttgtgtggctgcaggggccaggccagggggcacacctgcgtggcactgtttggcttgtacaggacgtgtgacaggattaattgggacgaaaacaaaagactcaagttgtcagtcatgtgtgcgaagtttaacctttgttttcttcttctaagattcaaaccgaagtttcacgagaacgcacgtgctccggaattggcggttctggatacagtcagacaaagatggcagcatacgtagtatttttccatggcgcatgcgcacggttccgaacacatgcggaaacactgccggtcgattgaattgaactattgcggttgcggaaggacagacatatgggggtggggctatggcatgcatgcg

SEQ ID NO: 14909 - DNA, 801 bp, Zea Mays
aattgctgatttgacatatagtctacatcagattcttgatctaagccgagagatgcaaaaaaatgatcggaaaaaaaactgcgaagagcgaaataaacactgcaccaaggagaggagaggagacgagacgattgattggagagaaacgaagcgaaggaggaagagagacagccgcacttgcagtccgcacccagcagcgccggaatgcccgcgcatccaagattcattttgcttctgcatataaagacgtcgagtgaagaaaccctaggagcccctgtcctgtgtcgcggctaacaagggccaagcccatgaacaagtacggtcgaaagtcctgaatccgccgtgggacgacggctgcagaggtccggtcacgttggcgggtggtcagtgcggagctagtgagctagctagcgggactcgcgtggcgcaacgcaaggccagttgtgtggctgcaggggccaggccagggggcacacctgcgtggcactgtttggcttgtacaggacgtgtgacaggattaattgggacgaaaacaaaagactcaagttgtcagtcatgtgtgcgaagtttaacctttgttttcttcttctaagattcaaaccgaagtttcacgagaacgcacgtgctccggaattggcggttctggatacagtcagacaaagatggcagcatacgtagtatttttccatggcgcatgcgcacggttccgaacacatgcggaaacactgccggtcgattgaattgaactattgcggttgcggaaggacagacatatgggggtggggctatggcatgcatgcg

SEQ ID NO: 14910 - DNA, 2208 bp, Zea Mays
tctctcatgggcaattgccaattggggcattgggcatcactcagagcacacgttgcttcggatccatggccgcgcatcggtagcgtctcagactcaggctcaggtatccagcctccacatggcacccttgcatttttctgctttctcagaaaagaacccaagtgcttaaataacgatcatataaagcattgtacagtccatttccggcaccactctgcacttgactttcgcgagtgccccccatgcccgagtcacctgcatctccggccaaacccccctcgcagccgggatctccgctcaatgccgccactccgtccccagcgtcggcattgctgcgaggctccgtgctgctcatcgccttcctcgtactccagctcgtgctcctctggaacatcctcggcctccccagctcccgcttcctcccggtgccgggccaaagagacactacctggcccaacggcgcagtcaacggcggagcgtgcgatgaggggctcatctacgtctacgacctcccgtcggagttgaaccacgacctcgtcgacgactgcgagagcctgtggccctggtactcgttctgcccgtacctaaccaacggcggcttcggcgaggcggccgccacgctgcccgtcttcttcaacgtcacacggaacgtgtcgttgcccagctggtacaacaccgaccagttccagctcgaggtcatcatccaccgccgcctcctctcccaccggtgccgcaccaccgactcgtcgctggccaccgcgttctacgtcccgttctacgtcggcctcgacgttggcagccacctgtggggggacaactctaccgctgccgaccgcgacagggcaggcttgaggctgctccggtggctcaagaaccagacgtccttccagaggtccggcggctgggaccacttcatcacgctggggcgcatcacgtgggacttccgccggtacggcgacgacgggtggggcaccaacttcgttgtcctgccggggatagccaacgtgacccgcctcggcatcgaggccgaccggctggaccccatggaagtcggcgtcccgtacccgaccggcttccacccccgcaccgccgccgacgtgcgcgcgtggcagcggcacgtgctctccctcaagcgcagcaagctcttcggattcgccggtgcgccgcgctccgggttccgggacgacttcagggaggtgctgctggaggagtgcgaggacgctgggagcgagcactgccgctccgtggactgccgcggcacgcggtgcaccgacaacggcgcggcggtgctggagctgttcctggactcgagcttctgcctgcagccgcgcggggacagcttcacgcggcgctcgctgttcgactgcatggtggccggcgccgtgccggtgctgttctggcggcggaccgcgtacgaccagtaccggtggtacctgcccccggggccgcgcggcgaggagggggagtggtcggtgttcatcgaccggcaggcgctgcgcgtgggcaacgtgagcgtgcgggacgttctggaggggctcagcgagcggcgggtgcggcggatgcgggagcgcgtggtggagatgatcccgcggctggtgtacgcgtcatcgtccgacgggctcggcgacggcatggaggacgccctcgatgtggcgctgcgcggcgtgctggagcggttccggcggcgccgggcgagcaccgcgcctgtaggtgtttcagcaaagcactcgccaggccgcttcgtcgcccggagtgtcgacggcaaatcgacgccgccgcctccttctgacggcaaaaatggttcggtagcgacggtcagtaaggacgactcaggaacaaatccgagccccccggcttcgtcacacataaaaaccgtcgtgtccatagcatcggcttcaactggaacgagcttgcaaaaatcgtgaagtaactgaagagtgaagaccttgaaccgtggacatagaaatgctgaatttcgttctgctgcatctgcatcttggaatttggatcgcggatatccagggtcaactgtagcagagagtgagatctagggcggaatttgttggttacggtggaatttgttggtttaccggggagggccgaatgggaaccaccgcttgcgtttaaaaaaaacggtttatatgttttgctgctgccacactgccgtgctagatgcattggcgttaattgcagttgaccaagtggtag

SEQ ID NO: 14911 - DNA, 213 bp, Zea Mays
gccatccccttgtgaccgtatagcccaagtataaaatcctgacctcgcccgagctcgccacagcgtgctctttaccacgccggacctcgtcgtgctctttctcacttgcctcaccgtgaccggcactccccgagatccttgggaacatcacgttgccgtcagtaaacgccgcttcgaacccatcgccttgtggaccggccaatccgagtgttc

SEQ ID NO: 14912 - DNA, 2584 bp, Zea Mays
tctccacctccacccgtggccgtggtaatcaaatcgaacgcacatgcggtgcgcctccctttcccgacctccccctgtctcggcctccacctaatcccgggcaccccaatccgaggagactgccgtgcgctttaagtgagcgcatcacacgaaaagcagcaggtagccagccgagaccgggagagaagcagcagcagggccgccaacgccatggcggtaggcgcgaccgccgcgaagctgcacctctcgtcggcggcagcggccgcgcgccgcccgtcgctgctccacctcgcggccgtggccgtcctctgctcgctgtcctacctcttcggcatctggcaccacggcggcttctccgctggccccgccgccggcggcgccacctcctcctcctcggtctccatcgccaccgccgtgtcctgcgcctcccccgccctgacgaccgccccctcgtcaccccccgcggggccgctcgacttcgccgcgcaccacacggcggaggggatggagtccgaggccgcgctccgccagcgcagctacgaggcgtgccccgccaagtactccgagtacacgccctgcgaggacgtggagcgctccctgcggttcccgcgggaccgcctcgtctaccgcgagcgccactgccccgcggacggcgagcgcctgcgctgcctcgtgccggcgcccaggggctaccgcaacccgttcccctggccggccagccgcgacgtcgcctggttcgccaacgtgccccacaaggagctcagcgtcgagaaggcggtgcagaactggatccgcgtcgacggcgacaggttccgcttccccgggggcggcaccatgttccctcgcggcgccggcgcttacatcgacgacatcgccaagcttatccccctccacgacggatccatccgcaccgcgcttgacaccggctgcggggttcattttgctgctttgtacaggtggcgagctggggggcctacttgctgtcacgcgacattcttgccatgtccttcgccccgcgagactcccacgaggcgcaggttcagtttgcactagagcgtggtgtgccggcgatgattggtgtcctcgcctccaatcggctcacctatccggcacgttcctttgacatggcgcactgctctcgttgcctcatcccgtggcaactttacgatggcctgtacttgatagaggttgatcgtatcctgcggcctggaggctattggattttgtctgggccaccaatcaactggaagaaacactggaaggggtgggacaggactaaagaagacctggatgcagagcagaaagccattgaggcagttgccaggagcctctgctggaagaagatcaaggaggcgggcgacattgctatctggcagaagcctactaaccacattcattgcaaggccatccacaaagttagcaagtccatacccttctgctctaaccaaaacccagatgctgcctggtatgacaagatggaggcttgtataactcgactcccagaggtcagtgacttaaaggaggttgccggcggtgcgttgaagaaatggcccgagaggctcactgcagtgccacccagaattgccagtggcagcatcgagggggtcacggaagagatgtttgtggaagatactgagttatggaagaagagagttgggcactacaagtccgtgattgcgcaacttggtcagaaaggccggtaccgcaacctactcgatatgaatgcaaagtttggcggcttcgctgcggcattggtgaatgatcccttgtgggtcatgaacatggtccctactgtggggaactcaacaacccttggggcaatatacgagcggggcctcattggaagctaccaggactggtgtgagggcatgtccacttatccccggacctacgacctcattcatgcggattcactgtttacactgtacaatggcagatgtgaggcggacaacattctgctcgaaatggacagaattctgaggccagagggcacggtcatcatcagagatgacgtggacatgttagtgaagataaagagcatcacggacgggatgagatggaatagccagatcgtggatcacgaagatggtccgctcgtccgggagaagctcctccttgctgtgaagacatactggactctggacgacagcaaacaatagcaataacgtggaatagagagttagaatgattattgacgtgatcggcaaatcttgcgactgccttaccgtttgccctgtgaatctggtggactttgggttccattttctttttgggtattcattggggggagatagttcacataatggagatataatctccttgttaagatataagactgaacccagcacagattttgacataaaaaacatacattgtgcaaagtgggtaaatagaaagtacaatattgggactacctttttctccggatgcacattgtctggttatggctatgatgtcatatgatccctttcacacaaatctaaactaggactaatcgtcatccaatgtctttgctcagaattcacgagttgtaaacttaagattcttgccagctttcgtttagcgcgcaatgtacagaatcaag

SEQ ID NO: 14913 - DNA, 2266 bp, Zea Mays
cctccacccgtggccgtggtaatcaaatcgaacgcacatgcggtgcgcctccctttcccgacctccccctgtctcggcctccacctaatcccgggcaccccaatccgaggagactgccgtgcgctttaagtgagcgcatcacacgaaaagcagcaggtagccagccgagaccgggagagaagcagcagcagggccgccaacgccatggcggtaggcgcgaccgccgcgaagctgcacctctcgtcggcggcagcggccgcgcgccgcccgtcgctgctccacctcgcggccgtggccgtcctctgctcgctgtcctacctcttcggcatctggcaccacggcggcttctccgctggccccgccgccggcggcgccacctcctcctcctcggtctccatcgccaccgccgtgtcctgcgcctcccccgccctgacgaccgccccctcgtcaccccccgcggggccgctcgacttcgccgcgcaccacacggcggaggggatggagtccgaggccgcgctccgccagcgcagctacgaggcgtgccccgccaagtactccgagtacacgccctgcgaggacgtggagcgctccctgcggttcccgcgggaccgcctcgtctaccgcgagcgccactgccccgcggacggcgagcgcctgcgctgcctcgtgccggcgcccaggggctaccgcaacccgttcccctggccggccagccgcgacgtcgcctggttcgccaacgtgccccacaaggagctcagcgtcgagaaggcggtgcagaactggatccgcgtcgacggcgacaggttccgcttccccgggggcggcaccatgttccctcgcggcgccggcgcttacatcgacgacatcgccaagcttatccccctccacgacggatccatccgcaccgcgcttgacaccggctgcggggtggcgagctggggggcctacttgctgtcacgcgacattcttgccatgtccttcgccccgcgagactcccacgaggcgcaggttcagtttgcactagagcgtggtgtgcgggcgacattgctatctggcagaagcctactaaccacattcattgcaaggccatccacaaagttagcaagtccatacccttctgctctaaccaaaacccagatgctgcctggtatgacaagatggaggcttgtataactcgactcccagaggtcagtgacttaaaggaggttgccggcggtgcgttgaagaaatggcccgagaggctcactgcagtgccacccagaattgccagtggcagcatcgagggggtcacggaagagatgtttgtggaagatactgagttatggaagaagagagttgggcactacaagtccgtgattgcgcaacttggtcagaaaggccggtaccgcaacctactcgatatgaatgcaaagtttggcggcttcgctgcggcattggtgaatgatcccttgtgggtcatgaacatggtccctactgtggggaactcaacaacccttggggcaatatacgagcggggcctcattggaagctaccaggactggtgtgagggcatgtccacttatccccggacctacgacctcattcatgcggattcactgtttacactgtacaatggcagatgtgaggcggacaacattctgctcgaaatggacagaattctgaggccagagggcacggtcatcatcagagatgacgtggacatgttagtgaagataaagagcatcacggacgggatgagatggaatagccagatcgtggatcacgaagatggtccgctcgtccgggagaagctcctccttgctgtgaagacatactggactctggacgacagcaaacaatagcaataacgtggaatagagagttagaatgattattgacgtgatcggcaaatcttgcgactgccttaccgtttgccctgtgaatctggtggactttgggttccattttctttttgggtattcattggggggagatagttcacataatggagatataatctccttgttaagatataagactgaacccagcacagattttgacataaaaaacatacattgtgcaaagtgggtaaatagaaagtacaatattgggactacctttttctccggatgcacattgtctggttatggctatgatgtcatatgatccctttcacacaaatctaaactaggactaatcgtcatccaatgtctttgctcagaattcacgagttgtaaacttaagattcttgccagctttcgtttagcgcgcaatgtacagaatcaag

SEQ ID NO: 14914 - DNA, 1745 bp, Zea Mays
agcaatcggagatctcgggaatggcgttggctagctttgcgggtgtcggaagtttccaatcccttctccgcttgtcgggtcagagggtttttgtgtctgtgaacgggtctcacccaggtggcgagctggggggcctacttgctgtcacgcgacattcttgccatgtccttcgccccgcgagactcccacgaggcgcaggttcagtttgcactagagcgtggtgtgccggcgatgattggtgtcctcgcctccaatcggctcacctatccggcacgttcctttgacatggcgcactgctctcgttgcctcatcccgtggcaactttacgatggcctgtacttgatagaggttgatcgtatcctgcggcctggaggctattggattttgtctgggccaccaatcaactggaagaaacactggaaggggtgggacaggactaaagaagacctggatgcagagcagaaagccattgaggcagttgccaggagcctctgctggaagaagatcaaggaggcgggcgacattgctatctggcagaagcctactaaccacattcattgcaaggccatccacaaagttagcaagtccatacccttctgctctaaccaaaacccagatgctgcctggtatgacaagatggaggcttgtataactcgactcccagaggtcagtgacttaaaggaggttgccggcggtgcgttgaagaaatggcccgagaggctcactgcagtgccacccagaattgccagtggcagcatcgagggggtcacggaagagatgtttgtggaagatactgagttatggaagaagagagttgggcactacaagtccgtgattgcgcaacttggtcagaaaggccggtaccgcaacctactcgatatgaatgcaaagtttggcggcttcgctgcggcattggtgaatgatcccttgtgggtcatgaacatggtccctactgtggggaactcaacaacccttggggcaatatacgagcggggcctcattggaagctaccaggactggtgtgagggcatgtccacttatccccggacctacgacctcattcatgcggattcactgtttacactgtacaatggcagatgtgaggcggacaacattctgctcgaaatggacagaattctgaggccagagggcacggtcatcatcagagatgacgtggacatgttagtgaagataaagagcatcacggacgggatgagatggaatagccagatcgtggatcacgaagatggtccgctcgtccgggagaagctcctccttgctgtgaagacatactggactctggacgacagcaaacaatagcaataacgtggaatagagagttagaatgattattgacgtgatcggcaaatcttgcgactgccttaccgtttgccctgtgaatctggtggactttgggttccattttctttttgggtattcattggggggagatagttcacataatggagatataatctccttgttaagatataagactgaacccagcacagattttgacataaaaaacatacattgtgcaaagtgggtaaatagaaagtacaatattgggactacctttttctccggatgcacattgtctggttatggctatgatgtcatatgatccctttcacacaaatctaaactaggactaatcgtcatccaatgtctttgctcagaattcacgagttgtaaacttaagattcttgccagctttcgtttagcgcgcaatgtacagaatcaag

SEQ ID NO: 14915 - DNA, 1361 bp, Zea Mays
ctctcccctgccccgttctcttctgctgcctgcctttctctcttctggcgtccgcgtgtgtgtgcatttcactgtactgctttcatctcccgctctttcttcacctgctccgcgctagtgctggaaccaagaaagcctcatgcggcggcggctggccgaggtgcggtagagcggcggagatgggctgggcacccaggtggttgcgcgggctgctcggcggcggcggcaggaaggccgccgacacaaggccggtgaaggagaagaagcgctgggggttcggcaagtccttccgggagaagccccccgcgccagtgccggcgcggcctccgactccgacgcctccgtcgcatcccgcggcgacgcctcgccggggctatgcagcggcggatgaggcgggcgacgagcagagcaagcgcgctatcgcggtggccgcggcgacggcggcggtggcagaggccgccgtcgctgccgcccaggccgccgccgccgcgcggcggcggcggcggaaaccaccaccaccaccaccagtcgccgtgctcgacgacgatgggttccgagcagaacagccggagctacgcgaccatggcggagtcgccgtccaaggactcgacgaccgcgcagcagtcggtgccgagcccggcgtcggtgggcatggccgaggaggccctgagcccgctgcgcgtgcccgtgcccgcggacgtggccgagctctgcgacagcccccagttcttctcggccacgtcgtcgcggcccgggagctcgaggcggggcccgttcacgccgacggccaagagcgagtgctcgcgcagcctcttcggcggctactccgactacccgaactacatggccaacacggagtcgttccgcgccaaggcgcggtcgcagagcgcgcccaagcagaggccgcagtacgagaggtccagctccctacgcagggcgtcggcggcgcagaggtcggcggcggcggcggcctcctccctgcacgccaagttcaccaacaaggcgtacccgggctctggcaggctggatcggcttggcttgccggccaggtactgatcctgatcctgatcctgcctaattcgcgccagggatgatgtgctgccgctgtgtctcgagcgaggacgacgacgaagaagtgcaatcgactagtggtagttaggttccgtgccttggttgtgctattaccatcaacagtttttctgtttcttgctttgtgtagctagccatgtctaaagttgctggtagctgtaatgatgctataatgcgtgcttaactgctgacgaaccttttcctctacatttccgtggtatatatatatgtgccgtcaaatcatgcatgggaattgaatgtgttgttgcaaa

SEQ ID NO: 14916 - DNA, 3112 bp, Zea Mays
ttttatttcaaaagaggagccttgtgggggaaacgtgagggaatggttggagatggcaaatgccgcttgtgtgggcggaagctttttgggagtagaaaagggaaagcctgccactgtcagcaacctaggcgctcctgcagtcctgctgctggttcttgcctgtctcccgcttgttctccctagttccgacccgaagcagggaatgagcttcggcgatctcgacggcggcgggtccgcggccggcttgcagtacccgtacggcgccttcgcgtcatcgccggtcctctcgctcaccgtggtggacgccaggcgccgccgcggcggcggcgggaacgcgaaggacgcgtcggaggcggagaacgagggacagtcgatgatgagcggacacctcgacgtcgtcctgtctggcggcggcgatggcgaggacggcgaggccgcgaaccagcgcaagcccaagcgcaagaagccgtacaaccgccacacgccgcggcagatcgaacagctcgaagcgatgttcaaggaattccaccacccggacgagaagcagcgcgcgcagctgagcaggcagctgggcctggacccgcggcaggtcaagttctggttccagaaccggcgcacgcatttgaagaaccaactggagcggcaggagaacgcgaggctgaaacacgagaacgacaaactgcgcgtcgagaacctgtccatccgggaggccataagggacctggtgtgcagctgctgtggcggtccagcggtgctcggggagctgtcgcccgaagagcaccagctgcgcctcgagaatgcgaggctcagggacgagctcgctcgagtctgcaccgtcacttccaagttcattggcaagcccatgtctcacatggaactgctgctcgcgaaggagccgcatcctatgacaggctcgtcactggaacttgcagttgctgttggtgttggttccagcgtgccatcgagcaaaatgcctgtctcgacgatctccgagttggccggcagcacatccagctcaacgggaacagtgaccacgcccatggtgactgcatccttgccgatggttagcattgacaagtccaagttcgcccagcttgcagtgagtgcgatgaatgagcttgtcaagatggcgcggatgaatgaaccgctgtggattccaaccattccctcacctggctcaccaatcatggagactctaaactttaaagagtacttgaaggcattctcaccatgtgttggagtgaagcctactgggtttgtgtctgaggcctctagggaatccggcattgtcaccattgacagtagcgctgctcttatggaggtcttcatggatgagagacgatggtcagacatattctactgcattgttgccaaggcatcaatcgttgaggagatcttacctggtgttgcaggaagcagaaatggtgcattgctgcttatgcaggcagaactacaaatgctttcacctcttgtccctataagggaggttacatttctcaggttctgcaaacagcttgctgagggtgcatgggctgtagtggatgtttccattgatggactgcagacggatcagtgcctagctacaaacacgaaatgccggaggctgccttcaggttgcgtgttgcaagatacccccaatggctgcaaggtcacatgggttgagcatgcagaatatcctgaggcgtccgtgcaccagctctaccagcctcttatgcgctctggcctcgcccttggcgcagggcggtggcttgcaacactgcaacgccagtgtgagtgcttggccatcctcatgtcatcgcttgcagcgccagagcatgactcagcagcggtttctctggaaggaaaatggagcctgttgaagttggcacggaggatgatggagaacttctgcgcagggatgggcgcgtcatcttcccgcgaatggagtatgctggatggctttacaggtagcacggggaaagacgtgcgggtcatggtgcagaacagtgtggatgaacctggggtgccaccgggtgtggtgcttagcgtcgccacagcagtatggctacctgtgacccctgagcggctcttcaacttccttcgcgacgaggagctccgtgctgagtgggacatcctcagcaatggtggccctatgcagcaggtgctacgcatttccaagggccaactggacggcaactctgtcgctctgctgagagctgatcatacagactcccacctgaacagcatcttgattctacaagagacgtgcactgacagatctggcgcaatggtcgtgtacaccccggtggacttcccggcaatgcagcttgtgcttggtggaggggactcgaagaacgtggcgctcttaccatctggtttcgtcattctgcctgctgggtctaccgccagtgggctcgggcacaaggcacgcggatcgctgctcacagttgcattccagatcctcgtgaacagccagcccacagcaaagctgacggtggagtcagtggacaccgtgtacagcctcatctcctgtaccatcgagaagatcaaggcggcacttcactgtgacgtctgttaacttgggaacaggaagcttcaggcatggaggcaaggcaacagctggtgatcagcctgagtcaagaacgaaccgcgcaaaacagtagtgacctttgctaggtggtacgggtccatagggctggcccgtagcacacagcaatggcggtggttcgggtattgactcagcctccaattgttctgggttaaattttgcattttggacctaagccagggcaatgtcatggttggttttggtggttttagagtcatctatgctttttgttggctggctcgtggtttttggtatcaggtttgcttttgtaaccatagatgtaggagagccccccttgatgatacagtcaatatcagacaaatgcagcattgtatcgtgagattcagtctcagatcactgtggatttaccttgtatggaacagtagtaggagtagcggcagtttatgaaggatgtgtcatccaaaacaagctttcctgtttcgatagaggaaatcgatacagttaatgactgggtgtcacagtttcgtatgtttcggtgacttccaatgaaacaaccattctggc

SEQ ID NO: 14917 - DNA, 3105 bp, Zea Mays
atggcaaatgccgcttgtgtgggcggaagctttttgggagtagaaaagggaaagcctgccactgtcagcaacctaggcgctcctgcagtcctgctgctggttcttgcctgtctcccgcttgttctccctagttccgacccgaagcagggaatgagcttcggcgatctcgacggcggcgggtccgcggccggcttgcagtacccgtacggcgccttcgcgtcatcgccggtcctctcgctcaccgtggtggacgccaggcgccgccgcggcggcggcgggaacgcgaaggacgcgtcggaggcggagaacgagggacagtcgatgatgagcggacacctcgacgtcgtcctgtctggcggcggcgatggcgaggacggcgaggccgcgaaccagcgcaagcccaagcgcaagaagccgtacaaccgccacacgccgcggcagatcgaacagctcgaagcgatgttcaaggaattccaccacccggacgagaagcagcgcgcgcagctgagcaggcagctgggcctggacccgcggcaggtcaagttctggttccagaaccggcgcacgcatttgaagtgcttgacatggctttcgcttttgcatggtcctgaacttggcaagaaccaactggagcggcaggagaacgcgaggctgaaacacgagaacgacaaactgcgcgtcgagaacctgtccatccgggaggccataagggacctggtgtgcagctgctgtggcggtccagcggtgctcggggagctgtcgcccgaagagcaccagctgcgcctcgagaatgcgaggctcagggacgagctcgctcgagtctgcaccgtcacttccaagttcattggcaagcccatgtctcacatggaactgctgctcgcgaaggagccgcatcctatgacaggctcgtcactggaacttgcagttgctgttggtgttggttccagcgtgccatcgagcaaaatgcctgtctcgacgatctccgagttggccggcagcacatccagctcaacgggaacagtgaccacgcccatggtgactgcatccttgccgatggttagcattgacaagtccaagttcgcccagcttgcagtgagtgcgatgaatgagcttgtcaagatggcgcggatgaatgaaccgctgtggattccaaccattccctcacctggctcaccaatcatggagactctaaactttaaagagtacttgaaggcattctcaccatgtgttggagtgaagcctactgggtttgtgtctgaggcctctagggaatccggcattgtcaccattgacagtagcgctgctcttatggaggtcttcatggatgagagacgatggtcagacatattctactgcattgttgccaaggcatcaatcgttgaggagatcttacctggtgttgcaggaagcagaaatggtgcattgctgcttatgcaggcagaactacaaatgctttcacctcttgtccctataagggaggttacatttctcaggttctgcaaacagcttgctgagggtgcatgggctgtagtggatgtttccattgatggactgcagacggatcagtgcctagctacaaacacgaaatgccggaggctgccttcaggttgcgtgttgcaagatacccccaatggctgcaaggtcacatgggttgagcatgcagaatatcctgaggcgtccgtgcaccagctctaccagcctcttatgcgctctggcctcgcccttggcgcagggcggtggcttgcaacactgcaacgccagtgtgagtgcttggccatcctcatgtcatcgcttgcagcgccagagcatgactcagcagcggtttctctggaaggaaaatggagcctgttgaagttggcacggaggatgatggagaacttctgcgcagggatgggcgcgtcatcttcccgcgaatggagtatgctggatggctttacaggtagcacggggaaagacgtgcgggtcatggtgcagaacagtgtggatgaacctggggtgccaccgggtgtggtgcttagcgtcgccacagcagtatggctacctgtgacccctgagcggctcttcaacttccttcgcgacgaggagctccgtgctgagtgggacatcctcagcaatggtggccctatgcagcaggtgctacgcatttccaagggccaactggacggcaactctgtcgctctgctgagagctgatcatacagactcccacctgaacagcatcttgattctacaagagacgtgcactgacagatctggcgcaatggtcgtgtacaccccggtggacttcccggcaatgcagcttgtgcttggtggaggggactcgaagaacgtggcgctcttaccatctggtttcgtcattctgcctgctgggtctaccgccagtgggctcgggcacaaggcacgcggatcgctgctcacagttgcattccagatcctcgtgaacagccagcccacagcaaagctgacggtggagtcagtggacaccgtgtacagcctcatctcctgtaccatcgagaagatcaaggcggcacttcactgtgacgtctgttaacttgggaacaggaagcttcaggcatggaggcaaggcaacagctggtgatcagcctgagtcaagaacgaaccgcgcaaaacagtagtgacctttgctaggtggtacgggtccatagggctggcccgtagcacacagcaatggcggtggttcgggtattgactcagcctccaattgttctgggttaaattttgcattttggacctaagccagggcaatgtcatggttggttttggtggttttagagtcatctatgctttttgttggctggctcgtggtttttggtatcaggtttgcttttgtaaccatagatgtaggagagccccccttgatgatacagtcaatatcagacaaatgcagcattgtatcgtgagattcagtctcagatcactgtggatttaccttgtatggaacagtagtaggagtagcggcagtttatgaaggatgtgtcatccaaaacaagctttcctgtttcgatagaggaaatcgatacagttaatgactgggtgtcacagtttcgtatgtttcggtgacttccaatgaaacaaccattctggc

SEQ ID NO: 14918 - DNA, 1602 bp, Zea Mays
aaattcacgtaatctgttgcaatgatatatttttttagttttattgaaaaatagggaaaggcagaaaaaacgagaaaagattcgagtttctaaacccgtcacggcgtcttgttcagaggaattccattcctacgaagaaagtatttccttcctcctgaatcctgatctctcacggagttcccctgtatggcgacgcctcgctcaccgagccccagcgccgccgcgcgtctcgattctgcgccgctgctgggcggcgcctccggcggcgggtcccgtcgccgagatggagcgcttcgccggccctccctccgcggcgcggcgcggctgctgcgtcgcggcgggcggcgggccatgcgggagccctcggtgctggtgcgggaggccgccgcagagcacctcgaggagcggcaggctgactgggcctactcccgccccgtcgtggcgctcgacctgctgtggaacctcgctttcatcaccgtcgctgcggtcgtgctcgtgctcagccgcgacgaggactcgcccatgccgctccggacctgggtcgccggctacgcccttcagtgcgtcgtacacatgatttgcgtcgcaatcgagtacaggatgcgccacggccagcgcggcagcgccgtcgctggcgcagcgcctgcagacgtggaaaggggcagcgacgcatcgtcctcatccagtgacgaggatgacagggagctcgatctccatggtcgccgcactgattacgccagtattgcgaagcacttggagtctgctaatacaatgttctccttcatatggtggataattggattttattggatatcagctgggggtgaggaggttattcaggatgcacctcaactttactgcaattctctatgcagtatctgatcaggaaggagcatctgaagatgacattcgtcaaatcccaagatacaaatttcggcggacggatgagcctgagaagcaagatgttgaccccatgggtccttttggtggaataatgatagagtgtggcaccaatcaacctattgagaaagtgcttgcagctgaagatgcagagtgttgtatttgcctatcggcttacgatgacagtgcagagttgcgcgaactcccctgtgggcaccatttccactgcacctgtatcgataagtggcttcacatcaatgcaacatgccccctgtgcaagtacaacattcggaaaagcagcagtagcagtggaagtgaagaagtatgaatgcagtccgcttgacaatgccaatctgtttcaacttctgttccgttgctaatgtaactccaggccttgatgagtgtaaatttttgtatccaaaaaaatgtgctgatagagtcagttatttatcaaagttactcaaagtgctgtcaatatgtcatataagttaataaacagttgggtatgcttctgtatttactgtcaggaatatattattagttgcattgtaacttgtgtccttttgaatgatccgggtgttttcctgcttggttaatgatgacaaaatgtcttgcatggtttcttatgacaagaaacttccgactttgaccattatttacagcagcaacatagctgatgaaaggaactaatggatgatggat

SEQ ID NO: 14919 - DNA, 1576 bp, Zea Mays
aaattcacgtaatctgttgcaatgatatatttttttagttttattgaaaaatagggaaaggcagaaaaaacgagaaaagattcgagtttctaaacccgtcacggcgtcttgttcagaggaattccattcctacgaagaaagtatttccttcctcctgaatcctgatctctcacggagttcccctgtatggcgacgcctcgctcaccgagccccagcgccgccgcgcgtctcgattctgcgccgctgctgggcggcgcctccggcggcgggtcccgtcgccgagatggagcgcttcgccggccctccctccgcggcgcggcgcggctgctgcgtcgcggcgggcggcgggccatgcgggagccctcggtgctggtgcgggaggccgccgcagagcacctcgaggagcggcaggctgactgggcctactcccgccccgtcgtggcgctcgacctgctgtggaacctcgctttcatcaccgtcgctgcggtcgtgctcgtgctcagccgcgacgaggactcgcccatgccgctccggacctgggtcgccggctacgcccttcagtgcgtcgtacacatgatttgcgtcgcaatcgagtacaggatgcgccacggccagcgcggcagcgccgtcgctggcgcagcgcctgcagacgtggaaaggggcagcgacgcatcgtcctcatccagtgacgaggatgacagggagctcgatctccatggtcgccgcactgattacgccagtattgcgaagcacttggagtctgctaatacaatgttctccttcatatggtggataattggattttattggatatcagctgggggtgaggaggttattcaggatgcacctcaactttactggaaggagcatctgaagatgacattcgtcaaatcccaagatacaaatttcggcggacggatgagcctgagaagcaagatgttgaccccatgggtccttttggtggaataatgatagagtgtggcaccaatcaacctattgagaaagtgcttgcagctgaagatgcagagtgttgtatttgcctatcggcttacgatgacagtgcagagttgcgcgaactcccctgtgggcaccatttccactgcacctgtatcgataagtggcttcacatcaatgcaacatgccccctgtgcaagtacaacattcggaaaagcagcagtagcagtggaagtgaagaagtatgaatgcagtccgcttgacaatgccaatctgtttcaacttctgttccgttgctaatgtaactccaggccttgatgagtgtaaatttttgtatccaaaaaaatgtgctgatagagtcagttatttatcaaagttactcaaagtgctgtcaatatgtcatataagttaataaacagttgggtatgcttctgtatttactgtcaggaatatattattagttgcattgtaacttgtgtccttttgaatgatccgggtgttttcctgcttggttaatgatgacaaaatgtcttgcatggtttcttatgacaagaaacttccgactttgaccattatttacagcagcaacatagctgatgaaaggaactaatggatgatggat

SEQ ID NO: 14920 - DNA, 173 bp, Zea Mays
cttgggtggtcggcatcttctctgctcgatctctatccccatcgccagcactactgctgcgtggctcaaattccagaatcggcatcatcatcctcccacgcgtctctctcccgtaggcttcaatcttcagccgtgaatctccagcgtgctctggattcagccatggagcttat

SEQ ID NO: 14921 - DNA, 880 bp, Zea Mays
atggcgcggtcgcttctctgtgcacgcgccgtcgccctgatttcctgctccctggctccaactcaagttcgctgaccgcgcgtgtccctgcgccgcaccctgaagcctcctgctctggcgcccagctccctgcgccgagcgcttcttctttccctgcgccctccccttgcttctctcttccagctcgctcagccagcgaggtccctcccatgtctacctgctcgcagtgcctctggttccggctgcagttcggtgcttggagctccctgtccgtcctttctgccgagcgattttcttgcacgcgcgcgcagctccggctcgttccccatggtggccgcggtgcctctctgcctgctgaaacttccttgtccgcgaactcctcccgtccgtgccagtcgccgtttctaagatcggttccaagctgcagtgtgcccagctgcttcttcctcttcccatggcgtccatcttcctaggctcctttcagctcggatccctgcgcgcggagtttttccccctagccaagatcgtccttgcgcgctgccgtcgcctagttcgcgtcccgctcttgctccagctatggcgtttcgtcgtcgcagttccctgtcctctgcgcgccctgctttttgtgcgcgcgtgctcgccgtctctgttccagccgtccgcacaattttctctgctcccttgccatggtcgtcgcgtgcctgcgcgcagctcgctgagtccggcctctgttcttcctgcgcccaactccatgcgcgcgctttgctttctacgcgctggccacagctcggagtttccctgcgtgatgtcacaaaatccgcttattgttgatgtcgctcttcgcgcatcgtgtgctcgacggaggtcccaagcctgttga

SEQ ID NO: 14922 - DNA, 3317 bp, Zea Mays
cgtctccgtactggtacggggacgtctctttctcgaaattctctgcccgcaagcctactactacaacttctgcagccgcccgtccgtctccctcccccaaccgagtatatttatcaggccccttcccccgccccggcgccctccttccccccgctcctgtgcgcgttgtttctcgtcgccgtcgtccgtcctccggcgtccggcaacctgcaaccggcgacgacgatggaggcggcgctgggggcgctgtgccgcgccggaggctggtcgtacgcggccgtctggcgcttccatccccaagaccctcgattgctcacattgggggactgctactgtgaagatgaggcaaaagcaatggttcagaagatgcttaatcttgttgaagttgttggagaaggcatcctaggacaagctctagtaagcggagagtgtcaatggatttacgacgatacttgccacgcgttgaatcagataagccatgctgataacggagatttacatcagggttatacttggtggcagcatcagtttctcagtgggatgaagactattgcagtgttacctcttcagttgcatggactggtgcaatttggttccacacggaaggttcccaggagctcagtttttttgaatcaggtcagagatatatttgatcggatgaagaatgcttcaagcgatggtccaatggagtatacccagaataactctcttgcatgcggtcagcaacctatccttacttcatcgagacctgtcaatgacatgctcgtacataacaaggtcaacccattgcaaactgagaaacttttggaggatatcgagagaacagaatctataaggagttcgatctgttctccaagcaattcacaaagatctttaaatgatctaacctcccatggtactggtaacagcagcatggatactaatatattagccatgcctgttaactccaagtctatatatgatctcaaacgatttgataacgtcacagagttgtttcatcgaagttctaatgacagaattggttttcaagtcagctctagtaaagagcctgattctaccattgctggtgtaatgtcagaatacaaaagtttgaacaatattcatatgacagaaaatgattcatgtggtcaaaacataggatataccccgtacctttacactaccaccaactcttcaaattctggccttgatgaactttcttattctggcgttgctttgtcgtcatcgtttacagcagtatcagggaaagttaaagattgcctgcaaactgagagtgacaagtttctatgtaaatctgtatcattcggcagcaacccttgtgcttctaaattccaagaaaatcgcctatcaccataccatgccctcatgcacgaacaatccctgatacctgaccctggagaatctgtgaggctcctctcacaagaagaatcctttattgttcaaggtgactcaagtcaattcaaggatactgccgactttacaggccagggtaacagtacatttcctgaattacctaacagatcacctgaagaagctactgctgaaactctagaaaacaacatgaaggactgtagtggaaacaacagtctgctggaaactatgatgcttgatcttagcaccaacagctttgtgcaagattggtgggacaacagtgttctactggcagaaaaccttccaaattcaagcgaaaaggacccagagcctgctatggaattggccaataggcattcattgccaactggggagagaggctcgcctttcatacctgtcatcgaacaattgctaggtgatgttgcacatccacctacacctaccggacatagttcacttgaggctgaagctactgctttagctggccgtgtttcagattatcagctgcctcagtttgctttccgagactgcctaacagtagacaacgcacaaatcccagcattggcctgcagtaattacacatgcagaactagaagtgcacaaaatggttcttcagaagtgccatcagcaaacgtatctgtggacgacacctgcagtttgaacacagcaaactccaatggcagtcagtcgagcaatcctgagggaacgaaggttgctaagagaagagctagagctggggagagtacccgacctagaccaaaagaccgacaactgatacaagatcgcgttaaagaattacgagagattgtccctaatggtgcaaagcattgatgctttgttggagcgaacaattaagcacatgctgtttctacaaagtgtaaacaaatatgcagagaaaattaagcaagctgatgaaccaaagataatcgacaaagggagcggtgttatcttgaaagacaacccagttgctggcacaaatggtggtgccacgtgggcctacgaggttgctggccaaactatggtttgcccaataatcattgaggatctttcgccacctggtcagatgcttgttgagatgctttgcgaggaacaagggctctttctggagatagctgacaacatacgtggaattggtctgacggtcttgaaaggacggatggagctctgtgatggcaagatatggtcgcggtttcttgtcgagagaggtcacaaggatggatatatttctgtcgcttgttcagttactggaacagaacagccttgttcgatctactgaccagatggccaaggtcatgaataatggggttccatcctttgcaaaccaccaacggtctccgctgctagttccagtgggcattcctgagagactacagtgacatgcagatgcttcaactagatagagttaggtaccacgactgttaacatatctggtagccggaactccatgcattagactgagcctagtgataacatctgaatgaagatagtctcactgctgctaaagatgactgtatcaagaacatgcatgactggtgcagacatgagcctctagcgcagaaattatgaactttccctgattattagtggtgtgatcagtgaaatggcattatctcctgcttagttggttgacaccttgctcctgagtaactgggtcttgatagtggtgtttcttatgcagcgatggcagtgtattagggtagtagtgctagcttgcagttcgttgcccctgagtcaaccttgggcagttcgtggtaggttcttcatgggcttgggcccaggaccgggccccatgcacgtgcaataagtgcgactgcacagggctcaaaattctgaggggccaatatgtatcaataagcagactaatattacaccatctaagttgaactcagttagcagctagactgttgctcttcaaacacatctattaatacatatgtttatttata

SEQ ID NO: 14923 - DNA, 2814 bp, Zea Mays
cgtctccgtactggtacggggacgtctctttctcgaaattctctgcccgcaagcctactactacaacttctgcagccgcccgtccgtctccctcccccaaccgagtatatttatcaggccccttcccccgccccggcgccctccttccccccgctcctgtgcgcgttgtttctcgtcgccgtcgtccgtcctccggcgtccggcaacctgcaaccggcgacgacgatggaggcggcgctgggggcgctgtgccgcgccggaggctggtcgtacgcggccgtctggcgcttccatccccaagaccctcgattgctcacattgggggactgctactgtgaagatgaggcaaaagcaatggttcagaagatgcttaatcttgttgaagttgttggagaaggcatcctaggacaagctctagtaagcggagagtgtcaatggatttacgacgatacttgccacgcgttgaatcagataagccatgctgataacggagatttacatcagggttatacttggtggcagcatcagtttctcagtgggatgaagactattgcagtgttacctcttcagttgcatggactggtgcaatttggttccacacggaaggttcccaggagctcagtttttttgaatcaggtcagagatatatttgatcggatgaagaatgcttcaagcgatggtccaatggagtatacccagaataactctcttgcatgcgcagtatcagggaaagttaaagattgcctgcaaactgagagtgacaagtttctatgtaaatctgtatcattcggcagcaacccttgtgcttctaaattccaagaaaatcgcctatcaccataccatgccctcatgcacgaacaatccctgatacctgaccctggagaatctgtgaggctcctctcacaagaagaatcctttattgttcaaggtgactcaagtcaattcaaggatactgccgactttacaggccagggtaacagtacatttcctgaattacctaacagatcacctgaagaagctactgctgaaactctagaaaacaacatgaaggactgtagtggaaacaacagtctgctggaaactatgatgcttgatcttagcaccaacagctttgtgcaagattggtgggacaacagtgttctactggcagaaaaccttccaaattcaagcgaaaaggacccagagcctgctatggaattggccaataggcattcattgccaactggggagagaggctcgcctttcatacctgtcatcgaacaattgctaggtgatgttgcacatccacctacacctaccggacatagttcacttgaggctgaagctactgctttagctggccgtgtttcagattatcagctgcctcagtttgctttccgagactgcctaacagtagacaacgcacaaatcccagcattggcctgcagtaattacacatgcagaactagaagtgcacaaaatggttcttcagaagtgccatcagcaaacgtatctgtggacgacacctgcagtttgaacacagcaaactccaatggcagtcagtcgagcaatcctgagggaacgaaggttgctaagagaagagctagagctggggagagtacccgacctagaccaaaagaccgacaactgatacaagatcgcgttaaagaattacgagagattgtccctaatggtgcaaagtgcagcattgatgctttgttggagcgaacaattaagcacatgctgtttctacaaagtgtaaacaaatatgcagagaaaattaagcaagctgatgaaccaaagataatcgacaaagggagcggtgttatcttgaaagacaacccagttgctggcacaaatggtggtgccacgtgggcctacgaggttgctggccaaactatggtttgcccaataatcattgaggatctttcgccacctggtcagatgcttgttgagatgctttgcgaggaacaagggctctttctggagatagctgacaacatacgtggaattggtctgacggtcttgaaaggacggatggagctctgtgatggcaagatatggtcgcggtttcttgtcgaggcaaacagagaggtcacaaggatggatatatttctgtcgcttgttcagttactggaacagaacagccttgttcgatctactgaccagatggccaaggtcatgaataatggggttccatcctttgcaaaccaccaacggtctccgctgctagttccagtgggcattcctgagagactacagtgacatgcagatgcttcaactagatagagttaggtaccacgactgttaacatatctggtagccggaactccatgcattagactgagcctagtgataacatctgaatgaagatagtctcactgctgctaaagatgactgtatcaagaacatgcatgactggtgcagacatgagcctctagcgcagaaattatgaactttccctgattattagtggtgtgatcagtgaaatggcattatctcctgcttagttggttgacaccttgctcctgagtaactgggtcttgatagtggtgtttcttatgcagcgatggcagtgtattagggtagtagtgctagcttgcagttcgttgcccctgagtcaaccttgggcagttcgtggtaggttcttcatgggcttgggcccaggaccgggccccatgcacgtgcaataagtgcgactgcacagggctcaaaattctgaggggccaatatgtatcaataagcagactaatattacaccatctaagttgaactcagttagcagctagactgttgctcttcaaacacatctattaatacatatgtttatttata

SEQ ID NO: 14924 - DNA, 2932 bp, Zea Mays
cgtctccgtactggtacggggacgtctctttctcgaaattctctgcccgcaagcctactactacaacttctgcagccgcccgtccgtctccctcccccaaccgagtatatttatcaggccccttcccccgccccggcgccctccttccccccgctcctgtgcgcgttgtttctcgtcgccgtcgtccgtcctccggcgtccggcaacctgcaaccggcgacgacgatggaggcggcgctgggggcgctgtgccgcgccggaggctggtcgtacgcggccgtctggcgcttccatccccaagaccctcgcatcctaggacaagctctagtaagcggagagtgtcaatggatttacgacgatacttgccacgcgttgaatcagataagccatgctgataacggagatttacatcagggttatacttggtggcagcatcagtttctcagtgggatgaaggttggcgtttcttgcctaaaaaactaggcaaccttgactaatttagatagcagagtgcttgttttagcttgtacgatgtcaaattggatactgaagagcggcaccttatatgcagactattgcagtgttacctcttcagttgcatggactggtgcaatttggttccacacggaaggttcccaggagctcagtttttttgaatcaggtcagagatatatttgatcggatgaagaatgcttcaagcgatggtccaatggagtatacccagaataactctcttgcatgcgcagtatcagggaaagttaaagattgcctgcaaactgagagtgacaagtttctatgtaaatctgtatcattcggcagcaacccttgtgcttctaaattccaagaaaatcgcctatcaccataccatgccctcatgcacgaacaatccctgatacctgaccctggagaatctgtgaggctcctctcacaagaagaatcctttattgttcaaggtgactcaagtcaattcaaggatactgccgactttacaggccagggtaacagtacatttcctgaattacctaacagatcacctgaagaagctactgctgaaactctagaaaacaacatgaaggactgtagtggaaacaacagtctgctggaaactatgatgcttgatcttagcaccaacagctttgtgcaagattggtgggacaacagtgttctactggcagaaaaccttccaaattcaagcgaaaaggacccagagcctgctatggaattggccaataggcattcattgccaactggggagagaggctcgcctttcatacctgtcatcgaacaattgctaggtgatgttgcacatccacctacacctaccggacatagttcacttgaggctgaagctactgctttagctggccgtgtttcagattatcagctgcctcagtttgctttccgagactgcctaacagtagacaacgcacaaatcccagcattggcctgcagtaattacacatgcagaactagaagtgcacaaaatggttcttcagaagtgccatcagcaaacgtatctgtggacgacacctgcagtttgaacacagcaaactccaatggcagtcagtcgagcaatcctgagggaacgaaggttgctaagagaagagctagagctggggagagtacccgacctagaccaaaagaccgacaactgatacaagatcgcgttaaagaattacgagagattgtccctaatggtgcaaagcattgatgctttgttggagcgaacaattaagcacatgctgtttctacaaagtgtaaacaaatatgcagagaaaattaagcaagctgatgaaccaaagataatcgacaaagggagcggtgttatcttgaaagacaacccagttgctggcacaaatggtggtgccacgtgggcctacgaggttgctggccaaactatggtttgcccaataatcattgaggatctttcgccacctggtcagatgcttgttgagatgctttgcgaggaacaagggctctttctggagatagctgacaacatacgtggaattggtctgacggtcttgaaaggacggatggagctctgtgatggcaagatatggtcgcggtttcttgtcgaggtagagaagaaaccataggctcacgttcctcgatcctcatttctagcttcgtcagttgttaaactaactgctggcttttgctctctttttttttccaggcaaacagagaggtcacaaggatggatatatttctgtcgcttgttcagttactggaacagaacagccttgttcgatctactgaccagatggccaaggtcatgaataatggggttccatcctttgcaaaccaccaacggtctccgctgctagttccagtgggcattcctgagagactacagtgacatgcagatgcttcaactagatagagttaggtaccacgactgttaacatatctggtagccggaactccatgcattagactgagcctagtgataacatctgaatgaagatagtctcactgctgctaaagatgactgtatcaagaacatgcatgactggtgcagacatgagcctctagcgcagaaattatgaactttccctgattattagtggtgtgatcagtgaaatggcattatctcctgcttagttggttgacaccttgctcctgagtaactgggtcttgatagtggtgtttcttatgcagcgatggcagtgtattagggtagtagtgctagcttgcagttcgttgcccctgagtcaaccttgggcagttcgtggtaggttcttcatgggcttgggcccaggaccgggccccatgcacgtgcaataagtgcgactgcacagggctcaaaattctgaggggccaatatgtatcaataagcagactaatattacaccatctaagttgaactcagttagcagctagactgttgctcttcaaacacatctattaatacatatgtttatttata

SEQ ID NO: 14925 - DNA, 3322 bp, Zea Mays
cgtctccgtactggtacggggacgtctctttctcgaaattctctgcccgcaagcctactactacaacttctgcagccgcccgtccgtctccctcccccaaccgagtatatttatcaggccccttcccccgccccggcgccctccttccccccgctcctgtgcgcgttgtttctcgtcgccgtcgtccgtcctccggcgtccggcaacctgcaaccggcgacgacgatggaggcggcgctgggggcgctgtgccgcgccggaggctggtcgtacgcggccgtctggcgcttccatccccaagaccctcgattgctcacattgggggactgctactgtgaagatgaggcaaaagcaatggttcagaagatgcttaatcttgttgaagttgttggagaaggcatcctaggacaagctctagtaagcggagagtgtcaatggatttacgacgatacttgccacgcgttgaatcagataagccatgctgataacggagatttacatcagggttatacttggtggcagcatcagtttctcagtgggatgaagactattgcagtgttacctcttcagttgcatggactggtgcaatttggttccacacggaaggttcccaggagctcagtttttttgaatcaggtcagagatatatttgatcggatgaagaatgcttcaagcgatggtccaatggagtatacccagaataactctcttgcatgcggtcagcaacctatccttacttcatcgagacctgtcaatgacatgctcgtacataacaaggtcaacccattgcaaactgagaaacttttggaggatatcgagagaacagaatctataaggagttcgatctgttctccaagcaattcacaaagatctttaaatgatctaacctcccatggtactggtaacagcagcatggatactaatatattagccatgcctgttaactccaagtctatatatgatctcaaacgatttgataacgtcacagagttgtttcatcgaagttctaatgacagaattggttttcaagtcagctctagtaaagagcctgattctaccattgctggtgtaatgtcagaatacaaaagtttgaacaatattcatatgacagaaaatgattcatgtggtcaaaacataggatataccccgtacctttacactaccaccaactcttcaaattctggccttgatgaactttcttattctggcgttgctttgtcgtcatcgtttacagcagtatcagggaaagttaaagattgcctgcaaactgagagtgacaagtttctatgtaaatctgtatcattcggcagcaacccttgtgcttctaaattccaagaaaatcgcctatcaccataccatgccctcatgcacgaacaatccctgatacctgaccctggagaatctgtgaggctcctctcacaagaagaatcctttattgttcaaggtgactcaagtcaattcaaggatactgccgactttacaggccagggtaacagtacatttcctgaattacctaacagatcacctgaagaagctactgctgaaactctagaaaacaacatgaaggactgtagtggaaacaacagtctgctggaaactatgatgcttgatcttagcaccaacagctttgtgcaagattggtgggacaacagtgttctactggcagaaaaccttccaaattcaagcgaaaaggacccagagcctgctatggaattggccaataggcattcattgccaactggggagagaggctcgcctttcatacctgtcatcgaacaattgctaggtgatgttgcacatccacctacacctaccggacatagttcacttgaggctgaagctactgctttagctggccgtgtttcagattatcagctgcctcagtttgctttccgagactgcctaacagtagacaacgcacaaatcccagcattggcctgcagtaattacacatgcagaactagaagtgcacaaaatggttcttcagaagtgccatcagcaaacgtatctgtggacgacacctgcagtttgaacacagcaaactccaatggcagtcagtcgagcaatcctgagggaacgaaggttgctaagagaagagctagagctggggagagtacccgacctagaccaaaagaccgacaactgatacaagatcgcgttaaagaattacgagagattgtccctaatggtgcaaagtgcagcattgatgctttgttggagcgaacaattaagcacatgctgtttctacaaagtgtaaacaaatatgcagagaaaattaagcaagctgatgaaccaaagataatcgacaaagggagcggtgttatcttgaaagacaacccagttgctggcacaaatggtggtgccacgtgggcctacgaggttgctggccaaactatggtttgcccaataatcattgaggatctttcgccacctggtcagatgcttgttgagatgctttgcgaggaacaagggctctttctggagatagctgacaacatacgtggaattggtctgacggtcttgaaaggacggatggagctctgtgatggcaagatatggtcgcggtttcttgtcgagagaggtcacaaggatggatatatttctgtcgcttgttcagttactggaacagaacagccttgttcgatctactgaccagatggccaaggtcatgaataatggggttccatcctttgcaaaccaccaacggtctccgctgctagttccagtgggcattcctgagagactacagtgacatgcagatgcttcaactagatagagttaggtaccacgactgttaacatatctggtagccggaactccatgcattagactgagcctagtgataacatctgaatgaagatagtctcactgctgctaaagatgactgtatcaagaacatgcatgactggtgcagacatgagcctctagcgcagaaattatgaactttccctgattattagtggtgtgatcagtgaaatggcattatctcctgcttagttggttgacaccttgctcctgagtaactgggtcttgatagtggtgtttcttatgcagcgatggcagtgtattagggtagtagtgctagcttgcagttcgttgcccctgagtcaaccttgggcagttcgtggtaggttcttcatgggcttgggcccaggaccgggccccatgcacgtgcaataagtgcgactgcacagggctcaaaattctgaggggccaatatgtatcaataagcagactaatattacaccatctaagttgaactcagttagcagctagactgttgctcttcaaacacatctattaatacatatgtttatttata

SEQ ID NO: 14926 - DNA, 3711 bp, Zea Mays
tttctctctctctctctccacaaaaccacgagatgtttgttaatcggggccggaggtacaaggtctaagttctagtctatggtttaattgtgactttacctttactttttaaaaccttgtgattttatctccattatattattttaaaacgaaaaacggttctttgcacctaatctgcgctgacgttgtaagacgaaaaaaaatagaaaaagataaaaaaaatcccggtcatgcgcaaagaccgaattaccccgatcttatctctctgttctcctcctccggcccttccccatacacgagatatttccgaaaaatacacagcaacgtgtggctacgccaaaatgtccatcgcagggcacgagcgttaggagcgtcgggcgcggggctcgggggctgtgggcggcgagcagcaggacgaccaggggctgtgggcggcagatcagatctccgcgtttctgctctgttcctctgcacttccactccctcctgcatatacgaactcctcccttgtttcaaagtcgcaggagtaaaacgacagagctaaaacgaaaaaaaaaacaaggaccaaaaccacgattttgctacaaaacgggagtgatactagctaagatgcggatgcaggaagctgcccccttacctcagctttttttagctagctaaacactgatcccatcaaaattgacagcaagattgctcacattgggggactgctactgtgaagatgaggcaaaagcaatggttcagaagatgcttaatcttgttgaagttgttggagaaggcatcctaggacaagctctagtaagcggagagtgtcaatggatttacgacgatacttgccacgcgttgaatcagataagccatgctgataacggagatttacatcagggttatacttggtggcagcatcagtttctcagtgggatgaagactattgcagtgttacctcttcagttgcatggactggtgcaatttggttccacacggaaggttcccaggagctcagtttttttgaatcaggtcagagatatatttgatcggatgaagaatgcttcaagcgatggtccaatggagtatacccagaataactctcttgcatgcggtcagcaacctatccttacttcatcgagacctgtcaatgacatgctcgtacataacaaggtcaacccattgcaaactgagaaacttttggaggatatcgagagaacagaatctataaggagttcgatctgttctccaagcaattcacaaagatctttaaatgatctaacctcccatggtactggtaacagcagcatggatactaatatattagccatgcctgttaactccaagtctatatatgatctcaaacgatttgataacgtcacagagttgtttcatcgaagttctaatgacagaattggttttcaagtcagctctagtaaagagcctgattctaccattgctggtgtaatgtcagaatacaaaagtttgaacaatattcatatgacagaaaatgattcatgtggtcaaaacataggatataccccgtacctttacactaccaccaactcttcaaattctggccttgatgaactttcttattctggcgttgctttgtcgtcatcgtttacagcagtatcagggaaagttaaagattgcctgcaaactgagagtgacaagtttctatgtaaatctgtatcattcggcagcaacccttgtgcttctaaattccaagaaaatcgcctatcaccataccatgccctcatgcacgaacaatccctgatacctgaccctggagaatctgtgaggctcctctcacaagaagaatcctttattgttcaaggtgactcaagtcaattcaaggatactgccgactttacaggccagggtaacagtacatttcctgaattacctaacagatcacctgaagaagctactgctgaaactctagaaaacaacatgaaggactgtagtggaaacaacagtctgctggaaactatgatgcttgatcttagcaccaacagctttgtgcaagattggtgggacaacagtgttctactggcagaaaaccttccaaattcaagcgaaaaggacccagagcctgctatggaattggccaataggcattcattgccaactggggagagaggctcgcctttcatacctgtcatcgaacaattgctaggtgatgttgcacatccacctacacctaccggacatagttcacttgaggctgaagctactgctttagctggccgtgtttcagattatcagctgcctcagtttgctttccgagactgcctaacagtagacaacgcacaaatcccagcattggcctgcagtaattacacatgcagaactagaagtgcacaaaatggttcttcagaagtgccatcagcaaacgtatctgtggacgacacctgcagtttgaacacagcaaactccaatggcagtcagtcgagcaatcctgagggaacgaaggttgctaagagaagagctagagctggggagagtacccgacctagaccaaaagaccgacaactgatacaagatcgcgttaaagaattacgagagattgtccctaatggtgcaaagtgcagcattgatgctttgttggagcgaacaattaagcacatgctgtttctacaaagtgtaaacaaatatgcagagaaaattaagcaagctgatgaaccaaagataatcgacaaagggagcggtgttatcttgaaagacaacccagttgctggcacaaatggtggtgccacgtgggcctacgaggttgctggccaaactatggtttgcccaataatcattgaggatctttcgccacctggtcagatgcttgttgagatgctttgcgaggaacaagggctctttctggagatagctgacaacatacgtggaattggtctgacggtcttgaaaggacggatggagctctgtgatggcaagatatggtcgcggtttcttgtcgaggcaaacagagaggtcacaaggatggatatatttctgtcgcttgttcagttactggaacagaacagccttgttcgatctactgaccagatggccaaggtcatgaataatggggttccatcctttgcaaaccaccaacggtctccgctgctagttccagtgggcattcctgagagactacagtgacatgcagatgcttcaactagatagagttaggtaccacgactgttaacatatctggtagccggaactccatgcattagactgagcctagtgataacatctgaatgaagatagtctcactgctgctaaagatgactgtatcaagaacatgcatgactggtgcagacatgagcctctagcgcagaaattatgaactttccctgattattagtggtgtgatcagtgaaatggcattatctcctgcttagttggttgacaccttgctcctgagtaactgggtcttgatagtggtgtttcttatgcagcgatggcagtgtattagggtagtagtgctagcttgcagttcgttgcccctgagtcaaccttgggcagttcgtggtaggttcttcatgggcttgggcccaggaccgggccccatgcacgtgcaataagtgcgactgcacagggctcaaaattctgaggggccaatatgtatcaataagcagactaatattacaccatctaagttgaactcagttagcagctagactgttgctcttcaaacacatctattaatacatatgtttatttata

SEQ ID NO: 14927 - DNA, 3931 bp, Zea Mays
tttctctctctctctctccacaaaaccacgagatgtttgttaatcggggccggaggtacaaggtctaagttctagtctatggtttaattgtgactttacctttactttttaaaaccttgtgattttatctccattatattattttaaaacgaaaaacggttctttgcacctaatctgcgctgacgttgtaagacgaaaaaaaatagaaaaagataaaaaaaatcccggtcatgcgcaaagaccgaattaccccgatcttatctctctgttctcctcctccggcccttccccatacacgagatatttccgaaaaatacacagcaacgtgtggctacgccaaaatgtccatcgcagggcacgagcgttaggagcgtcgggcgcggggctcgggggctgtgggcggcgagcagcaggacgaccaggggctgtgggcggcagatcagatctccgcgtttctgctctgttcctctgcacttccactccctcctgcatatacgaactcctcccttgtttcaaagtcgcaggagtaaaacgacagagctaaaacgaaaaaaaaaacaaggaccaaaaccacgattttgctacaaaacgggagtgatactagctaagatgcggatgcaggaagctgcccccttacctcagctttttttagctagctaaacactgatcccatcaaaattgacagcaagattgctcacattgggggactgctactgtgaagatgaggcaaaagcaatggttcagaagatgcttaatcttgttgaagttgttggagaaggcatcctaggacaagctctagtaagcggagagtgtcaatggatttacgacgatacttgccacgcgttgaatcagataagccatgctgataacggagatttacatcagggttatacttggtggcagcatcagtttctcagtgggatgaaggttggcgtttcttgcctaaaaaactaggcaaccttgactaatttagatagcagagtgcttgttttagcttgtacgatgtcaaattggatactgaagagcggcaccttatatgcagactattgcagtgttacctcttcagttgcatggactggtgcaatttggttccacacggaaggttcccaggagctcagtttttttgaatcaggtcagagatatatttgatcggatgaagaatgcttcaagcgatggtccaatggagtatacccagaataactctcttgcatgcggtcagcaacctatccttacttcatcgagacctgtcaatgacatgctcgtacataacaaggtcaacccattgcaaactgagaaacttttggaggatatcgagagaacagaatctataaggagttcgatctgttctccaagcaattcacaaagatctttaaatgatctaacctcccatggtactggtaacagcagcatggatactaatatattagccatgcctgttaactccaagtctatatatgatctcaaacgatttgataacgtcacagagttgtttcatcgaagttctaatgacagaattggttttcaagtcagctctagtaaagagcctgattctaccattgctggtgtaatgtcagaatacaaaagtttgaacaatattcatatgacagaaaatgattcatgtggtcaaaacataggatataccccgtacctttacactaccaccaactcttcaaattctggccttgatgaactttcttattctggcgttgctttgtcgtcatcgtttacagcagtatcagggaaagttaaagattgcctgcaaactgagagtgacaagtttctatgtaaatctgtatcattcggcagcaacccttgtgcttctaaattccaagaaaatcgcctatcaccataccatgccctcatgcacgaacaatccctgatacctgaccctggagaatctgtgaggctcctctcacaagaagaatcctttattgttcaaggtgactcaagtcaattcaaggatactgccgactttacaggccagggtaacagtacatttcctgaattacctaacagatcacctgaagaagctactgctgaaactctagaaaacaacatgaaggactgtagtggaaacaacagtctgctggaaactatgatgcttgatcttagcaccaacagctttgtgcaagattggtgggacaacagtgttctactggcagaaaaccttccaaattcaagcgaaaaggacccagagcctgctatggaattggccaataggcattcattgccaactggggagagaggctcgcctttcatacctgtcatcgaacaattgctaggtgatgttgcacatccacctacacctaccggacatagttcacttgaggctgaagctactgctttagctggccgtgtttcagattatcagctgcctcagtttgctttccgagactgcctaacagtagacaacgcacaaatcccagcattggcctgcagtaattacacatgcagaactagaagtgcacaaaatggttcttcagaagtgccatcagcaaacgtatctgtggacgacacctgcagtttgaacacagcaaactccaatggcagtcagtcgagcaatcctgagggaacgaaggttgctaagagaagagctagagctggggagagtacccgacctagaccaaaagaccgacaactgatacaagatcgcgttaaagaattacgagagattgtccctaatggtgcaaagcattgatgctttgttggagcgaacaattaagcacatgctgtttctacaaagtgtaaacaaatatgcagagaaaattaagcaagctgatgaaccaaagataatcgacaaagggagcggtgttatcttgaaagacaacccagttgctggcacaaatggtggtgccacgtgggcctacgaggttgctggccaaactatggtttgcccaataatcattgaggatctttcgccacctggtcagatgcttgttgaggtgaaaaaaatgaactttaagtagctttatctactctctctctatctctatctctatctctatctcttggtgagtgcagcatatgcagataaccattttgtctactaaaactttacagatgctttgcgaggaacaagggctctttctggagatagctgacaacatacgtggaattggtctgacggtcttgaaaggacggatggagctctgtgatggcaagatatggtcgcggtttcttgtcgagagaggtcacaaggatggatatatttctgtcgcttgttcagttactggaacagaacagccttgttcgatctactgaccagatggccaaggtcatgaataatggggttccatcctttgcaaaccaccaacggtctccgctgctagttccagtgggcattcctgagagactacagtgacatgcagatgcttcaactagatagagttaggtaccacgactgttaacatatctggtagccggaactccatgcattagactgagcctagtgataacatctgaatgaagatagtctcactgctgctaaagatgactgtatcaagaacatgcatgactggtgcagacatgagcctctagcgcagaaattatgaactttccctgattattagtggtgtgatcagtgaaatggcattatctcctgcttagttggttgacaccttgctcctgagtaactgggtcttgatagtggtgtttcttatgcagcgatggcagtgtattagggtagtagtgctagcttgcagttcgttgcccctgagtcaaccttgggcagttcgtggtaggttcttcatgggcttgggcccaggaccgggccccatgcacgtgcaataagtgcgactgcacagggctcaaaattctgaggggccaatatgtatcaataagcagactaatattacaccatctaagttgaactcagttagcagctagactgttgctcttcaaacacatctattaatacatatgtttatttata

SEQ ID NO: 14928 - DNA, 3800 bp, Zea Mays
tttctctctctctctctccacaaaaccacgagatgtttgttaatcggggccggaggtacaaggtctaagttctagtctatggtttaattgtgactttacctttactttttaaaaccttgtgattttatctccattatattattttaaaacgaaaaacggttctttgcacctaatctgcgctgacgttgtaagacgaaaaaaaatagaaaaagataaaaaaaatcccggtcatgcgcaaagaccgaattaccccgatcttatctctctgttctcctcctccggcccttccccatacacgagatatttccgaaaaatacacagcaacgtgtggctacgccaaaatgtccatcgcagggcacgagcgttaggagcgtcgggcgcggggctcgggggctgtgggcggcgagcagcaggacgaccaggggctgtgggcggcagatcagatctccgcgtttctgctctgttcctctgcacttccactccctcctgcatatacgaactcctcccttgtttcaaagtcgcaggagtaaaacgacagagctaaaacgaaaaaaaaaacaaggaccaaaaccacgattttgctacaaaacggggcatgaattcttaagccccaaatgtttaatccatacccatcctagtacgttcggtaacacgactgagattcccttcgtttctttcaactttgtccagagtgatactagctaagatgcggatgcaggaagctgcccccttacctcagctttttttagctagctaaacactgatcccatcaaaattgacagcaagattgctcacattgggggactgctactgtgaagatgaggcaaaagcaatggttcagaagatgcttaatcttgttgaagttgttggagaaggcatcctaggacaagctctagtaagcggagagtgtcaatggatttacgacgatacttgccacgcgttgaatcagataagccatgctgataacggagatttacatcagggttatacttggtggcagcatcagtttctcagtgggatgaagactattgcagtgttacctcttcagttgcatggactggtgcaatttggttccacacggaaggttcccaggagctcagtttttttgaatcaggtcagagatatatttgatcggatgaagaatgcttcaagcgatggtccaatggagtatacccagaataactctcttgcatgcggtcagcaacctatccttacttcatcgagacctgtcaatgacatgctcgtacataacaaggtcaacccattgcaaactgagaaacttttggaggatatcgagagaacagaatctataaggagttcgatctgttctccaagcaattcacaaagatctttaaatgatctaacctcccatggtactggtaacagcagcatggatactaatatattagccatgcctgttaactccaagtctatatatgatctcaaacgatttgataacgtcacagagttgtttcatcgaagttctaatgacagaattggttttcaagtcagctctagtaaagagcctgattctaccattgctggtgtaatgtcagaatacaaaagtttgaacaatattcatatgacagaaaatgattcatgtggtcaaaacataggatataccccgtacctttacactaccaccaactcttcaaattctggccttgatgaactttcttattctggcgttgctttgtcgtcatcgtttacagcagtatcagggaaagttaaagattgcctgcaaactgagagtgacaagtttctatgtaaatctgtatcattcggcagcaacccttgtgcttctaaattccaagaaaatcgcctatcaccataccatgccctcatgcacgaacaatccctgatacctgaccctggagaatctgtgaggctcctctcacaagaagaatcctttattgttcaaggtgactcaagtcaattcaaggatactgccgactttacaggccagggtaacagtacatttcctgaattacctaacagatcacctgaagaagctactgctgaaactctagaaaacaacatgaaggactgtagtggaaacaacagtctgctggaaactatgatgcttgatcttagcaccaacagctttgtgcaagattggtgggacaacagtgttctactggcagaaaaccttccaaattcaagcgaaaaggacccagagcctgctatggaattggccaataggcattcattgccaactggggagagaggctcgcctttcatacctgtcatcgaacaattgctaggtgatgttgcacatccacctacacctaccggacatagttcacttgaggctgaagctactgctttagctggccgtgtttcagattatcagctgcctcagtttgctttccgagactgcctaacagtagacaacgcacaaatcccagcattggcctgcagtaattacacatgcagaactagaagtgcacaaaatggttcttcagaagtgccatcagcaaacgtatctgtggacgacacctgcagtttgaacacagcaaactccaatggcagtcagtcgagcaatcctgagggaacgaaggttgctaagagaagagctagagctggggagagtacccgacctagaccaaaagaccgacaactgatacaagatcgcgttaaagaattacgagagattgtccctaatggtgcaaagtgcagcattgatgctttgttggagcgaacaattaagcacatgctgtttctacaaagtgtaaacaaatatgcagagaaaattaagcaagctgatgaaccaaagataatcgacaaagggagcggtgttatcttgaaagacaacccagttgctggcacaaatggtggtgccacgtgggcctacgaggttgctggccaaactatggtttgcccaataatcattgaggatctttcgccacctggtcagatgcttgttgagatgctttgcgaggaacaagggctctttctggagatagctgacaacatacgtggaattggtctgacggtcttgaaaggacggatggagctctgtgatggcaagatatggtcgcggtttcttgtcgagagaggtcacaaggatggatatatttctgtcgcttgttcagttactggaacagaacagccttgttcgatctactgaccagatggccaaggtcatgaataatggggttccatcctttgcaaaccaccaacggtctccgctgctagttccagtgggcattcctgagagactacagtgacatgcagatgcttcaactagatagagttaggtaccacgactgttaacatatctggtagccggaactccatgcattagactgagcctagtgataacatctgaatgaagatagtctcactgctgctaaagatgactgtatcaagaacatgcatgactggtgcagacatgagcctctagcgcagaaattatgaactttccctgattattagtggtgtgatcagtgaaatggcattatctcctgcttagttggttgacaccttgctcctgagtaactgggtcttgatagtggtgtttcttatgcagcgatggcagtgtattagggtagtagtgctagcttgcagttcgttgcccctgagtcaaccttgggcagttcgtggtaggttcttcatgggcttgggcccaggaccgggccccatgcacgtgcaataagtgcgactgcacagggctcaaaattctgaggggccaatatgtatcaataagcagactaatattacaccatctaagttgaactcagttagcagctagactgttgctcttcaaacacatctattaatacatatgtttatttata

SEQ ID NO: 14929 - DNA, 1719 bp, Zea Mays
gcagatgagaggagctagcataaattatttttttaagaaagaatcccccactgctagattggctattaattggacaagagagagaggaggggtgcgcggagaggagacggagcggaggaggaggcattctctctctctctctcttcctcctcggtgctcaagaaatccatctagcggaggcgcatcttctccaccatcatcccttctctccaactcccccccccctcgggaattgtgggggtagcaaaggaactggagttcttgcatggatgcagcagcccactggcagcagggctggtgaagcccctggaggagatgctgatggcggccagcgcgggggctgcaaatccgagccaaggctcgaatccgaacccgccgccgctggcggcgcccctgacggacgcgggtagcaccgagcggcgcgcgcggccgcagaaggagaaggcgctcaactgcccgcggtgcaactccaccaacaccaaattctgctactacaacaactacagcctccagcagccacgctacttctgcaagacgtgccgccgctactggacggagggcggatccctccgcagcgtccccgtgggcggtggctcccgcaagaacaagcgctcctcgtcctcgtcctcgtcctcgtcctcgtcggcggcggcggcgtccgcctccacctcctcctcggccacgagctcgtccatggccagcacaccgggggcggcgtccaagagtccggagctggcgcacgagggcgcgcacgacgacctcaacctagcgttcccgcaccacggtggcctgcacgccgccgagttcgcggcgttcccgagcctggagagcagcaacgacatgtgcgaccagggtggcgggatgacgagcaatggccggggcggcggcgcggggcccgcggtcggcgcgctctcggcaacggagctgttgcggagctccggctgctacatgccgctgcagatgccaggaggagattacacggcggcagggttcgcgctcggggagttccgcacgccgctgctgccgccaccatcgtcacagagcccgctcgggttctctctggacgcgcacgggccggggtcgtccggtgctgccgcagcggcggggtacggttccagcgcggggctgccgcagggcgtgccgggcaacgcgggcaggttgttgttccctttcgaggacttgaagccgccggttagccctggaggtggtggtgtgggcggaggtggtgcaagtgcaaccggtggcgccggcgacggaaatagcagccacgatcagtttgaccacaacaaggagcgaggcggaggcggcggccgcggtgccggtgccgggcacgacacgccggggttctggagcagcatgatcggcggcagtggcgcttcttggtaatggagaatgacgcacacgggggcggcgccatgcatggtttcatgcatgcaaagtgttggtgacttgttctcaaatgctatgagttaagaacaaggcaacatagaaaagtgttaatcgttaaggtccttcgtcctccaaagcattatttcccttaggatataatggtttacggacgaaggttatgaaggacgtaccttcataaatttattaaacaatgacgaaggatggaatataaaggatataaaagacaacattaacaattatatattattattaagtataaacagaaataccgctgaattacaagtgtaccttcaatcggaatgagatgac

SEQ ID NO: 14930 - DNA, 3515 bp, Zea Mays
ggacaacgaacccgcgaaattccatttcccagttctcaccatttcaccaaccgttcactccctcgccggcgcacctcgccggcgtcgtgtcctggcacaccaccaccagtgcacggcacttctatcttcgtctccttctgccctcccatccttcattctgccgctcggaacgttggatgtgtgctgctccagatcacgcgggagggcaataagccctagctcggccatcccgggatggaggcggccgcctccagcctctcgacgctgctctccaccttgcgcgtggacgggccctggacgcctccgggaacctgggagtcggccatccctgagagtggcgccgctcgcgttacagacctcggaggacgcctgcagccgatctacgagctcgcatcggttactgatgatgctttgattcatctggccttgcatgcgctgtatggtgtcaaatcatcgttagatgagattgaggagctttcagtgctgttctcctcaaatccagctgacagaacctctaaccgtgttacaaatgtgtggttacgttcctcgagcaccatatctgtggggagtattctcaaatctttacgctctacaggtcttgtggtcttcttcctttgcaagtttgtgcacttttatcttgtccaaagtcgagaaatgaattgtgcaagtagagaagttcatgaacatgaacatcctggtgataaagacactgaacagcatcggccttacagtctagtaaaccaagcatttgcagctgcagttagtaaggtcctcgaaggctatttctgttccttgaatactttaccagcatcaattaggcttaggcgttcagttggccaatctggtataccttccaagacttcagatggaatgagttgtaattccactgcagaagtcactcttctggaagtttatctacacactgaagagttaagaaggcatgttaaatcccttggaaatatttgtttccctaagtttgcaggtgctacattgtgccatgatggtttggatactgaagcaagtgtggagtttgagaatttcccacggggcactgatttgctttcgtatttgtatgtctatattcgtgatgccgatccagttcactatggtcttctgaagtatctttttattcgttcctgtgagccatactttaacttcattaagtcatggatttaccgagcttctgttgatgacccttatgaggaatttctcattacacaaactgaaaataagggtgttcaaggagtctcttctgacataacagatgagttcacccttttcccgttaaagggaagaaatcatgtttctgctccatgttttctaaaggagatatgccatcctgttttgcgtactgggcagcagcttcgagtgctcatgaatcttctaaagtcgtgcaaattgtctgctactggaggagatggttatccctcttgtaatatcattaatatggagggggttctcccatggtttaatacaccaattgagtcttcaatgaattcatttacgttctcaaaaagtagcgtggaggcagtaacatgcaaaagggatgctatgtacaagttgatgatggagaaactccaacgttttttctctaatgtggaggtcttgtcacatctactactatgttttttgctctaacagtagcaagaatactttatttctcagaagtcaaccatgaagcttctttcttcccaatccagttcagtttaccatggaataaattgggcagtccctattgatgagtgcgagaaagatgacagcctaagttgcaaacatgttcctgtgcactcacagaatgctgaacatactgcggtgcttgatggtttagaactggattatcagtatagtcagttttcgccatttgacaggtttatgaagagaaccagttgttcatctgaagacatgaattcagttgagttcttatatactgatcataaaaggtcagtagagaaagtatcacatggtaatgcagttaatgcattacattctgaatcagggcctactaaactatcaaacggcaaaaactatgagaagtttggtaatataaatcagccatggtataccagtattccttacaatctcagtctgaaccccatactgaagaatgcagcttgttactgcacggagagtgatgtgcaacagaaaagcaagaaccaatcacttgccagctttgattttgagtcagtcatggatccatgtgaagtatattgtgcaaggagcacatcctgccttgttgagtttgtaaatggagcaacaattatacagcccagtactcatccttgtgaacggcttgattgttctcccaagcttcttcaagctcagacaagaagtcaggcatcccttacttcctcaggagagatgtcaacaagagacagtcttcagaaaaatgtttatggtggggcattctgggagagatcgttactatataatgataaatcaaaagaaaaaccagctgtggactttagttcacagtttgatatgccccttgatatagttatcaacaagtataaatatgttagcagcttcacaatgaagttgcttgaggaaggttttgatctttgtgcacatctgctagccctgcggcggtaccatttcatggaaatagctgactgggcagattcctttattgctctaatttataataagaaatggtcatttgttaaatctgagcagaaaagatcggagattcaagggcttatggactttgctttgcagagatcttcatgtgattctgatccttataaggaaaggttatttatatacatcagggagccacctgttgattcttttgatgcatctgcatgtgatcttgatttgctggatgatatcttgttgggttataaagctgaatggccagtgaatattgttattacagaagacacacttaaaatatatgctgaaatattctgttatcttcttcaagtcaggtttgcagtgttttcactgactgaagtatggagatttctaaaggagttgacacagttcatcagtcgctccagccatagaggatctgacgtgttgaagaaattgaatgttgtaatgaaagtgaggcataaacttcatcactttctatcaacactacagcagtatctccactgccatttatctgatatttcgtggcgccgttttcaacattcccttaaaaatcaggtcagggatatactggatttggagtatgtgcatatgtgttatattactgatgcacttgacatttggttacgtgaggatatggagtatgaacatacttatagagtaataaatagatttatagatgacatgggaaacattagtacttagttgagtatccagagtccaaactcaaagattgtgtttaacttgtcaaaacaagcttattttctctatctcattttcttgtttttttaatctatgcgtatcgttctatttagatttgatgtggttatctccattagtaattagatttgagtatgtagaaacaaagtagatttgtctaagaagattttcacaagactgcacctctacttggtcttataaat

SEQ ID NO: 14931 - DNA, 3889 bp, Zea Mays
ggacaacgaacccgcgaaattccatttcccagttctcaccatttcaccaaccgttcactccctcgccggcgcacctcgccggcgtcgtgtcctggcacaccaccaccagtgcacggcacttctatcttcgtctccttctgccctcccatccttcattctgccgctcggaacgttggatgtgtgctgctccagatcacgcgggagggcaataagccctagctcggccatcccgggatggaggcggccgcctccagcctctcgacgctgctctccaccttgcgcgtggacgggccctggacgcctccgggaacctgggagtcggccatccctgagagtggcgccgctcgcgttacagacctcggaggacgcctgcagccgatctacgagctcgcatcggttactgatgatgctttgattcatctggccttgcatgcgctgtatggtgtcaaatcatcgttagatgagattgaggagctttcagtgctgttctcctcaaatccagctgacagaacctctaaccgtgttacaaatgtgtggttacgttcctcgagcaccatatctgtggggagtattctcaaatctttacgctctacaggtcttgtggtcttcttcctttgcaagtttgtgcacttttatcttgtccaaagtcgagaaatgaattgtgcaagtagagaagttcatgaacatgaacatcctggtgataaagacactgaacagcatcggccttacagtctagtaaaccaagcatttgcagctgcagttagtaaggtcctcgaaggctatttctgttccttgaatactttaccagcatcaattaggcttaggcgttcagttggccaatctggtataccttccaagacttcagatggaatgagttgtaattccactgcagaagtcactcttctggaagtttatctacacactgaagagttaagaaggcatgttaaatcccttggaaatatttgtttccctaagtttgcaggtgctacattgtgccatgatggtttggatactgaagcaagtgtggagtttgagaatttcccacggggcactgatttgctttcgtatttgtatgtctatattcgtgatgccgatccagttcactatggtcttctgaagtatctttttattcgttcctgtgagccatactttaacttcattaagtcatggatttaccgagcttctgttgatgacccttatgaggaatttctcattacacaaactgaaaataagggtgttcaaggagtctcttctgacataacagatgagttcacccttttcccgttaaagcaagaatactttatttctcagaagtcaaccatgaagcttctttcttcccaatccagttcagtttaccatggaataaattgggcagtccctattgatgagtgcgagaaagatgacagcctaagttgcaaacatgttcctgtgcactcacagaatgctgaacatactgcggtgcttgatggtttagaactggattatcagtatagtcagttttcgccatttgacaggtttatgaagagaaccagttgttcatctgaagacatgaattcagttgagttcttatatactgatcataaaaggtcagtagagaaagtatcacatggtaatgcagttaatgcattacattctgaatcagggcctactaaactatcaaacggcaaaaactatgagaagtttggtaatataaatcagccatggtataccagtattccttacaatctcagtctgaaccccatactgaagaatgcagcttgttactgcacggagagtgatgtgcaacagaaaagcaagaaccaatcacttgccagctttgattttgagtcagtcatggatccatgtgaagtatattgtgcaaggagcacatcctgccttgttgagtttgtaaatggagcaacaattatacagcccagtactcatccttgtgaacggcttgattgttctcccaagcttcttcaagctcagacaagaagtcaggcatcccttacttcctcaggagagatgtcaacaagagacagtcttcagaaaaatgtttatggtggggcattctgggagagatcgttactatataatgataaatcaaaagaaaaaccagctgtggactttagttcacagtttgatatgccccttgatatagttatcaacaagtataaatatgttagcagcttcacaatgaagttgcttgaggaaggttttgatctttgtgcacatctgctagccctgcggcggtaccatttcatggaaatagctgactgggcagattcctttattgctctaatttataataagaaatggtcatttgttaaatctgagcagaaaagatcggagattcaagggcttatggactttgctttgcagagatcttcatgtgattctgatccttataaggaaaggttatttatatacatcagggagccacctgttgattcttttgatgcatctgcatgtgatcttgatttgctggatgatatcttgttgggttataaagctgaatggccagtgaatattgttattacagaagacacacttaaaatatatgctgaaatattctgttatcttcttcaagtcaggtttgcagtgttttcactgactgaagtatggagatttctaaaggtatcttttctccattgatgttgcagccacaacatttcgttcatttagaggagttgacacagttcatcagtcgctccagccatagaggatctgacgtgttgaagaaattgaatgttgtaatgaaagtgaggcataaacttcatcactttctatcaacactacagcagtatctccactgccatttatctgatatttcgtggcgccgttttcaacattcccttaaaaatcaggtcagggatatactggatttggagtatgtgcatatgtgttatattactgatgcacttgacatatgtttcttatctgatgagtcaaaacaagttgccacgataatcaaaagcatgctgcaactggctttggagttacgatcatgctttcaaagtattggtgacacttgtgatttaccagtaaatcaactcagtaatctgcaataccttataaacttctctcaggtggacgtaattagaacaaagttcgagggtaacatcaaagatttgtatgttttgcattcgaaatcttcaaaatatggggagctcggtctttcccgtttctgggggtatcagaactacaatgagtaccattctatgaaagttagcaaagatatgggcagcttctgtttttgatacgacatcttaagaccgaagtgccacttgcggcgcatgtgcaagtcatgaggcatacacgctgatttgatgaaattgccccttgtattggttttggcgaactaaagagaactgcggttcagacatgccatatacttggagatgcattggtggttgattgtaaggttgcaagtgcatctcaaatttacaacaaaaatgggaaatcacgtgacttgattatcctccattcagccctatacatacgctatataatgtatatgccattgtacaacacgggctttgacagacaccagctaggctccaaaagggcatcccatgtagtagcttcacagtgtgttgctggatcacaaggaagtttagttatgtttcccaagcacagctggagaaagttagtttggcgtcagatgtattatgtatatttagttctgactaagctgtacaaagctagcagaagtgcgcaaatgtcctttctggatcgatctgcctgtaattttgaatctgcacatcgaagtaagcaggaatgtttcgtatatgtgccttcttaattttatagtttgttattgcaactgcaaccaagctgcatgggactacgcatgtacagcactagcttgcatggtaggatcacaaaactagtttgaacttcaacttcc

SEQ ID NO: 14932 - DNA, 3948 bp, Zea Mays
caccaaccgttcactccctcgccggcgcacctcgccggcgtcgtgtcctggcacaccaccaccagtgcacggcacttctatcttcgtctccttctgccctcccatccttcattctgccgctcggaacgttggatgtgtgctgctccagatcacgcgggagggcaataagccctagctcggccatcccgggatggaggcggccgcctccagcctctcgacgctgctctccaccttgcgcgtggacgggccctggacgcctccgggaacctgggagtcggccatccctgagagtggcgccgctcgcgttacagacctcggaggacgcctgcagccgatctacgagctcgcatcggttactgatgatgctttgattcatctggccttgcatgcgctgtatggtgtcaaatcatcgttagatgagattgaggagctttcagtgctgttctcctcaaatccagctgacagaacctctaaccgtgttacaaatgtgtggttacgttcctcgagcaccatatctgtggggagtattctcaaatctttacgctctacaggtcttgtggtcttcttcctttgcaagtttgtgcacttttatcttgtccaaagtcgagaaatgaattgtgcaagtagagaagttcatgaacatgaacatcctggtgataaagacactgaacagcatcggccttacagtctagtaaaccaagcatttgcagctgcagttagtaaggtcctcgaaggctatttctgttccttgaatactttaccagcatcaattaggcttaggcgttcagttggccaatctggtataccttccaagacttcagatggaatgagttgtaattccactgcagaagtcactcttctggaagtttatctacacactgaagagttaagaaggcatgttaaatcccttggaaatatttgtttccctaagtttgcaggtgctacattgtgccatgatggtttggatactgaagcaagtgtggagtttgagaatttcccacggggcactgatttgctttcgtatttgtatgtctatattcgtgatgccgatccagttcactatggtcttctgaagtatctttttattcgttcctgtgagccatactttaacttcattaagtcatggatttaccgagcttctgttgatgacccttatgaggaatttctcattacacaaactgaaaataagggtgttcaaggagtctcttctgacataacagatgagttcacccttttcccgttaaagcaagaatactttatttctcagaagtcaaccatgaagcttctttcttcccaatccagttcagtttaccatggaataaattgggcagtccctattgatgagtgcgagaaagatgacagcctaagttgcaaacatgttcctgtgcactcacagaatgctgaacatactgcggtgcttgatggtttagaactggattatcagtatagtcagttttcgccatttgacaggtttatgaagagaaccagttgttcatctgaagacatgaattcagttgagttcttatatactgatcataaaaggtcagtagagaaagtatcacatggtaatgcagttaatgcattacattctgaatcagggcctactaaactatcaaacggcaaaaactatgagaagtttggtaatataaatcagccatggtataccagtattccttacaatctcagtctgaaccccatactgaagaatgcagcttgttactgcacggagagtgatgtgcaacagaaaagcaagaaccaatcacttgccagctttgattttgagtcagtcatggatccatgtgaagtatattgtgcaaggagcacatcctgccttgttgagtttgtaaatggagcaacaattatacagcccagtactcatccttgtgaacggcttgattgttctcccaagcttcttcaagctcagacaagaagtcaggcatcccttacttcctcaggagagatgtcaacaagagacagtcttcagaaaaatgtttatggtggggcattctgggagagatcgttactatataatgataaatcaaaagaaaaaccagctgtggactttagttcacagtttgatatgccccttgatatagttatcaacaagtgcatcatggaagaagttttgcttcagtataaatatgttagcagcttcacaatgaagttgcttgaggaaggttttgatctttgtgcacatctgctagccctgcggcggtaccatttcatggaaatagctgactgggcagattcctttattgctctaatttataataagaaatggtcatttgttaaatctgagcagaaaagatcggagattcaagggcttatggactttgctttgcagagatcttcatgtgattctgatccttataaggaaaggttatttatatacatcagggagccacctgttgattcttttgatgcatctgcatgtgatcttgatttgctggatgatatcttgttgggttataaagctgaatggccagtgaatattgttattacagaagacacacttaaaatatatgctgaaatattctgttatcttcttcaagtcaggtttgcagtgttttcactgactgaagtatggagatttctaaaggagttgacacagttcatcagtcgctccagccatagaggatctgacgtgttgaagaaattgaatgttgtaatgaaagtgaggcataaacttcatcactttctatcaacactacagcagtatctccactgccatttatctgatatttcgtggcgccgttttcaacattcccttaaaaatcagatgtttcttatctgatgagtcaaaacaagttgccacgataatcaaaagcatgctgcaactggctttggagttacgatcatgctttcaaagtattggtgacacttgtgatttaccagtaaatcaactcagtaatctgcaataccttataaacttctctcaggtggacgtaattagaacaaagttcgagggtaacatcaaagatttgtatgttttgcattcgaaatcttcaaaatatggggagctcggtctttcccgtttctgggggtatcagaactacaatgagtaccattctatgaaagttagcaaagatatgggcagcttctgtttttgatacgacatcttaagaccgaaggtttgcctttatctggtggggaatagctcaccttttaaaccattggtgggatcattgtgtgcatttgtttgtttcatggtagtgcagagaggtgcatcatctagttccgggtcttctggaatcactacagctttttgagccacccatgagtcatgacagaaattattgcttgtttgtgctggttgtagtgccacttgcggcgcatgtgcaagtcatgaggcatacacgctgatttgatgaaattgccccttgtattggttttggcgaactaaagagaactgcggttcagacatgccatatacttggagatgcattggtggttgattgtaaggttgcaagtgcatctcaaatttacaacaaaaatgggaaatcacgtgacttgattatcctccattcagccctatacatacgctatataatgtatatgccattgtacaacacgggctttgacagacaccagctaggctccaaaagggcatcccatgtagtagcttcacagtgtgttgctggatcacaaggaagtttagttatgtttcccaagcacagctggagaaagttagtttggcgtcagatgtattatgtatatttagttctgactaagctgtacaaagctagcagaagtgcgcaaatgtcctttctggatcgatctgcctgtaattttgaatctgcacatcgaagtaagcaggaatgtttcgtatatgtgccttcttaattttatagtttgttattgcaactgcaaccaagctgcatgggactacgcatgtacagcactagcttgcatggtaggatcacaaaactagtttgaacttcaacttcc

SEQ ID NO: 14933 - DNA, 3822 bp, Zea Mays
caccaaccgttcactccctcgccggcgcacctcgccggcgtcgtgtcctggcacaccaccaccagtgcacggcacttctatcttcgtctccttctgccctcccatccttcattctgccgctcggaacgttggatgtgtgctgctccagatcacgcgggagggcaataagccctagctcggccatcccgggatggaggcggccgcctccagcctctcgacgctgctctccaccttgcgcgtggacgggccctggacgcctccgggaacctgggagtcggccatccctgagagtggcgccgctcgcgttacagacctcggaggacgcctgcagccgatctacgagctcgcatcggttactgatgatgctttgattcatctggccttgcatgcgctgtatggtgtcaaatcatcgttagatgagattgaggagctttcagtgctgttctcctcaaatccagctgacagaacctctaaccgtgttacaaatgtgtggttacgttcctcgagcaccatatctgtggggagtattctcaaatctttacgctctacaggtcttgtggtcttcttcctttgcaagtttgtgcacttttatcttgtccaaagtcgagaaatgaattgtgcaagtagagaagttcatgaacatgaacatcctggtgataaagacactgaacagcatcggccttacagtctagtaaaccaagcatttgcagctgcagttagtaaggtcctcgaaggctatttctgttccttgaatactttaccagcatcaattaggcttaggcgttcagttggccaatctggtataccttccaagacttcagatggaatgagttgtaattccactgcagaagtcactcttctggaagtttatctacacactgaagagttaagaaggcatgttaaatcccttggaaatatttgtttccctaagtttgcaggtgctacattgtgccatgatggtttggatactgaagcaagtgtggagtttgagaatttcccacggggcactgatttgctttcgtatttgtatgtctatattcgtgatgccgatccagttcactatggtcttctgaagtatctttttattcgttcctgtgagccatactttaacttcattaagtcatggatttaccgagcttctgttgatgacccttatgaggaatttctcattacacaaactgaaaataagggtgttcaaggagtctcttctgacataacagatgagttcacccttttcccgttaaagcaagaatactttatttctcagaagtcaaccatgaagcttctttcttcccaatccagttcagtttaccatggaataaattgggcagtccctattgatgagtgcgagaaagatgacagcctaagttgcaaacatgttcctgtgcactcacagaatgctgaacatactgcggtgcttgatggtttagaactggattatcagtatagtcagttttcgccatttgacaggtttatgaagagaaccagttgttcatctgaagacatgaattcagttgagttcttatatactgatcataaaaggtcagtagagaaagtatcacatggtaatgcagttaatgcattacattctgaatcagggcctactaaactatcaaacggcaaaaactatgagaagtttggtaatataaatcagccatggtataccagtattccttacaatctcagtctgaaccccatactgaagaatgcagcttgttactgcacggagagtgatgtgcaacagaaaagcaagaaccaatcacttgccagctttgattttgagtcagtcatggatccatgtgaagtatattgtgcaaggagcacatcctgccttgttgagtttgtaaatggagcaacaattatacagcccagtactcatccttgtgaacggcttgattgttctcccaagcttcttcaagctcagacaagaagtcaggcatcccttacttcctcaggagagatgtcaacaagagacagtcttcagaaaaatgtttatggtggggcattctgggagagatcgttactatataatgataaatcaaaagaaaaaccagctgtggactttagttcacagtttgatatgccccttgatatagttatcaacaagtgcatcatggaagaagttttgcttcagtataaatatgttagcagcttcacaatgaagttgcttgaggaaggttttgatctttgtgcacatctgctagccctgcggcggtaccatttcatggaaatagctgactgggcagattcctttattgctctaatttataataagaaatggtcatttgttaaatctgagcagaaaagatcggagattcaagggcttatggactttgctttgcagagatcttcatgtgattctgatccttataaggaaaggttatttatatacatcagggagccacctgttgattcttttgatgcatctgcatgtgatcttgatttgctggatgatatcttgttgggttataaagctgaatggccagtgaatattgttattacagaagacacacttaaaatatatgctgaaatattctgttatcttcttcaagtcaggtttgcagtgttttcactgactgaagtatggagatttctaaaggagttgacacagttcatcagtcgctccagccatagaggatctgacgtgttgaagaaattgaatgttgtaatgaaagtgaggcataaacttcatcactttctatcaacactacagcagtatctccactgccatttatctgatatttcgtggcgccgttttcaacattcccttaaaaatcaggtcagggatatactggatttggagtatgtgcatatgtgttatattactgatgcacttgacatatgtttcttatctgatgagtcaaaacaagttgccacgataatcaaaagcatgctgcaactggctttggagttacgatcatgctttcaaagtattggtgacacttgtgatttaccagtaaatcaactcagtaatctgcaataccttataaacttctctcaggtggacgtaattagaacaaagttcgagggtaacatcaaagatttgtatgttttgcattcgaaatcttcaaaatatggggagctcggtctttcccgtttctgggggtatcagaactacaatgagtaccattctatgaaagttagcaaagatatgggcagcttctgtttttgatacgacatcttaagaccgaagtgccacttgcggcgcatgtgcaagtcatgaggcatacacgctgatttgatgaaattgccccttgtattggttttggcgaactaaagagaactgcggttcagacatgccatatacttggagatgcattggtggttgattgtaaggttgcaagtgcatctcaaatttacaacaaaaatgggaaatcacgtgacttgattatcctccattcagccctatacatacgctatataatgtatatgccattgtacaacacgggctttgacagacaccagctaggctccaaaagggcatcccatgtagtagcttcacagtgtgttgctggatcacaaggaagtttagttatgtttcccaagcacagctggagaaagttagtttggcgtcagatgtattatgtatatttagttctgactaagctgtacaaagctagcagaagtgcgcaaatgtcctttctggatcgatctgcctgtaattttgaatctgcacatcgaagtaagcaggaatgtttcgtatatgtgccttcttaattttatagtttgttattgcaactgcaaccaagctgcatgggactacgcatgtacagcactagcttgcatggtaggatcacaaaactagtttgaacttcaacttcc

SEQ ID NO: 14934 - DNA, 3723 bp, Zea Mays
tcactccctcgccggcgcacctcgccggcgtcgtgtcctggcacaccaccaccagtgcacggcacttctatcttcgtctccttctgccctcccatccttcattctgccgctcggaacgttggatgtgtgctgctccagatcacgcgggagggcaataagccctagctcggccatcccgggatggaggcggccgcctccagcctctcgacgctgctctccaccttgcgcgtggacgggccctggacgcctccgggaacctgggagtcggccatccctgagagtggcgccgctcgcgttacagacctcggaggacgcctgcagccgatctacgagctcgcatcggttactgatgatgctttgattcatctggccttgcatgcgctgtatggtgtcaaatcatcgttagatgagattgaggagctttcagtgctgttctcctcaaatccagctgacagaacctctaaccgtgttacaaatgtgtggttacgttcctcgagcaccatatctgtggggagtattctcaaatctttacgctctacaggtcttgtggtcttcttcctttgcaagtttgtgcacttttatcttgtccaaagtcgagaaatgaattgtgcaagtagagaagttcatgaacatgaacatcctggtgataaagacactgaacagcatcggccttacagtctagtaaaccaagcatttgcagctgcagttagtaaggtcctcgaaggctatttctgttccttgaatactttaccagcatcaattaggcttaggcgttcagttggccaatctggtataccttccaagacttcagatggaatgagttgtaattccactgcagaagtcactcttctggaagtttatctacacactgaagagttaagaaggcatgttaaatcccttggaaatatttgtttccctaagtttgcaggtgctacattgtgccatgatggtttggatactgaagcaagtgtggagtttgagaatttcccacggggcactgatttgctttcgtatttgtatgtctatattcgtgatgccgatccagttcactatggtcttctgaagtatctttttattcgttcctgtgagccatactttaacttcattaagtcatggatttaccgagcttctgttgatgacccttatgaggaatttctcattacacaaactgaaaataagggtgttcaaggagtctcttctgacataacagatgagttcacccttttcccgttaaagcaagaatactttatttctcagaagtcaaccatgaagcttctttcttcccaatccagttcagtttaccatggaataaattgggcagtccctattgatgagtgcgagaaagatgacagcctaagttgcaaacatgttcctgtgcactcacagaatgctgaacatactgcggtgcttgatggtttagaactggattatcagtatagtcagttttcgccatttgacaggtttatgaagagaaccagttgttcatctgaagacatgaattcagttgagttcttatatactgatcataaaaggtcagtagagaaagtatcacatggtaatgcagttaatgcattacattctgaatcagggcctactaaactatcaaacggcaaaaactatgagaagtttggtaatataaatcagccatggtataccagtattccttacaatctcagtctgaaccccatactgaagaatgcagcttgttactgcacggagagtgatgtgcaacagaaaagcaagaaccaatcacttgccagctttgattttgagtcagtcatggatccatgtgaagtatattgtgcaaggagcacatcctgccttgttgagtttgtaaatggagcaacaattatacagcccagtactcatccttgtgaacggcttgattgttctcccaagcttcttcaagctcagacaagaagtcaggcatcccttacttcctcaggagagatgtcaacaagagacagtcttcagaaaaatgtttatggtggggcattctgggagagatcgttactatataatgataaatcaaaagaaaaaccagctgtggactttagttcacagtttgatatgccccttgatatagttatcaacaagtataaatatgttagcagcttcacaatgaagttgcttgaggaaggttttgatctttgtgcacatctgctagccctgcggcggtaccatttcatggaaatagctgactgggcagattcctttattgctctaatttataataagaaatggtcatttgttaaatctgagcagaaaagatcggagattcaagggcttatggactttgctttgcagagatcttcatgtgattctgatccttataaggaaaggttatttatatacatcagggagccacctgttgattcttttgatgcatctgcatgtgatcttgatttgctggatgatatcttgttgggttataaagctgaatggccagtgaatattgttattacagaagacacacttaaaatatatgctgaaatattctgttatcttcttcaagtcaggtttgcagtgttttcactgactgaagtatggagatttctaaaggagttgacacagttcatcagtcgctccagccatagaggatctgacgtgttgaagaaattgaatgttgtaatgaaagtgaggcataaacttcatcactttctatcaacactacagcagtatctccactgccatttatctgatatttcgtggcgccgttttcaacattcccttaaaaatcagatgtttcttatctgatgagtcaaaacaagttgccacgataatcaaaagcatgctgcaactggctttggagttacgatcatgctttcaaagtattggtgacacttgtgatttaccagtaaatcaactcagtaatctgcaataccttataaacttctctcaggtggacgtaattagaacaaagttcgagggtaacatcaaagatttgtatgttttgcattcgaaatcttcaaaatatggggagctcggtctttcccgtttctgggggtatcagaactacaatgagtaccattctatgaaagttagcaaagatatgggcagcttctgtttttgatacgacatcttaagaccgaagtgccacttgcggcgcatgtgcaagtcatgaggcatacacgctgatttgatgaaattgccccttgtattggttttggcgaactaaagagaactgcggttcagacatgccatatacttggagatgcattggtggttgattgtaaggttgcaagtgcatctcaaatttacaacaaaaatgggaaatcacgtgacttgattatcctccattcagccctatacatacgctatataatgtatatgccattgtacaacacgggctttgacagacaccagctaggctccaaaagggcatcccatgtagtagcttcacagtgtgttgctggatcacaaggaagtttagttatgtttcccaagcacagctggagaaagttagtttggcgtcagatgtattatgtatatttagttctgactaagctgtacaaagctagcagaagtgcgcaaatgtcctttctggatcgatctgcctgtaattttgaatctgcacatcgaagtaagcaggaatgtttcgtatatgtgccttcttaattttatagtttgttattgcaactgcaaccaagctgcatgggactacgcatgtacagcactagcttgcatggtaggatcacaaaactagtttgaacttcaacttcc

SEQ ID NO: 14935 - DNA, 3974 bp, Zea Mays
gcgcacctcgccggcgtcgtgtcctggcacaccaccaccagtgcacggcacttctatcttcgtctccttctgccctcccatccttcattctgccgctcggaacgttggatgtgtgctgctccagatcacgcgggagggcaataagccctagctcggccatcccgggatggaggcggccgcctccagcctctcgacgctgctctccaccttgcgcgtggacgggccctggacgcctccgggaacctgggagtcggccatccctgagagtggcgccgctcgcgttacagacctcggaggacgcctgcagccgatctacgagctcgcatcggttactgatgatgctttgattcatctggccttgcatgcgctgtatggtgtcaaatcatcgttagatgagattgaggagctttcagtgctgttctcctcaaatccagctgacagaacctctaaccgtgttacaaatgtgtggttacgttcctcgagcaccatatctgtggggagtattctcaaatctttacgctctacaggtcttgtggtcttcttcctttgcaagtttgtgcacttttatcttgtccaaagtcgagaaatgaattgtgcaagtagagaagttcatgaacatgaacatcctggtgataaagacactgaacagcatcggccttacagtctagtaaaccaagcatttgcagctgcagttagtaaggtcctcgaaggctatttctgttccttgaatactttaccagcatcaattaggcttaggcgttcagttggccaatctggtataccttccaagacttcagatggaatgagttgtaattccactgcagaagtcactcttctggaagtttatctacacactgaagagttaagaaggcatgttaaatcccttggaaatatttgtttccctaagtttgcaggtgctacattgtgccatgatggtttggatactgaagcaagtgtggagtttgagaatttcccacggggcactgatttgctttcgtatttgtatgtctatattcgtgatgccgatccagttcactatggtcttctgaagtatctttttattcgttcctgtgagccatactttaacttcattaagtcatggatttaccgagcttctgttgatgacccttatgaggaatttctcattacacaaactgaaaataagggtgttcaaggagtctcttctgacataacagatgagttcacccttttcccgttaaagcaagaatactttatttctcagaagtcaaccatgaagcttctttcttcccaatccagttcagtttaccatggaataaattgggcagtccctattgatgagtgcgagaaagatgacagcctaagttgcaaacatgttcctgtgcactcacagaatgctgaacatactgcggtgcttgatggtttagaactggattatcagtatagtcagttttcgccatttgacaggtttatgaagagaaccagttgttcatctgaagacatgaattcagttgagttcttatatactgatcataaaaggtcagtagagaaagtatcacatggtaatgcagttaatgcattacattctgaatcagggcctactaaactatcaaacggcaaaaactatgagaagtttggtaatataaatcagccatggtataccagtattccttacaatctcagtctgaaccccatactgaagaatgcagcttgttactgcacggagagtgatgtgcaacagaaaagcaagaaccaatcacttgccagctttgattttgagtcagtcatggatccatgtgaagtatattgtgcaaggagcacatcctgccttgttgagtttgtaaatggagcaacaattatacagcccagtactcatccttgtgaacggcttgattgttctcccaagcttcttcaagctcagacaagaagtcaggcatcccttacttcctcaggagagatgtcaacaagagacagtcttcagaaaaatgtttatggtggggcattctgggagagatcgttactatataatgataaatcaaaagaaaaaccagctgtggactttagttcacagtttgatatgccccttgatatagttatcaacaagtgcatcatggaagaagttttgcttcagtataaatatgttagcagcttcacaatgaagttgcttgaggaaggttttgatctttgtgcacatctgctagccctgcggcggtaccatttcatggaaatagctgactgggcagattcctttattgctctaatttataataagaaatggtcatttgttaaatctgagcagaaaagatcggagattcaagggcttatggactttgctttgcagagatcttcatgtgattctgatccttataaggaaaggttatttatatacatcagggagccacctgttgattcttttgatgcatctgcatgtgatcttgatttgctggatgatatcttgttgggttataaagctgaatggccagtgaatattgttattacagaagacacacttaaaatatatgctgaaatattctgttatcttcttcaagtcaggtttgcagtgttttcactgactgaagtatggagatttctaaaggtatcttttctccattgatgttgcagccacaacatttcgttcatttagaggagttgacacagttcatcagtcgctccagccatagaggatctgacgtgttgaagaaattgaatgttgtaatgaaagtgaggcataaacttcatcactttctatcaacactacagcagtatctccactgccatttatctgatatttcgtggcgccgttttcaacattcccttaaaaatcagatgtttcttatctgatgagtcaaaacaagttgccacgataatcaaaagcatgctgcaactggctttggagttacgatcatgctttcaaagtattggtgacacttgtgatttaccagtaaatcaactcagtaatctgcaataccttataaacttctctcaggtggacgtaattagaacaaagttcgagggtaacatcaaagatttgtatgttttgcattcgaaatcttcaaaatatggggagctcggtctttcccgtttctgggggtatcagaactacaatgagtaccattctatgaaagttagcaaagatatgggcagcttctgtttttgatacgacatcttaagaccgaaggtttgcctttatctggtggggaatagctcaccttttaaaccattggtgggatcattgtgtgcatttgtttgtttcatggtagtgcagagaggtgcatcatctagttccgggtcttctggaatcactacagctttttgagccacccatgagtcatgacagaaattattgcttgtttgtgctggttgtagtgccacttgcggcgcatgtgcaagtcatgaggcatacacgctgatttgatgaaattgccccttgtattggttttggcgaactaaagagaactgcggttcagacatgccatatacttggagatgcattggtggttgattgtaaggttgcaagtgcatctcaaatttacaacaaaaatgggaaatcacgtgacttgattatcctccattcagccctatacatacgctatataatgtatatgccattgtacaacacgggctttgacagacaccagctaggctccaaaagggcatcccatgtagtagcttcacagtgtgttgctggatcacaaggaagtttagttatgtttcccaagcacagctggagaaagttagtttggcgtcagatgtattatgtatatttagttctgactaagctgtacaaagctagcagaagtgcgcaaatgtcctttctggatcgatctgcctgtaattttgaatctgcacatcgaagtaagcaggaatgtttcgtatatgtgccttcttaattttatagtttgttattgcaactgcaaccaagctgcatgggactacgcatgtacagcactagcttgcatggtaggatcacaaaactagtttgaacttcaacttcc

SEQ ID NO: 14936 - DNA, 4033 bp, Zea Mays
cacctcgccggcgtcgtgtcctggcacaccaccaccagtgcacggcacttctatcttcgtctccttctgccctcccatccttcattctgccgctcggaacgttggatgtgtgctgctccagatcacgcgggagggcaataagccctagctcggccatcccgggatggaggcggccgcctccagcctctcgacgctgctctccaccttgcgcgtggacgggccctggacgcctccgggaacctgggagtcggccatccctgagagtggcgccgctcgcgttacagacctcggaggacgcctgcagccgatctacgagctcgcatcggttactgatgatgctttgattcatctggccttgcatgcgctgtatggtgtcaaatcatcgttagatgagattgaggagctttcagtgctgttctcctcaaatccagctgacagaacctctaaccgtgttacaaatgtgtggttacgttcctcgagcaccatatctgtggggagtattctcaaatctttacgctctacaggtcttgtggtcttcttcctttgcaagtttgtgcacttttatcttgtccaaagtcgagaaatgaattgtgcaagtagagaagttcatgaacatgaacatcctggtgataaagacactgaacagcatcggccttacagtctagtaaaccaagcatttgcagctgcagttagtaaggtcctcgaaggctatttctgttccttgaatactttaccagcatcaattaggcttaggcgttcagttggccaatctggtataccttccaagacttcagatggaatgagttgtaattccactgcagaagtcactcttctggaagtttatctacacactgaagagttaagaaggcatgttaaatcccttggaaatatttgtttccctaagtttgcaggtgctacattgtgccatgatggtttggatactgaagcaagtgtggagtttgagaatttcccacggggcactgatttgctttcgtatttgtatgtctatattcgtgatgccgatccagttcactatggtcttctgaagtatctttttattcgttcctgtgagccatactttaacttcattaagtcatggatttaccgagcttctgttgatgacccttatgaggaatttctcattacacaaactgaaaataagggtgttcaaggagtctcttctgacataacagatgagttcacccttttcccgttaaagcaagaatactttatttctcagaagtcaaccatgaagcttctttcttcccaatccagttcagtttaccatggaataaattgggcagtccctattgatgagtgcgagaaagatgacagcctaagttgcaaacatgttcctgtgcactcacagaatgctgaacatactgcggtgcttgatggtttagaactggattatcagtatagtcagttttcgccatttgacaggtttatgaagagaaccagttgttcatctgaagacatgaattcagttgagttcttatatactgatcataaaaggtcagtagagaaagtatcacatggtaatgcagttaatgcattacattctgaatcagggcctactaaactatcaaacggcaaaaactatgagaagtttggtaatataaatcagccatggtataccagtattccttacaatctcagtctgaaccccatactgaagaatgcagcttgttactgcacggagagtgatgtgcaacagaaaagcaagaaccaatcacttgccagctttgattttgagtcagtcatggatccatgtgaagtatattgtgcaaggagcacatcctgccttgttgagtttgtaaatggagcaacaattatacagcccagtactcatccttgtgaacggcttgattgttctcccaagcttcttcaagctcagacaagaagtcaggcatcccttacttcctcaggagagatgtcaacaagagacagtcttcagaaaaatgtttatggtggggcattctgggagagatcgttactatataatgataaatcaaaagaaaaaccagctgtggactttagttcacagtttgatatgccccttgatatagttatcaacaagtgcatcatggaagaagttttgcttcagtataaatatgttagcagcttcacaatgaagttgcttgaggaaggttttgatctttgtgcacatctgctagccctgcggcggtaccatttcatggaaatagctgactgggcagattcctttattgctctaatttataataagaaatggtcatttgttaaatctgagcagaaaagatcggagattcaagggcttatggactttgctttgcagagatcttcatgtgattctgatccttataaggaaaggttatttatatacatcagggagccacctgttgattcttttgatgcatctgcatgtgatcttgatttgctggatgatatcttgttgggttataaagctgaatggccagtgaatattgttattacagaagacacacttaaaatatatgctgaaatattctgttatcttcttcaagtcaggtttgcagtgttttcactgactgaagtatggagatttctaaaggtatcttttctccattgatgttgcagccacaacatttcgttcatttagaggagttgacacagttcatcagtcgctccagccatagaggatctgacgtgttgaagaaattgaatgttgtaatgaaagtgaggcataaacttcatcactttctatcaacactacagcagtatctccactgccatttatctgatatttcgtggcgccgttttcaacattcccttaaaaatcaggtcagggatatactggatttggagtatgtgcatatgtgttatattactgatgcacttgacatatgtttcttatctgatgagtcaaaacaagttgccacgataatcaaaagcatgctgcaactggctttggagttacgatcatgctttcaaagtattggtgacacttgtgatttaccagtaaatcaactcagtaatctgcaataccttataaacttctctcaggtggacgtaattagaacaaagttcgagggtaacatcaaagatttgtatgttttgcattcgaaatcttcaaaatatggggagctcggtctttcccgtttctgggggtatcagaactacaatgagtaccattctatgaaagttagcaaagatatgggcagcttctgtttttgatacgacatcttaagaccgaaggtttgcctttatctggtggggaatagctcaccttttaaaccattggtgggatcattgtgtgcatttgtttgtttcatggtagtgcagagaggtgcatcatctagttccgggtcttctggaatcactacagctttttgagccacccatgagtcatgacagaaattattgcttgtttgtgctggttgtagtgccacttgcggcgcatgtgcaagtcatgaggcatacacgctgatttgatgaaattgccccttgtattggttttggcgaactaaagagaactgcggttcagacatgccatatacttggagatgcattggtggttgattgtaaggttgcaagtgcatctcaaatttacaacaaaaatgggaaatcacgtgacttgattatcctccattcagccctatacatacgctatataatgtatatgccattgtacaacacgggctttgacagacaccagctaggctccaaaagggcatcccatgtagtagcttcacagtgtgttgctggatcacaaggaagtttagttatgtttcccaagcacagctggagaaagttagtttggcgtcagatgtattatgtatatttagttctgactaagctgtacaaagctagcagaagtgcgcaaatgtcctttctggatcgatctgcctgtaattttgaatctgcacatcgaagtaagcaggaatgtttcgtatatgtgccttcttaattttatagtttgttattgcaactgcaaccaagctgcatgggactacgcatgtacagcactagcttgcatggtaggatcacaaaactagtttgaacttcaacttcc

SEQ ID NO: 14937 - DNA, 3311 bp, Zea Mays
atggaggcggccgcctccagcctctcgacgctgctctccaccttgcgcgtggacgggccctggacgcctccgggaacctgggagtcggccatccctgagagtggcgccgctcgcgttacagacctcggaggacgcctgcagccgatctacgagctcgcatcggttactgatgatgctttgattcatctggccttgcatgcgctgtatggtgtcaaatcatcgttagatgagattgaggagctttcagtgctgttctcctcaaatccagctgacagaacctctaaccgtgttacaaatgtgtggttacgttcctcgagcaccatatctgtggggagtattctcaaatctttacgctctacaggtcttgtggtcttcttcctttgcaagtttgtgcacttttatcttgtccaaagtcgagaaatgaattgtgcaagtagagaagttcatgaacatgaacatcctggtgataaagacactgaacagcatcggccttacagtctagtaaaccaagcatttgcagctgcagttagtaaggtcctcgaaggctatttctgttccttgaatactttaccagcatcaattaggcttaggcgttcagttggccaatctggtataccttccaagacttcagatggaatgagttgtaattccactgcagaagtcactcttctggaagtttatctacacactgaagagttaagaaggcatgttaaatcccttggaaatatttgtttccctaagtttgcaggtgctacattgtgccatgatggtttggatactgaagcaagtgtggagtttgagaatttcccacggggcactgatttgctttcgtatttgtatgtctatattcgtgatgccgatccagttcactatggtcttctgaagtatctttttattcgttcctgtgagccatactttaacttcattaagtcatggatttaccgagcttctgttgatgacccttatgaggaatttctcattacacaaactgaaaataagggtgttcaaggagtctcttctgacataacagatgagttcacccttttcccgttaaagcagggaagaaatcatgtttctgctccatgttttctaaaggagatatgccatcctgttttgcgtactgggcagcagcttcgagtgctcatgaatcttctaaagtcgtgcaaattgtctgctactggaggagatggttatccctcttgtaatatcattaatatggagggggttctcccatggtttaatacaccaattgagtcttcaatgaattcatttacgttctcaaaaagtagcgtggaggcagtaacatgcaaaagggatgctatgtacaagttgatgatggagaaactccaacgttttttctctaatgtggaggtcttgtcacatctactactatgttttttgctctaacagtagcaagaatactttatttctcagaagtcaaccatgaagcttctttcttcccaatccagttcagtttaccatggaataaattgggcagtccctattgatgagtgcgagaaagatgacagcctaagttgcaaacatgttcctgtgcactcacagaatgctgaacatactgcggtgcttgatggtttagaactggattatcagtatagtcagttttcgccatttgacaggtttatgaagagaaccagttgttcatctgaagacatgaattcagttgagttcttatatactgatcataaaaggtcagtagagaaagtatcacatggtaatgcagttaatgcattacattctgaatcagggcctactaaactatcaaacggcaaaaactatgagaagtttggtaatataaatcagccatggtataccagtattccttacaatctcagtctgaaccccatactgaagaatgcagcttgttactgcacggagagtgatgtgcaacagaaaagcaagaaccaatcacttgccagctttgattttgagtcagtcatggatccatgtgaagtatattgtgcaaggagcacatcctgccttgttgagtttgtaaatggagcaacaattatacagcccagtactcatccttgtgaacggcttgattgttctcccaagcttcttcaagctcagacaagaagtcaggcatcccttacttcctcaggagagatgtcaacaagagacagtcttcagaaaaatgtttatggtggggcattctgggagagatcgttactatataatgataaatcaaaagaaaaaccagctgtggactttagttcacagtttgatatgccccttgatatagttatcaacaagtgcatcatggaagaagttttgcttcagtataaatatgttagcagcttcacaatgaagttgcttgaggaaggttttgatctttgtgcacatctgctagccctgcggcggtaccatttcatggaaatagctgactgggcagattcctttattgctctaatttataataagaaatggtcatttgttaaatctgagcagaaaagatcggagattcaagggcttatggactttgctttgcagagatcttcatgtgattctgatccttataaggaaaggttatttatatacatcagggagccacctgttgattcttttgatgcatctgcatgtgatcttgatttgctggatgatatcttgttgggttataaagctgaatggccagtgaatattgttattacagaagacacacttaaaatatatgctgaaatattctgttatcttcttcaagtcaggtttgcagtgttttcactgactgaagtatggagatttctaaaggagttgacacagttcatcagtcgctccagccatagaggatctgacgtgttgaagaaattgaatgttgtaatgaaagtgaggcataaacttcatcactttctatcaacactacagcagtatctccactgccatttatctgatatttcgtggcgccgttttcaacattcccttaaaaatcaggtcagggatatactggatttggagtatgtgcatatgtgttatattactgatgcacttgacatttggttacgtgaggatatggagtatgaacatacttatagagtaataaatagatttatagatgacatgggaaacattagtacttagttgagtatccagagtccaaactcaaagattgtgtttaacttgtcaaaacaagcttattttctctatctcattttcttgtttttttaatctatgcgtatcgttctatttagatttgatgtggttatctccattagtaattagatttgagtatgtagaaacaaagtagatttgtctaagaagattttcacaagactgcacctctacttggtcttataaat

SEQ ID NO: 14938 - DNA, 4041 bp, Zea Mays
gcacccagtccacccaggccccagcactgccgctgccttgcctgccctcgcttcggcgctttctgctttctccagtgagccgcacccgcactaccgctgacgctaattaaccacaagcgaccgtcgccttcccccacctcctcccttcctcaaaaaaaggcggaggcgggagtggtggtggtgctcgtgggcacgcagcggagcaccctgtacagcagcagcgctgcggcagtagagagtgccattggtggagctggtaactagccctcccccctccgttcccgtcccgcgcgcagccgtctgccgagcctgctcaggtgtgcagtgctcgtattcgggtggactgattacttcgttaaagcctcagcatagtgatgtagccttcctccctctgctggctatatgctttgcccatcatggtgaggaagaagagaactggccctggtggctctggagaaacttctggagagtcttcaggagcctctggacaaggttcctcacagcagcctgagcgaactcaacaacctgggggaggacgtggctgggtgcctcaacagggtggccatggtggtgggcaacaccagggtcgtgatcgacattatcagggacgtggaggaccagggccacatcaccttggtagtggggcacctgagtatcacccgcgtgaataccagggacgtggtggtgaatatcagggacatggtggtgagtaccagggacggggtggtgactaccagggacgtggtggtggccgctccagaggtggaatgccacagccatactatggtgggcataggggaggtaatgttggacgcaatgttcctccaggtccgtccaggacagttcccgagctgcaccaagccccatatgtccagtatccagccccggtggtttcgccctccccatcgggacctggctcatcctcacagcctatggcagaggtgagctctggacaagtccagcaacagtttcagcaacttgccgatcgtggtcagagttccacgagccaagaaattcaagtggcaccagcatcaagcaaatcggttcgattcccgttacggcccggcaagggcacttatggggacaggtgcattgtgaaggcaaatcatttttttgctgagcttcctgacaaagaccttcaccaatatgatgtatctataacacctgaggttacttcacgtggcgtcaatcgtgctgtcatgggtgagcttgtaacaatatatagacaatcccatttgggtgggcgtctacctgcatacgatggaagaaagagcctgtatactgctggaccattgccatttacttctatggcatttgaaattaccttgcaagatgaggaagatagtcttggcggtcgccaaggtggacataggcgtgagagagtatttagggtggtgatcaaatttgcagcccgtgctgatctccaccatctggctatgtttctagctggaaggcaagcagatgcccctcaggaagctcttcaagtgcttgacattgtactacgtgaattgcctaccgcgaggtattctcctgtcggtaggtcattttactctcccaacttagggagacgtcaaaaacttggtgagggattggaaagttggcgtggtttttaccaaagcataaggccgacacagatgggcctttcactgaatattgatatgtcctctactgcatttatcgagcctctccctgtgatcgattttgttgctcagcttcttaacagagatatctcagttaggccattgtctgattctgatcgcgtgaagattaaaaaagccctaagaggtgtgaaggttgaggtgactcacaggggaaacatgcgcagaaaatatcgcatttctggcctcacctcacaagcaacaagagagctatcgtatgtgtctttcattgctggtatgagattccctgttgatgatcgtggtactgtgaagactgtggtgcaatacttcatggagacttatggttttagtatccagcacaccactttaccatgcttgcaagtgggtaatcaacaaagaccaaattatctgcctatggaggtttgcaagatagttgaaggacagcgttactcaaagcgactcaatgagaaacaaatcactgctctactgaaagtgacctgccagcgccctcaagagcgcgagctggacatcttacagactgtgcatcacaatgcatactatgaagacccctatgcactggaatttggtataagaattgatgaacgtcttgctgcagttgaagctcgtgttctgccaccaccaagacttaaataccatgatagtggccgagagaaggatgttttgcccagagttggccaatggaacatgatgaataagaaaatggttaatggtggcagagtgagcaactgggcatgtattaacttctctcggaatgtgcaagatagtgccgctaggggtttctctcatgagttggcagtcatgtgccaaatatcaggaatggattttgctcttgagcctgtgctgcctccagtgactgcaaggccagaacatgttgagagagcgttaaaggcacgttatcaagatgcaatgaacatactgaggccacagggaagggaacttgatctgctgatcgtaatactgcctgacaacaatggttctctttatggggatctcaaaaggatctgtgagactgaactcggattggtctcccagtgttgtctgactaaacatgtttttaagatgagcaagcagtaccttgcaaatgttgcactcaaaataaatgttaaggttgggggaaggaatactgtacttttagatgctttgtcaaggagaatcccccttgtcagtgacagaccgaccataatatttggtgctgatgttacccatccacatcctggagaagattccagtccttccattgcagccgttgttgcttcgcaagactggcccgaggtcacgaaatacgctggactagtgagtgcgcaagcccatcgccaggagctgatacaggatcttttcaaagtatggcaggacccgcagagaaggacggtaactggcggcatgataaaggaacttctcatttctttcaagagggcaactggacagaagccccagaggatcatattctacagggatggtgtcagtgagggacagttctatcaagtattgctgtacgaacttgatgccattagaaaggcctgtgcgtccctggagcccaactaccagcctccagttacttttgtcgtggtacagaagcgccatcacactaggctgtttgcgaacaaccacagtgatcagcgcacagtcgatagaagcggaaacatactgcctggcaccgtggtcgattcgaagatttgccatcctactgagtttgacttctacctgtgtagccatgctggcattcagggaacgagccgccctgctcactaccatgtcctgtgggacgagaacaagttcacagctgacgagctgcagaccctgacgaacaacctgtgctacacgtacgctaggtgcacccgctccgtgtccatcgtgcccccggcgtactacgctcatctggcagccttccgagctcgcttctacatggagccagacacctctgacagcgggtcactggccagcggtgcccgtggccccccacccggtgcggcacgcagcagcacgagaggggccgggagtgtcgaggtcaggcccctacctgctctcaaggagaacgtgaagcgtgtcatgttttactgctgagacgctggtgggctgccttcgccaaggaaaatgccctggagcattcccatgtacccgcactgtttcggtgatacagtactatctaacgccgattttgcgcgttaagacttccagtgatctgggaaatttcttgtacgactgttgtagtgttgtgtattcgtaatgtgatgacgcggcagttcttctaggagcttagtgccgtgtaaaatatctgttgtaagttgtaacctgtcaccctctagtgttatgtcatgatgaaccaaattatttgttgtcattccatgtacttcgccaagtatttgttgtcacgatgttctaggatgattttttttttttataa

SEQ ID NO: 14939 - DNA, 3876 bp, Zea Mays
gcacccagtccacccaggccccagcactgccgctgccttgcctgccctcgcttcggcgctttctgctttctccagtgagccgcacccgcactaccgctgacgctaattaaccacaagcgaccgtcgccttcccccacctcctcccttcctcaaaaaaaggcggaggcgggagtggtggtggtgctcgtgggcacgcagcggagcaccctgtacagcagcagcgctgcggcagtagagagtgccattggtggagctgtgcccatcatggtgaggaagaagagaactggccctggtggctctggagaaacttctggagagtcttcaggagcctctggacaaggttcctcacagcagcctgagcgaactcaacaacctgggggaggacgtggctgggtgcctcaacagggtggccatggtggtgggcaacaccagggtcgtgatcgacattatcagggacgtggaggaccagggccacatcaccttggtagtggggcacctgagtatcacccgcgtgaataccagggacgtggtggtgaatatcagggacatggtggtgagtaccagggacggggtggtgactaccagggacgtggtggtggccgctccagaggtggaatgccacagccatactatggtgggcataggggaggtaatgttggacgcaatgttcctccaggtccgtccaggacagttcccgagctgcaccaagccccatatgtccagtatccagccccggtggtttcgccctccccatcgggacctggctcatcctcacagcctatggcagaggtgagctctggacaagtccagcaacagtttcagcaacttgccgatcgtggtcagagttccacgagccaagaaattcaagtggcaccagcatcaagcaaatcggttcgattcccgttacggcccggcaagggcacttatggggacaggtgcattgtgaaggcaaatcatttttttgctgagcttcctgacaaagaccttcaccaatatgatgtatctataacacctgaggttacttcacgtggcgtcaatcgtgctgtcatgggtgagcttgtaacaatatatagacaatcccatttgggtgggcgtctacctgcatacgatggaagaaagagcctgtatactgctggaccattgccatttacttctatggcatttgaaattaccttgcaagatgaggaagatagtcttggcggtcgccaaggtggacataggcgtgagagagtatttagggtggtgatcaaatttgcagcccgtgctgatctccaccatctggctatgtttctagctggaaggcaagcagatgcccctcaggaagctcttcaagtgcttgacattgtactacgtgaattgcctaccgcgaggtattctcctgtcggtaggtcattttactctcccaacttagggagacgtcaaaaacttggtgagggattggaaagttggcgtggtttttaccaaagcataaggccgacacagatgggcctttcactgaatattgatatgtcctctactgcatttatcgagcctctccctgtgatcgattttgttgctcagcttcttaacagagatatctcagttaggccattgtctgattctgatcgcgtgaagattaaaaaagccctaagaggtgtgaaggttgaggtgactcacaggggaaacatgcgcagaaaatatcgcatttctggcctcacctcacaagcaacaagagagctatctttctttgtgatagattccctgttgatgatcgtggtactgtgaagactgtggtgcaatacttcatggagacttatggttttagtatccagcacaccactttaccatgcttgcaagtgggtaatcaacaaagaccaaattatctgcctatggaggtttgcaagatagttgaaggacagcgttactcaaagcgactcaatgagaaacaaatcactgctctactgaaagtgacctgccagcgccctcaagagcgcgagctggacatcttacagactgtgcatcacaatgcatactatgaagacccctatgcactggaatttggtataagaattgatgaacgtcttgctgcagttgaagctcgtgttctgccaccaccaagacttaaataccatgatagtggccgagagaaggatgttttgcccagagttggccaatggaacatgatgaataagaaaatggttaatggtggcagagtgagcaactgggcatgtattaacttctctcggaatgtgcaagatagtgccgctaggggtttctctcatgagttggcagtcatgtgccaaatatcaggaatggattttgctcttgagcctgtgctgcctccagtgactgcaaggccagaacatgttgagagagcgttaaaggcacgttatcaagatgcaatgaacatactgaggccacagggaagggaacttgatctgctgatcgtaatactgcctgacaacaatggttctctttatggggatctcaaaaggatctgtgagactgaactcggattggtctcccagtgttgtctgactaaacatgtttttaagatgagcaagcagtaccttgcaaatgttgcactcaaaataaatgttaaggttgggggaaggaatactgtacttttagatgctttgtcaaggagaatcccccttgtcagtgacagaccgaccataatatttggtgctgatgttacccatccacatcctggagaagattccagtccttccattgcagccgttgttgcttcgcaagactggcccgaggtcacgaaatacgctggactagtgagtgcgcaagcccatcgccaggagctgatacaggatcttttcaaagtatggcaggacccgcagagaaggacggtaactggcggcatgataaaggaacttctcatttctttcaagagggcaactggacagaagccccagaggatcatattctacagggatggtgtcagtgagggacagttctatcaagtattgctgtacgaacttgatgccattagaaaggcctgtgcgtccctggagcccaactaccagcctccagttacttttgtcgtggtacagaagcgccatcacactaggctgtttgcgaacaaccacagtgatcagcgcacagtcgatagaagcggaaacatactgcctggcaccgtggtcgattcgaagatttgccatcctactgagtttgacttctacctgtgtagccatgctggcattcagggaacgagccgccctgctcactaccatgtcctgtgggacgagaacaagttcacagctgacgagctgcagaccctgacgaacaacctgtgctacacgtacgctaggtgcacccgctccgtgtccatcgtgcccccggcgtactacgctcatctggcagccttccgagctcgcttctacatggagccagacacctctgacagcgggtcactggccagcggtgcccgtggccccccacccggtgcggcacgcagcagcacgagaggggccgggagtgtcgaggtcaggcccctacctgctctcaaggagaacgtgaagcgtgtcatgttttactgctgagacgctggtgggctgccttcgccaaggaaaatgccctggagcattcccatgtacccgcactgtttcggtgatacagtactatctaacgccgattttgcgcgttaagacttccagtgatctgggaaatttcttgtacgactgttgtagtgttgtgtattcgtaatgtgatgacgcggcagttcttctaggagcttagtgccgtgtaaaatatctgttgtaagttgtaacctgtcaccctctagtgttatgtcatgatgaaccaaattatttgttgtcattccatgtacttcgccaagtatttgttgtcacgatgttctaggatgattttttttttttataa

SEQ ID NO: 14940 - DNA, 4009 bp, Zea Mays
gcacccagtccacccaggccccagcactgccgctgccttgcctgccctcgcttcggcgctttctgctttctccagtgagccgcacccgcactaccgctgacgctaattaaccacaagcgaccgtcgccttcccccacctcctcccttcctcaaaaaaaggcggaggcgggagtggtggtggtgctcgtgggcacgcagcggagcaccctgtacagcagcagcgctgcggcagtagagagtgccattggtggagctggtaactagccctcccccctccgttcccgtcccgcgcgcagccgtctgccgagcctgctcaggtgtgcagtgctcgtattcgggtggactgattacttcgttaaagcctcagcatagtgattgcccatcatggtgaggaagaagagaactggccctggtggctctggagaaacttctggagagtcttcaggagcctctggacaaggttcctcacagcagcctgagcgaactcaacaacctgggggaggacgtggctgggtgcctcaacagggtggccatggtggtgggcaacaccagggtcgtgatcgacattatcagggacgtggaggaccagggccacatcaccttggtagtggggcacctgagtatcacccgcgtgaataccagggacgtggtggtgaatatcagggacatggtggtgagtaccagggacggggtggtgactaccagggacgtggtggtggccgctccagaggtggaatgccacagccatactatggtgggcataggggaggtaatgttggacgcaatgttcctccaggtccgtccaggacagttcccgagctgcaccaagccccatatgtccagtatccagccccggtggtttcgccctccccatcgggacctggctcatcctcacagcctatggcagaggtgagctctggacaagtccagcaacagtttcagcaacttgccgatcgtggtcagagttccacgagccaagaaattcaagtggcaccagcatcaagcaaatcggttcgattcccgttacggcccggcaagggcacttatggggacaggtgcattgtgaaggcaaatcatttttttgctgagcttcctgacaaagaccttcaccaatatgatgtatctataacacctgaggttacttcacgtggcgtcaatcgtgctgtcatgggtgagcttgtaacaatatatagacaatcccatttgggtgggcgtctacctgcatacgatggaagaaagagcctgtatactgctggaccattgccatttacttctatggcatttgaaattaccttgcaagatgaggaagatagtcttggcggtcgccaaggtggacataggcgtgagagagtatttagggtggtgatcaaatttgcagcccgtgctgatctccaccatctggctatgtttctagctggaaggcaagcagatgcccctcaggaagctcttcaagtgcttgacattgtactacgtgaattgcctaccgcgaggtattctcctgtcggtaggtcattttactctcccaacttagggagacgtcaaaaacttggtgagggattggaaagttggcgtggtttttaccaaagcataaggccgacacagatgggcctttcactgaatattgatatgtcctctactgcatttatcgagcctctccctgtgatcgattttgttgctcagcttcttaacagagatatctcagttaggccattgtctgattctgatcgcgtgaagattaaaaaagccctaagaggtgtgaaggttgaggtgactcacaggggaaacatgcgcagaaaatatcgcatttctggcctcacctcacaagcaacaagagagctatcgtatgtgtctttcattgctggtatgagattccctgttgatgatcgtggtactgtgaagactgtggtgcaatacttcatggagacttatggttttagtatccagcacaccactttaccatgcttgcaagtgggtaatcaacaaagaccaaattatctgcctatggaggtttgcaagatagttgaaggacagcgttactcaaagcgactcaatgagaaacaaatcactgctctactgaaagtgacctgccagcgccctcaagagcgcgagctggacatcttacagactgtgcatcacaatgcatactatgaagacccctatgcactggaatttggtataagaattgatgaacgtcttgctgcagttgaagctcgtgttctgccaccaccaagacttaaataccatgatagtggccgagagaaggatgttttgcccagagttggccaatggaacatgatgaataagaaaatggttaatggtggcagagtgagcaactgggcatgtattaacttctctcggaatgtgcaagatagtgccgctaggggtttctctcatgagttggcagtcatgtgccaaatatcaggaatggattttgctcttgagcctgtgctgcctccagtgactgcaaggccagaacatgttgagagagcgttaaaggcacgttatcaagatgcaatgaacatactgaggccacagggaagggaacttgatctgctgatcgtaatactgcctgacaacaatggttctctttatggggatctcaaaaggatctgtgagactgaactcggattggtctcccagtgttgtctgactaaacatgtttttaagatgagcaagcagtaccttgcaaatgttgcactcaaaataaatgttaaggttgggggaaggaatactgtacttttagatgctttgtcaaggagaatcccccttgtcagtgacagaccgaccataatatttggtgctgatgttacccatccacatcctggagaagattccagtccttccattgcagccgttgttgcttcgcaagactggcccgaggtcacgaaatacgctggactagtgagtgcgcaagcccatcgccaggagctgatacaggatcttttcaaagtatggcaggacccgcagagaaggacggtaactggcggcatgataaaggaacttctcatttctttcaagagggcaactggacagaagccccagaggatcatattctacagggatggtgtcagtgagggacagttctatcaagtattgctgtacgaacttgatgccattagaaaggcctgtgcgtccctggagcccaactaccagcctccagttacttttgtcgtggtacagaagcgccatcacactaggctgtttgcgaacaaccacagtgatcagcgcacagtcgatagaagcggaaacatactgcctggcaccgtggtcgattcgaagatttgccatcctactgagtttgacttctacctgtgtagccatgctggcattcagggaacgagccgccctgctcactaccatgtcctgtgggacgagaacaagttcacagctgacgagctgcagaccctgacgaacaacctgtgctacacgtacgctaggtgcacccgctccgtgtccatcgtgcccccggcgtactacgctcatctggcagccttccgagctcgcttctacatggagccagacacctctgacagcgggtcactggccagcggtgcccgtggccccccacccggtgcggcacgcagcagcacgagaggggccgggagtgtcgaggtcaggcccctacctgctctcaaggagaacgtgaagcgtgtcatgttttactgctgagacgctggtgggctgccttcgccaaggaaaatgccctggagcattcccatgtacccgcactgtttcggtgatacagtactatctaacgccgattttgcgcgttaagacttccagtgatctgggaaatttcttgtacgactgttgtagtgttgtgtattcgtaatgtgatgacgcggcagttcttctaggagcttagtgccgtgtaaaatatctgttgtaagttgtaacctgtcaccctctagtgttatgtcatgatgaaccaaattatttgttgtcattccatgtacttcgccaagtatttgttgtcacgatgttctaggatgattttttttttttataa

SEQ ID NO: 14941 - DNA, 3950 bp, Zea Mays
gcacccagtccacccaggccccagcactgccgctgccttgcctgccctcgcttcggcgctttctgctttctccagtgagccgcacccgcactaccgctgacgctaattaaccacaagcgaccgtcgccttcccccacctcctcccttcctcaaaaaaaggcggaggcgggagtggtggtggtgctcgtgggcacgcagcggagcaccctgtacagcagcagcgctgcggcagtagagagtgccattggtggagctggtaactagccctcccccctccgttcccgtcccgcgcgcagccgtctgccgagcctgctcagtgcccatcatggtgaggaagaagagaactggccctggtggctctggagaaacttctggagagtcttcaggagcctctggacaaggttcctcacagcagcctgagcgaactcaacaacctgggggaggacgtggctgggtgcctcaacagggtggccatggtggtgggcaacaccagggtcgtgatcgacattatcagggacgtggaggaccagggccacatcaccttggtagtggggcacctgagtatcacccgcgtgaataccagggacgtggtggtgaatatcagggacatggtggtgagtaccagggacggggtggtgactaccagggacgtggtggtggccgctccagaggtggaatgccacagccatactatggtgggcataggggaggtaatgttggacgcaatgttcctccaggtccgtccaggacagttcccgagctgcaccaagccccatatgtccagtatccagccccggtggtttcgccctccccatcgggacctggctcatcctcacagcctatggcagaggtgagctctggacaagtccagcaacagtttcagcaacttgccgatcgtggtcagagttccacgagccaagaaattcaagtggcaccagcatcaagcaaatcggttcgattcccgttacggcccggcaagggcacttatggggacaggtgcattgtgaaggcaaatcatttttttgctgagcttcctgacaaagaccttcaccaatatgatgtatctataacacctgaggttacttcacgtggcgtcaatcgtgctgtcatgggtgagcttgtaacaatatatagacaatcccatttgggtgggcgtctacctgcatacgatggaagaaagagcctgtatactgctggaccattgccatttacttctatggcatttgaaattaccttgcaagatgaggaagatagtcttggcggtcgccaaggtggacataggcgtgagagagtatttagggtggtgatcaaatttgcagcccgtgctgatctccaccatctggctatgtttctagctggaaggcaagcagatgcccctcaggaagctcttcaagtgcttgacattgtactacgtgaattgcctaccgcgaggtattctcctgtcggtaggtcattttactctcccaacttagggagacgtcaaaaacttggtgagggattggaaagttggcgtggtttttaccaaagcataaggccgacacagatgggcctttcactgaatattgatatgtcctctactgcatttatcgagcctctccctgtgatcgattttgttgctcagcttcttaacagagatatctcagttaggccattgtctgattctgatcgcgtgaagattaaaaaagccctaagaggtgtgaaggttgaggtgactcacaggggaaacatgcgcagaaaatatcgcatttctggcctcacctcacaagcaacaagagagctatcgtatgtgtctttcattgctggtatgagattccctgttgatgatcgtggtactgtgaagactgtggtgcaatacttcatggagacttatggttttagtatccagcacaccactttaccatgcttgcaagtgggtaatcaacaaagaccaaattatctgcctatggaggtttgcaagatagttgaaggacagcgttactcaaagcgactcaatgagaaacaaatcactgctctactgaaagtgacctgccagcgccctcaagagcgcgagctggacatcttacagactgtgcatcacaatgcatactatgaagacccctatgcactggaatttggtataagaattgatgaacgtcttgctgcagttgaagctcgtgttctgccaccaccaagacttaaataccatgatagtggccgagagaaggatgttttgcccagagttggccaatggaacatgatgaataagaaaatggttaatggtggcagagtgagcaactgggcatgtattaacttctctcggaatgtgcaagatagtgccgctaggggtttctctcatgagttggcagtcatgtgccaaatatcaggaatggattttgctcttgagcctgtgctgcctccagtgactgcaaggccagaacatgttgagagagcgttaaaggcacgttatcaagatgcaatgaacatactgaggccacagggaagggaacttgatctgctgatcgtaatactgcctgacaacaatggttctctttatggggatctcaaaaggatctgtgagactgaactcggattggtctcccagtgttgtctgactaaacatgtttttaagatgagcaagcagtaccttgcaaatgttgcactcaaaataaatgttaaggttgggggaaggaatactgtacttttagatgctttgtcaaggagaatcccccttgtcagtgacagaccgaccataatatttggtgctgatgttacccatccacatcctggagaagattccagtccttccattgcagccgttgttgcttcgcaagactggcccgaggtcacgaaatacgctggactagtgagtgcgcaagcccatcgccaggagctgatacaggatcttttcaaagtatggcaggacccgcagagaaggacggtaactggcggcatgataaaggaacttctcatttctttcaagagggcaactggacagaagccccagaggatcatattctacagggatggtgtcagtgagggacagttctatcaagtattgctgtacgaacttgatgccattagaaaggcctgtgcgtccctggagcccaactaccagcctccagttacttttgtcgtggtacagaagcgccatcacactaggctgtttgcgaacaaccacagtgatcagcgcacagtcgatagaagcggaaacatactgcctggcaccgtggtcgattcgaagatttgccatcctactgagtttgacttctacctgtgtagccatgctggcattcagggaacgagccgccctgctcactaccatgtcctgtgggacgagaacaagttcacagctgacgagctgcagaccctgacgaacaacctgtgctacacgtacgctaggtgcacccgctccgtgtccatcgtgcccccggcgtactacgctcatctggcagccttccgagctcgcttctacatggagccagacacctctgacagcgggtcactggccagcggtgcccgtggccccccacccggtgcggcacgcagcagcacgagaggggccgggagtgtcgaggtcaggcccctacctgctctcaaggagaacgtgaagcgtgtcatgttttactgctgagacgctggtgggctgccttcgccaaggaaaatgccctggagcattcccatgtacccgcactgtttcggtgatacagtactatctaacgccgattttgcgcgttaagacttccagtgatctgggaaatttcttgtacgactgttgtagtgttgtgtattcgtaatgtgatgacgcggcagttcttctaggagcttagtgccgtgtaaaatatctgttgtaagttgtaacctgtcaccctctagtgttatgtcatgatgaaccaaattatttgttgtcattccatgtacttcgccaagtatttgttgtcacgatgttctaggatgattttttttttttataa

SEQ ID NO: 14942 - DNA, 3763 bp, Zea Mays
gttgatttgtccggttctagctgcctgtaaactgatccagtgtgcagtgctcgtattcgggtggactgattacttcgttaaagcctcagcatagtgatgtagccttcctccctctgctggctatatgctttgcccatcatggtgaggaagaagagaactggccctggtggctctggagaaacttctggagagtcttcaggagcctctggacaaggttcctcacagcagcctgagcgaactcaacaacctgggggaggacgtggctgggtgcctcaacagggtggccatggtggtgggcaacaccagggtcgtgatcgacattatcagggacgtggaggaccagggccacatcaccttggtagtggggcacctgagtatcacccgcgtgaataccagggacgtggtggtgaatatcagggacatggtggtgagtaccagggacggggtggtgactaccagggacgtggtggtggccgctccagaggtggaatgccacagccatactatggtgggcataggggaggtaatgttggacgcaatgttcctccaggtccgtccaggacagttcccgagctgcaccaagccccatatgtccagtatccagccccggtggtttcgccctccccatcgggacctggctcatcctcacagcctatggcagaggtgagctctggacaagtccagcaacagtttcagcaacttgccgatcgtggtcagagttccacgagccaagaaattcaagtggcaccagcatcaagcaaatcggttcgattcccgttacggcccggcaagggcacttatggggacaggtgcattgtgaaggcaaatcatttttttgctgagcttcctgacaaagaccttcaccaatatgatgtatctataacacctgaggttacttcacgtggcgtcaatcgtgctgtcatgggtgagcttgtaacaatatatagacaatcccatttgggtgggcgtctacctgcatacgatggaagaaagagcctgtatactgctggaccattgccatttacttctatggcatttgaaattaccttgcaagatgaggaagatagtcttggcggtcgccaaggtggacataggcgtgagagagtatttagggtggtgatcaaatttgcagcccgtgctgatctccaccatctggctatgtttctagctggaaggcaagcagatgcccctcaggaagctcttcaagtgcttgacattgtactacgtgaattgcctaccgcgaggtattctcctgtcggtaggtcattttactctcccaacttagggagacgtcaaaaacttggtgagggattggaaagttggcgtggtttttaccaaagcataaggccgacacagatgggcctttcactgaatattgatatgtcctctactgcatttatcgagcctctccctgtgatcgattttgttgctcagcttcttaacagagatatctcagttaggccattgtctgattctgatcgcgtgaagattaaaaaagccctaagaggtgtgaaggttgaggtgactcacaggggaaacatgcgcagaaaatatcgcatttctggcctcacctcacaagcaacaagagagctatcgtatgtgtctttcattgctggtatgagattccctgttgatgatcgtggtactgtgaagactgtggtgcaatacttcatggagacttatggttttagtatccagcacaccactttaccatgcttgcaagtgggtaatcaacaaagaccaaattatctgcctatggaggtttgcaagatagttgaaggacagcgttactcaaagcgactcaatgagaaacaaatcactgctctactgaaagtgacctgccagcgccctcaagagcgcgagctggacatcttacagactgtgcatcacaatgcatactatgaagacccctatgcactggaatttggtataagaattgatgaacgtcttgctgcagttgaagctcgtgttctgccaccaccaagacttaaataccatgatagtggccgagagaaggatgttttgcccagagttggccaatggaacatgatgaataagaaaatggttaatggtggcagagtgagcaactgggcatgtattaacttctctcggaatgtgcaagatagtgccgctaggggtttctctcatgagttggcagtcatgtgccaaatatcaggaatggattttgctcttgagcctgtgctgcctccagtgactgcaaggccagaacatgttgagagagcgttaaaggcacgttatcaagatgcaatgaacatactgaggccacagggaagggaacttgatctgctgatcgtaatactgcctgacaacaatggttctctttatggggatctcaaaaggatctgtgagactgaactcggattggtctcccagtgttgtctgactaaacatgtttttaagatgagcaagcagtaccttgcaaatgttgcactcaaaataaatgttaaggttgggggaaggaatactgtacttttagatgctttgtcaaggagaatcccccttgtcagtgacagaccgaccataatatttggtgctgatgttacccatccacatcctggagaagattccagtccttccattgcagccgttgttgcttcgcaagactggcccgaggtcacgaaatacgctggactagtgagtgcgcaagcccatcgccaggagctgatacaggatcttttcaaagtatggcaggacccgcagagaaggacggtaactggcggcatgataaaggaacttctcatttctttcaagagggcaactggacagaagccccagaggatcatattctacagggatggtgtcagtgagggacagttctatcaagtattgctgtacgaacttgatgccattagaaaggcctgtgcgtccctggagcccaactaccagcctccagttacttttgtcgtggtacagaagcgccatcacactaggctgtttgcgaacaaccacagtgatcagcgcacagtcgatagaagcggaaacatactgcctggcaccgtggtcgattcgaagatttgccatcctactgagtttgacttctacctgtgtagccatgctggcattcagggaacgagccgccctgctcactaccatgtcctgtgggacgagaacaagttcacagctgacgagctgcagaccctgacgaacaacctgtgctacacgtacgctaggtgcacccgctccgtgtccatcgtgcccccggcgtactacgctcatctggcagccttccgagctcgcttctacatggagccagacacctctgacagcgggtcactggccagcggtgcccgtggccccccacccggtgcggcacgcagcagcacgagaggggccgggagtgtcgaggtcaggcccctacctgctctcaaggagaacgtgaagcgtgtcatgttttactgctgagacgctggtgggctgccttcgccaaggaaaatgccctggagcattcccatgtacccgcactgtttcggtgatacagtactatctaacgccgattttgcgcgttaagacttccagtgatctgggaaatttcttgtacgactgttgtagtgttgtgtattcgtaatgtgatgacgcggcagttcttctaggagcttagtgccgtgtaaaatatctgttgtaagttgtaacctgtcaccctctagtgttatgtcatgatgaaccaaattatttgttgtcattccatgtacttcgccaagtatttgttgtcacgatgttctaggatgattttttttttttataa

SEQ ID NO: 14943 - DNA, 3592 bp, Zea Mays
atggtgaggaagaagagaactggccctggtggctctggagaaacttctggagagtcttcaggagcctctggacaaggttcctcacagcagcctgagcgaactcaacaacctgggggaggacgtggctgggtgcctcaacagggtggccatggtggtgggcaacaccagggtcgtgatcgacattatcagggacgtggaggaccagggccacatcaccttggtagtggggcacctgagtatcacccgcgtgaataccagggacgtggtggtgaatatcagggacatggtggtgagtaccagggacggggtggtgactaccagggacgtggtggtggccgctccagaggtggaatgccacagccatactatggtgggcataggggaggtaatgttggacgcaatgttcctccaggtccgtccaggacagttcccgagctgcaccaagccccatatgtccagtatccagccccggtggtttcgccctccccatcgggacctggctcatcctcacagcctatggcagaggtgagctctggacaagtccagcaacagtttcagcaacttgccgatcgtggtcagagttccacgagccaagaaattcaagtggcaccagcatcaagcaaatcggttcgattcccgttacggcccggcaagggcacttatggggacaggtgcattgtgaaggcaaatcatttttttgctgagcttcctgacaaagaccttcaccaatatgatgtatctataacacctgaggttacttcacgtggcgtcaatcgtgctgtcatgggtgagcttgtaacaatatatagacaatcccatttgggtgggcgtctacctgcatacgatggaagaaagagcctgtatactgctggaccattgccatttacttctatggcatttgaaattaccttgcaagatgaggaagatagtcttggcggtcgccaaggtggacataggcgtgagagagtatttagggtggtgatcaaatttgcagcccgtgctgatctccaccatctggctatgtttctagctggaaggcaagcagatgcccctcaggaagctcttcaagtgcttgacattgtactacgtgaattgcctaccgcgaggtattctcctgtcggtaggtcattttactctcccaacttagggagacgtcaaaaacttggtgagggattggaaagttggcgtggtttttaccaaagcataaggccgacacagatgggcctttcactgaatattgatatgtcctctactgcatttatcgagcctctccctgtgatcgattttgttgctcagcttcttaacagagatatctcagttaggccattgtctgattctgatcgcgtgaagattaaaaaagccctaagaggtgtgaaggttgaggtgactcacaggggaaacatgcgcagaaaatatcgcatttctggcctcacctcacaagcaacaagagagctatctttctttgtgatagattccctgttgatgatcgtggtactgtgaagactgtggtgcaatacttcatggagacttatggttttagtatccagcacaccactttaccatgcttgcaagtgggtaatcaacaaagaccaaattatctgcctatggaggtttgcaagatagttgaaggacagcgttactcaaagcgactcaatgagaaacaaatcactgctctactgaaagtgacctgccagcgccctcaagagcgcgagctggacatcttacagactgtgcatcacaatgcatactatgaagacccctatgcactggaatttggtataagaattgatgaacgtcttgctgcagttgaagctcgtgttctgccaccaccaagacttaaataccatgatagtggccgagagaaggatgttttgcccagagttggccaatggaacatgatgaataagaaaatggttaatggtggcagagtgagcaactgggcatgtattaacttctctcggaatgtgcaagatagtgccgctaggggtttctctcatgagttggcagtcatgtgccaaatatcaggaatggattttgctcttgagcctgtgctgcctccagtgactgcaaggccagaacatgttgagagagcgttaaaggcacgttatcaagatgcaatgaacatactgaggccacagggaagggaacttgatctgctgatcgtaatactgcctgacaacaatggttctctttatggggatctcaaaaggatctgtgagactgaactcggattggtctcccagtgttgtctgactaaacatgtttttaagatgagcaagcagtaccttgcaaatgttgcactcaaaataaatgttaaggttgggggaaggaatactgtacttttagatgctttgtcaaggagaatcccccttgtcagtgacagaccgaccataatatttggtgctgatgttacccatccacatcctggagaagattccagtccttccattgcagccgttgttgcttcgcaagactggcccgaggtcacgaaatacgctggactagtgagtgcgcaagcccatcgccaggagctgatacaggatcttttcaaagtatggcaggacccgcagagaaggacgggaacttctcatttctttcaagagggcaactggacagaagccccagaggatcatattctacagggatggtgtcagtgagggacagttctatcaagtattgctgtacgaacttgatgccattagaaaggcctgtgcgtccctggagcccaactaccagcctccagttacttttgtcgtggtacagaagcgccatcacactaggctgtttgcgaacaaccacagtgatcagcgcacagtcgatagaagcggaaacatactgcctggcaccgtggtcgattcgaagatttgccatcctactgagtttgacttctacctgtgtagccatgctggcattcagggaacgagccgccctgctcactaccatgtcctgtgggacgagaacaagttcacagctgacgagctgcagaccctgacgaacaacctgtgctacacgtacgctaggtgcacccgctccgtgtccatcgtgcccccggcgtactacgctcatctggcagccttccgagctcgcttctacatggagccagacacctctgacagcgggtcactggccagcggtgcccgtggccccccacccggtgcggcacgcagcagcacgagaggggccgggagtgtcgaggtcaggcccctacctgctctcaaggagaacgtgaagcgtgtcatgttttactgctgagacgctggtgggctgccttcgccaaggaaaatgccctggagcattcccatgtacccgcactgtttcggtgatacagtactatctaacgccgattttgcgcgttaagacttccagtgatctgggaaatttcttgtacgactgttgtagtgttgtgtattcgtaatgtgatgacgcggcagttcttctaggagcttagtgccgtgtaaaatatctgttgtaagttgtaacctgtcaccctctagtgttatgtcatgatgaaccaaattatttgttgtcattccatgtacttcgccaagtatttgttgtcacgatgttctaggatgattttttttttttataa

SEQ ID NO: 14944 - DNA, 1904 bp, Zea Mays
attttcagggaggcagcaagagctgcagctggtgtagctttcgccatggttaaagactacgaattgttataaggtaggcacacgcatcactggaaatcgcgtggcccatctccacttgtgaaggcaatgccggtatagtaaccgttttccttctgaaagacagatcacgccaatacatgtatgggttatttttctttacaaaaaggaaggctctcgtcaactattatcactactaacagcatcttgtactttataatcttgttgtgccattgtttgttcactgtaaacgcgacagcgatgtcctgcaaaaaactgtcgagtgtcgacaaactgacaggttgtgacctgtttctcttcctggcgaaaatgtactttattttgtatgtgcgtgcggttggcgagacctcgagagcacgcgcgtgcttgcatagaaacatatatgcgcatggcggcatgggcgttggagaagggactgccggacagcgagagagatcccaccggttgcattattcagcagcgtgggagcgcgtgacgggggcagcggctaccgagggaactacttcctgtctctgctcgattcgaagaacgtgacgccagagatgttcgaggacgacgtcgtcgttcttcccgcggcgtcaccgtctcgcgactacctcggagtcggaggaggggcggccgccgccgccagcaacatggccggcccagccgccgcctatggcctcctcgacccgtactactctcctgttgttgccagccgtgctcctccagtcgaccatgagacggcgagctcgccactcgtgtactcgggggacggtgtggtgcgcgggaccagcatgccatgctacgacgacgaccacgaggagaaacggccaactggtggcaggcagccgcagggttttggagctcccgcggccgcgtttctgcaggaaatgatgatcccgagccgagtggagacgaagctccagagtggcctgggttatttaggcatggtgtctcaaagtcgactcgagacctcctttggcgtcgtggggagcttgccggatgctgctggttctttcagtgacgagtacaacagcaacaggtcaagtgcggacttcatgtccagcaacagcgacagactggagcagcgggtgggcggtagcagcagtggaagaggagctgccacgaggaggaaatcagatggagggcttggaggaaacacgaagaaatctaagcaggaggcttcccccaagcagcctcaagcgcccagagtgaagataggagagaagatcacagctttgcagcaaatcgtgtcacctttcgggaagactgatacatcatcggtgctgtttgaaacgatcgagtacataaaatttcttcatgagcagatccggatgtttagtgaaccgtacatgacgaaaagcacgtacaagggtcacattggactcagaggcgaagaggaggaaagcgggacggggcatgatttgaggggcagggggctctgcctggtccctgtttcgctgacctcgcaagcataccaggatgacaccctgccggactgctgggcgcccgcgtacaggggctgcctgtaccgatgagctcggcatggcgacgactgcatggttaagattcagctaggatctgcaacggctagtcgttggaaactcagaatgatgtgcttgtttctccttgttttattgtcctctactgtagtacttcctttagtagatttccagtgtagcccggaacaacaagaatgtataggcagcaaatcaggccttggctctcagaaaagccagtagcagtagcagaggtcaggcagtcagatgacgatttgccgacacagctcacagcccataattccaaacgttctcggtcacagcggtcacatataggcgtatattgaaagtgttcctaaaggaaat

SEQ ID NO: 14945 - DNA, 613 bp, Zea Mays
gagctgcagctggtgtagctttcgccatgagctgagagctccaagataaaaggctctccagttgcgacggggtgtccagacactcctttccttgtatcctctgatccacatcctacgtgctacagtctagaagcacttgattgcagccttgaaacttccctggcgcaccaacgcgacgccatggccgcaatggttaaagactacgaattgttataaggtaggcacacgcatcactggaaatcgcgtggcccatctccacttgtgaaggcaatgccggtatagtaaccgttttccttctgaaagacagatcacgccaatacatgtatgggttatttttctttacaaaaaggaaggctctcgtcaactattatcactactaacagcatcttgtactttataatcttgttgtgccattgtttgttcactgtaaacgcgacagcgatgtcctgcaaaaaactgtcgagtgtcgacaaactgacaggttgtgacctgtttctcttcctggcgaaaatgtactttattttgtatgtgcgtgcggttggcgagacctcgagagcacgcgcgtgcttgcatagaaacatatatgcgcatggcggcatgggcgttggagaag

SEQ ID NO: 14946 - DNA, 2002 bp, Zea Mays
gctttcgccatgagctgagagctccaagataaaaggctctccagttgcgacggggtgtccagacactcctttccttgtatcctctgatccacatcctacgtgctacagtctagaagcacttgattgcagccttgaaacttccctggcgcaccaacgcgacgccatggccgcaatggtaaggtctttgtacctgtgcagactgcagaccgcagtcttttccacattttgctcaaaccaaatgtcagcgtgtcgtgccacattggactcacttggatccatgaacttgacatgtctctttgggttcaagaacttgacaggactgcaacgtagcagcaggcactgcactggcacagctagttccgtagtatatttcatggcccaagaagcacacgaagctccagtagtcggtggcagtcgcagcagctcctccccttcacgagacaccggcatgtgggagtctcctcggcagacgcaagcgcacacgcccttcccctcctggatcccctacgccggcacgttcgccgccggggtcggcatggtggcagcggcagactcgagcctgccgagcgagcgcggccccggccccgactgtgcctggaaccagagcgcccccagcgtgggagcgcgtgacgggggcagcggctaccgagggaactacttcctgtctctgctcgattcgaagaacgtgacgccagagatgttcgaggacgacgtcgtcgttcttcccgcggcgtcaccgtctcgcgactacctcggagtcggaggaggggcggccgccgccgccagcaacatggccggcccagccgccgcctatggcctcctcgacccgtactactctcctgttgttgccagccgtgctcctccagtcgaccatgagacggcgagctcgccactcgtgtactcgggggacggtgtggtgcgcgggaccagcatgccatgctacgacgacgaccacgaggagaaacggccaactggtggcaggcagccgcagggttttggagctcccgcggccgcgtttctgcaggaaatgatgatcccgagccgagtggagacgaagctccagagtggcctgggttatttaggcatggtgtctcaaagtcgactcgagacctcctttggcgtcgtggggagcttgccggatgctgctggttctttcagtgacgagtacaacagcaacaggtcaagtgcggacttcatgtccagcaacagcgacagactggagcagcgggtgggcggtagcagcagtggaagaggagctgccacgaggaggaaatcagatggagggcttggaggaaacacgaagaaatctaagcaggaggcttcccccaagcagcctcaagcgcccagagtgaagataggagagaagatcacagctttgcagcaaatcgtgtcacctttcgggaagactgatacatcatcggtgctgtttgaaacgatcgagtacataaaatttcttcatgagcagatccggatgtttagtgaaccgtacatgacgaaaagcacgtacaagggtcacattggactcagaggcgaagaggaggaaagcgggacggggcatgatttgaggggcagggggctctgcctggtccctgtttcgctgacctcgcaagcataccaggatgacaccctgccggactgctgggcgcccgcgtacaggggctgcctgtaccgatgagctcggcatggcgacgactgcatggttaagattcagctaggatctgcaacggctagtcgttggaaactcagaatgatgtgcttgtttctccttgttttattgtcctctactgtagtacttcctttagtagatttccagtgtagcccggaacaacaagaatgtataggcagcaaatcaggccttggctctcagaaaagccagtagcagtagcagaggtcaggcagtcagatgacgatttgccgacacagctcacagcccataattccaaacgttctcggtcacagcggtcacatataggcgtatattgaaagtgttcctaaaggaaat

SEQ ID NO: 14947 - DNA, 1897 bp, Zea Mays
tccagttgcgacggggtgtccagacactcctttccttgtatcctctgatccacatcctacgtgctacagtctagaagcacttgattgcagccttgaaacttccctggcgcaccaacgcgacgccatggccgcaatggtaaggtctttgtacctgtgcagactgcagaccgcagtcttttccacattttgctcaaaccaaatgtcagcgtgtcgtgccacattggactcacttggatccatgaacttgacatgtctctttgggttcaagaacttgacaggactgcaacgtagcagcaggcactgcactggcacagctagttccgtagtatatttcatggcccaagaagcacacgaagctccagtagtcggtggcagtcgcagcagctcctccccttcacgagacaccggcatgtgggagtctcctcggcagacgcaagcgcacacgcccttcccctcctggatcccctacgccggcacgttcgccgccggggtcggcatggtggcagcggcagactcgagcctgccgagcgagcgcggccccggccccgactgtgcctggaaccagagcgcccccagcgtgggagcgcgtgacgggggcagcggctaccgagggaactacttcctgtctctgctcgattcgaagaacgtgacgccagagatgttcgaggacgacgtcgtcgttcttcccgcggcgtcaccgtctcgcgactacctcggagtcggaggaggggcggccgccgccgccagcaacatggccggcccagccgccgcctatggcctcctcgacccgtactactctcctgttgttgccagccgtgctcctccagtcgaccatgagacggcgagctcgccactcgtgtactcgggggacggtgtggtgcgcgggaccagcatgccatgctacgacgacgaccacgaggagaaacggccaactggtggcaggcagccgcagggttttggagctcccgcggccgcgtttctgcaggaaatgatgatcccgagccgagtggagacgaagctccagagtggcctgggttatttaggcatggtgtctcaaagtcgactcgagacctcctttggcgtcgtggggagcttgccggatgctgctggttctttcagtgacgagtacaacagcaacaggtcaagtgcggacttcatgtccagcaacagcgacagactggagcagcgggtgggcggtagcagcagtggaagaggagctgccacgaggaggaaatcagatggagggcttggaggaaacacgaagaaatctaagcaggaggcttcccccaagcagcctcaagcgcccagagtgaagataggagagaagatcacagctttgcagcaaatcgtgtcacctttcgggaagatgtttagtgaaccgtacatgacgaaaagcacgtacaagggtcacattggactcagaggcgaagaggaggaaagcgggacggggcatgatttgaggggcagggggctctgcctggtccctgtttcgctgacctcgcaagcataccaggatgacaccctgccggactgctgggcgcccgcgtacaggggctgcctgtaccgatgagctcggcatggcgacgactgcatggttaagattcagctaggatctgcaacggctagtcgttggaaactcagaatgatgtgcttgtttctccttgttttattgtcctctactgtagtacttcctttagtagatttccagtgtagcccggaacaacaagaatgtataggcagcaaatcaggccttggctctcagaaaagccagtagcagtagcagaggtcaggcagtcagatgacgatttgccgacacagctcacagcccataattccaaacgttctcggtcacagcggtcacatataggcgtatattgaaagtgttcctaaaggaaat

SEQ ID NO: 14948 - DNA, 2442 bp, Zea Mays
agaaaatatagaaagagaaaacagttgaaacctccatacctgagtattgacgggtcggtggatgtggctcacgcctcggcgacttcagccggcggccaggggcgttagacggcggcactgtacgtggtccgcagctgagcaattggcagatgtagtgataagctgatccgtcgtctcccgtcttcccgacccgggtcccgcctcgcccgtcgccgccagatccgacgcgctggatcgccagcggcctgctgctgtcgatccgacgtgcggcagtctgctcttcctgccgtttccctgcgcttggggtccataatagcacgcatctggccggctcaagagcatagtggatctgaccggaggaggccgctgctgctgcttctccctcaccgatggcgagggttcgggacaggacggaggacttcaaagaggctgtccgagtcgccgcactctcccatggatacacggaggcccaattggccgcgctcatgtcttctttcatcatccggaagccgtcgcccaagtcaccgttcactaatgccgcaatcaagacgagcatcagggaactcgagaggttcatagtgaagcataggagggattatgtggatctgcatcgctctaccgagcaagagagggataacattgagcatgaagttggtgtttttgtaaaagcatgcaaggaacagattgatatcttaaagaacaggatccacaaagaagagaagaatggaagtggaaagacatggcttggcactagggatgagagttcacgggtggacttgatagctcatcagcatggtgtggtatggttattctccctgccattgctgtaagtttaagattttctgcttgattaatttattgttccagggagcacatgataattaaatagttcgcagtagaactgacccgattttgttccatttagaggatgaggcaaagtaattccttagagcaactccaaaagtttctttatattcttccataatgataggagtatatattttggtgaaaaacttcccctccaacagctacttcaactggaactcaaaaaattgcaatccttattttttatttcttgctctccaaagatagagagtaaaggtacctttccagactccagagtgctgaacaagacatagagaagttgtttagagggtggagatatatagagtgatttttattggaatgactctctaaataaaaaataagagagtaagtttaagaaagactgttgaagatgctcttacgttacctgttacgatgctacatgtattatgagcaaagatctccttttattagagccaattgaacaggtggtcctgttgaggattgatgttttcaacattttctttccaagtttttaagtaagttgggtgtatatttcactagctggtagtaggatatcagaacccaattgcttgatttcatttggtaagatgaaaaatatgctgtgtgatttttagaggacagaatagattacccagtcgaaacaagtgaacttgaataatatctactttcatttttttcggggcttcatcaggtaacagcatttacaggcaaacgcttacctccatttgtctttattgttttgtttttctctatatccaaatcttagtggcagtcagtcatcagttctaaagtctgaactacgttgttttgcagtagttttaggggtttccttgtgcccagctccagtaagctgtttgttttgtgccaactttattaggttctaattttgagtgagcgtctacactcggtaactgcacaatttgatcatcttcggtccattcgttttcaagatgctattaacagagcaatgccaaggaagaagattcagaagagaccagaaatcaaacctgctgaaccatccaagtccaatcttgttctaaaatctgatgtatcaaaggttgtagaccatgaagtatctacaacacctatgagagttcaagaacagctattggacgatgaaacaaaagccctccaggtggagttgacaagtcttcttgatgctgtccaagaaacagagacaaagatgatagaaatgtcagcacttaatcatcttatgtcaacacatgttctacaacaagcgcaacaaattcagtatttatatgatcaggctgttgaagctacgaataatgtggagcgtgggaacaaggagctatcccaggcaatccagcgcaacagcagcagtagaacctttctcctactcttcttctttgttcttactttctcgattctttttcttgactggtacaacaactgaattagtctataaagacgtcgtattgttttgctcatgcgaaatgatcaaattatgaaagctgtctatttaaagtgctgatcttttacgtactatgttacttcccaagcatactgtcctatgtgttgttcatctcaatgcgccgggatttgtcattttatctgaaacttgttgagcaattg

SEQ ID NO: 14949 - DNA, 2448 bp, Zea Mays
agaaaatatagaaagagaaaacagttgaaacctccatacctgagtattgacgggtcggtggatgtggctcacgcctcggcgacttcagccggcggccaggggcgttagacggcggcactgtacgtggtccgcagctgagcaattggcagatgtagtgataagctgatccgtcgtctcccgtcttcccgacccgggtcccgcctcgcccgtcgccgccagatccgacgcgctggatcgccagcggcctgctgctgtcgatccgacgtgcggcagtctgctcttcctgccgtttccctgcgcttggggtccataatagcacgcatctggccggctcaagagcatagtggatctgaccggaggaggccgctgctgctgcttctccctcaccgatggcgagggttcgggacaggacggaggacttcaaagaggctgtccgagtcgccgcactctcccatggatacacggaggcccaattggccgcgctcatgtcttctttcatcatccggaagccgtcgcccaagtcaccgttcactaatgccgcaatcaagacgcttcagagcatcagggaactcgagaggttcatagtgaagcataggagggattatgtggatctgcatcgctctaccgagcaagagagggataacattgagcatgaagttggtgtttttgtaaaagcatgcaaggaacagattgatatcttaaagaacaggatccacaaagaagagaagaatggaagtggaaagacatggcttggcactagggatgagagttcacgggtggacttgatagctcatcagcatggtgtggtatggttattctccctgccattgctgtaagtttaagattttctgcttgattaatttattgttccagggagcacatgataattaaatagttcgcagtagaactgacccgattttgttccatttagaggatgaggcaaagtaattccttagagcaactccaaaagtttctttatattcttccataatgataggagtatatattttggtgaaaaacttcccctccaacagctacttcaactggaactcaaaaaattgcaatccttattttttatttcttgctctccaaagatagagagtaaaggtacctttccagactccagagtgctgaacaagacatagagaagttgtttagagggtggagatatatagagtgatttttattggaatgactctctaaataaaaaataagagagtaagtttaagaaagactgttgaagatgctcttacgttacctgttacgatgctacatgtattatgagcaaagatctccttttattagagccaattgaacaggtggtcctgttgaggattgatgttttcaacattttctttccaagtttttaagtaagttgggtgtatatttcactagctggtagtaggatatcagaacccaattgcttgatttcatttggtaagatgaaaaatatgctgtgtgatttttagaggacagaatagattacccagtcgaaacaagtgaacttgaataatatctactttcatttttttcggggcttcatcaggtaacagcatttacaggcaaacgcttacctccatttgtctttattgttttgtttttctctatatccaaatcttagtggcagtcagtcatcagttctaaagtctgaactacgttgttttgcagtagttttaggggtttccttgtgcccagctccagtaagctgtttgttttgtgccaactttattaggttctaattttgagtgagcgtctacactcggtaactgcacaatttgatcatcttcggtccattcgttttcaagatgctattaacagagcaatgccaaggaagaagattcagaagagaccagaaatcaaacctgctgaaccatccaagtccaatcttgttctaaaatctgatgtatcaaaggttgtagaccatgaagtatctacaacacctatgagagttcaagaacagctattggacgatgaaacaaaagccctccaggtggagttgacaagtcttcttgatgctgtccaagaaacagagacaaagatgatagaaatgtcagcacttaatcatcttatgtcaacacatgttctacaacaagcgcaacaaattcagtatttatatgatcaggctgttgaagctacgaataatgtggagcgtgggaacaaggagctatcccaggcaatccagcgcaacagcagcagtagaacctttctcctactcttcttctttgttcttactttctcgattctttttcttgactggtacaacaactgaattagtctataaagacgtcgtattgttttgctcatgcgaaatgatcaaattatgaaagctgtctatttaaagtgctgatcttttacgtactatgttacttcccaagcatactgtcctatgtgttgttcatctcaatgcgccgggatttgtcattttatctgaaacttgttgagcaattg

SEQ ID NO: 14950 - DNA, 1475 bp, Zea Mays
agaaaatatagaaagagaaaacagttgaaacctccatacctgagtattgacgggtcggtggatgtggctcacgcctcggcgacttcagccggcggccaggggcgttagacggcggcactgtacgtggtccgcagctgagcaattggcagatgtagtgataagctgatccgtcgtctcccgtcttcccgacccgggtcccgcctcgcccgtcgccgccagatccgacgcgctggatcgccagcggcctgctgctgtcgatccgacgtgcggcagtctgctcttcctgccgtttccctgcgcttggggtccataatagcacgcatctggccggctcaagagcatagtggatctgaccggaggaggccgctgctgctgcttctccctcaccgatggcgagggttcgggacaggacggaggacttcaaagaggctgtccgagtcgccgcactctcccatggatacacggaggcccaattggccgcgctcatgtcttctttcatcatccggaagccgtcgcccaagtcaccgttcactaatgccgcaatcaagacgcttcagagcatcagggaactcgagaggttcatagtgaagcataggagggattatgtggatctgcatcgctctaccgagcaagagagggataacattgagcatgaagttggtgtttttgtaaaagcatgcaaggaacagattgatatcttaaagaacaggatccacaaagaagagaagaatggaagtggaaagacatggcttggcactagggatgagagttcacgggtggacttgatagctcatcagcatggtgtggtatggttattctccctgccattgctatgctattaacagagcaatgccaaggaagaagattcagaagagaccagaaatcaaacctgctgaaccatccaagtccaatcttgttctaaaatctgatgtatcaaaggttgtagaccatgaagtatctacaacacctatgagagttcaagaacagctattggacgatgaaacaaaagccctccaggtggagttgacaagtcttcttgatgctgtccaagaaacagagacaaagatgatagaaatgtcagcacttaatcatcttatgtcaacacatgttctacaacaagcgcaacaaattcagtatttatatgatcaggctgttgaagctacgaataatgtggagcgtgggaacaaggagctatcccaggcaatccagcgcaacagcagcagtagaacctttctcctactcttcttctttgttcttactttctcgattctttttcttgactggtacaacaactgaattagtctataaagacgtcgtattgttttgctcatgcgaaatgatcaaattatgaaagctgtctatttaaagtgctgatcttttacgtactatgttacttcccaagcatactgtcctatgtgttgttcatctcaatgcgccgggatttgtcattttatctgaaacttgttgagcaattg

SEQ ID NO: 14951 - DNA, 1548 bp, Zea Mays
agaaaatatagaaagagaaaacagttgaaacctccatacctgagtattgacgggtcggtggatgtggctcacgcctcggcgacttcagccggcggccaggggcgttagacggcggcactgtacgtggtccgcagctgagcaattggcagatgtagtgataagctgatccgtcgtctcccgtcttcccgacccgggtcccgcctcgcccgtcgccgccagatccgacgcgctggatcgccagcggcctgctgctgtcgatccgacgtgcggcagtctgctcttcctgccgtttccctgcgcttggggtccataatagcacgcatctggccggctcaagagcatagtggatctgaccggaggaggccgctgctgctgcttctccctcaccgatggcgagggttcgggacaggacggaggacttcaaagaggctgtccgagtcgccgcactctcccatggatacacggaggcccaattggccgcgctcatgtcttctttcatcatccggaagccgtcgcccaagtcaccgttcactaatgccgcaatcaagacgcttcagagcatcagggaactcgagaggttcatagtgaagcataggagggattatgtggatctgcatcgctctaccgagcaagagagggataacattgagcatgaagttggtgtttttgtaaaagcatgcaaggaacagattgatatcttaaagaacaggatccacaaagaagagaagaatggaagtggaaagacatggcttggcactagggatgagagttcacgggtggacttgatagctcatcagcatggtgtggtatggttattctccctgccattgctgttctaattttgagtgagcgtctacactcggtaactgcacaatttgatcatcttcggtccattcgttttcaagatgctattaacagagcaatgccaaggaagaagattcagaagagaccagaaatcaaacctgctgaaccatccaagtccaatcttgttctaaaatctgatgtatcaaaggttgtagaccatgaagtatctacaacacctatgagagttcaagaacagctattggacgatgaaacaaaagccctccaggtggagttgacaagtcttcttgatgctgtccaagaaacagagacaaagatgatagaaatgtcagcacttaatcatcttatgtcaacacatgttctacaacaagcgcaacaaattcagtatttatatgatcaggctgttgaagctacgaataatgtggagcgtgggaacaaggagctatcccaggcaatccagcgcaacagcagcagtagaacctttctcctactcttcttctttgttcttactttctcgattctttttcttgactggtacaacaactgaattagtctataaagacgtcgtattgttttgctcatgcgaaatgatcaaattatgaaagctgtctatttaaagtgctgatcttttacgtactatgttacttcccaagcatactgtcctatgtgttgttcatctcaatgcgccgggatttgtcattttatctgaaacttgttgagcaattg

SEQ ID NO: 14952 - DNA, 1449 bp, Zea Mays
agaaaatatagaaagagaaaacagttgaaacctccatacctgagtattgacgggtcggtggatgtggctcacgcctcggcgacttcagccggcggccaggggcgttagacggcggcactgtacgtggtccgcagctgagcaattggcagatgtagtgataagctgatccgtcgtctcccgtcttcccgacccgggtcccgcctcgcccgtcgccgccagatccgacgcgctggatcgccagcggcctgctgctgtcgatccgacgtgcggcagtctgctcttcctgccgtttccctgcgcttggggtccataatagcacgcatctggccggctcaagagcatagtggatctgaccggaggaggccgctgctgctgcttctccctcaccgatggcgagggttcgggacaggacggaggacttcaaagaggctgtccgagtcgccgcactctcccatggatacacggaggcccaattggccgcgctcatgtcttctttcatcatccggaagccgtcgcccaagtcaccgttcactaatgccgcaatcaagacgcttcagagcatcagggaactcgagaggttcatagtgaagcataggagggattatgtggatctgcatcgctctaccgagcaagagagggataacattgagcatgaagttggtgtttttgtaaaagcatgcaaggaacagattgatatcttaaagaacaggatccacaaagaagagaagaatggaagtggaaagacatggcttggcactagggatgagagttcacgggtggacttgatagctcatcagcatggtgtgatgctattaacagagcaatgccaaggaagaagattcagaagagaccagaaatcaaacctgctgaaccatccaagtccaatcttgttctaaaatctgatgtatcaaaggttgtagaccatgaagtatctacaacacctatgagagttcaagaacagctattggacgatgaaacaaaagccctccaggtggagttgacaagtcttcttgatgctgtccaagaaacagagacaaagatgatagaaatgtcagcacttaatcatcttatgtcaacacatgttctacaacaagcgcaacaaattcagtatttatatgatcaggctgttgaagctacgaataatgtggagcgtgggaacaaggagctatcccaggcaatccagcgcaacagcagcagtagaacctttctcctactcttcttctttgttcttactttctcgattctttttcttgactggtacaacaactgaattagtctataaagacgtcgtattgttttgctcatgcgaaatgatcaaattatgaaagctgtctatttaaagtgctgatcttttacgtactatgttacttcccaagcatactgtcctatgtgttgttcatctcaatgcgccgggatttgtcattttatctgaaacttgttgagcaattg

SEQ ID NO: 14953 - DNA, 1443 bp, Zea Mays
agaaaatatagaaagagaaaacagttgaaacctccatacctgagtattgacgggtcggtggatgtggctcacgcctcggcgacttcagccggcggccaggggcgttagacggcggcactgtacgtggtccgcagctgagcaattggcagatgtagtgataagctgatccgtcgtctcccgtcttcccgacccgggtcccgcctcgcccgtcgccgccagatccgacgcgctggatcgccagcggcctgctgctgtcgatccgacgtgcggcagtctgctcttcctgccgtttccctgcgcttggggtccataatagcacgcatctggccggctcaagagcatagtggatctgaccggaggaggccgctgctgctgcttctccctcaccgatggcgagggttcgggacaggacggaggacttcaaagaggctgtccgagtcgccgcactctcccatggatacacggaggcccaattggccgcgctcatgtcttctttcatcatccggaagccgtcgcccaagtcaccgttcactaatgccgcaatcaagacgagcatcagggaactcgagaggttcatagtgaagcataggagggattatgtggatctgcatcgctctaccgagcaagagagggataacattgagcatgaagttggtgtttttgtaaaagcatgcaaggaacagattgatatcttaaagaacaggatccacaaagaagagaagaatggaagtggaaagacatggcttggcactagggatgagagttcacgggtggacttgatagctcatcagcatggtgtgatgctattaacagagcaatgccaaggaagaagattcagaagagaccagaaatcaaacctgctgaaccatccaagtccaatcttgttctaaaatctgatgtatcaaaggttgtagaccatgaagtatctacaacacctatgagagttcaagaacagctattggacgatgaaacaaaagccctccaggtggagttgacaagtcttcttgatgctgtccaagaaacagagacaaagatgatagaaatgtcagcacttaatcatcttatgtcaacacatgttctacaacaagcgcaacaaattcagtatttatatgatcaggctgttgaagctacgaataatgtggagcgtgggaacaaggagctatcccaggcaatccagcgcaacagcagcagtagaacctttctcctactcttcttctttgttcttactttctcgattctttttcttgactggtacaacaactgaattagtctataaagacgtcgtattgttttgctcatgcgaaatgatcaaattatgaaagctgtctatttaaagtgctgatcttttacgtactatgttacttcccaagcatactgtcctatgtgttgttcatctcaatgcgccgggatttgtcattttatctgaaacttgttgagcaattg

SEQ ID NO: 14954 - DNA, 655 bp, Zea Mays
tatggttattctccctgccattgctagcaatgccaaggaagaagattcagaagagaccagaaatcaaacctgctgaaccatccaagtccaatcttgttctaaaatctgatgtatcaaaggttgtagaccatgaagtatctacaacacctatgagagttcaagaacagctattggacgatgaaacaaaagccctccaggtggagttgacaagtcttcttgatgctgtccaagaaacagagacaaagatgatagaaatgtcagcacttaatcatcttatgtcaacacatgttctacaacaagcgcaacaaattcagtatttatatgatcaggctgttgaagctacgaataatgtggagcgtgggaacaaggagctatcccaggcaatccagcgcaacagcagcagtagaacctttctcctactcttcttctttgttcttactttctcgattctttttcttgactggtacaacaactgaattagtctataaagacgtcgtattgttttgctcatgcgaaatgatcaaattatgaaagctgtctatttaaagtgctgatcttttacgtactatgttacttcccaagcatactgtcctatgtgttgttcatctcaatgcgccgggatttgtcattttatctgaaacttgttgagcaattg

SEQ ID NO: 14955 - DNA, 2161 bp, Zea Mays
ccggtcccttctttttatatcacagcgccaagggagagctagcgcaagagacagaggaacccaggacaggagaagaggggagggcggcagaccgcagtccaccggccagacagacaggggtgaggcgccgtcgaccgaccgagcgttccgctgctgcttccatggggaactgcctcggctcggacgaggccgccgaactggaggtcgtgaagaactcgggccagccacaagcagctacggcagctccagccatggcgccgcataaatccgagggttcgatgagctcagggtcagggccctccagcagcagcaggtccgctggctcgtccatgagcagcatcgccacgacgaccggtcgaagcggcggcagcaccagcaccagcagcggatcgaggcccctccgcgccgccgccgccgcctcgtaccgggaggaagaagaggaggaggaggaagagaaggaggggaggatcctggaggcgcccaacctccgcatcttcaccttcgcggagctgagggccgcgacgcgcaacttcaggcccgacacggtgctcggcgagggaggcttcgggcgggtgtacaagggctgggtcgacgagaggaccatgaacccgacgcgctccggcatcggcatggtcgtcgccgtcaagaagctcaaccaagagagcgtgcagggccttcaggagtggcagtccgaggtcaactttctggggaggctgtcgcatccgaacctggtgaggctgctgggctactgcgtggaggacagggagctcctgctcgtgtacgagtacatgcccaaaggcagcctggagaatcatctcttcagaagtgagtcgtcctctgcctctttggaatgtccatcttcttttttgtctccttccttcctcgcaagtacacaccgactgatttgataaagactgggttagctttgttcaaagctacagtacgcatgcttttttagcttctccctttttctctgtccccttcctttttatcgagatgcatgtcgcaatggaacatctcagtgtgtgtatatatgccccttttagtaccggactaggactttagcttgtttcatgaaagaagtgtagacgggtagaagaataacacgaggacctcttgcgactgatcagagggcggctccttcgaaccaatctcctggaaccttcggctgcgcatcgccattggcgcggcgcgtggcctggccttcctccactcgtccgaaaagcaggtcatctaccgagacttcaaggcctcgaacatcctcctcgacacgaattacaacgccaagctgtccgacttcggtctcgccaagaatggcccgaccggcggcgacagccacgtcaccacccgtgtgatgggcacgtacggctacgctgcgccggagtacgtcgccacagggcacctgtacgtgaagagcgacgtgtacggcttcggcgtggtgctgctggagatgctcacgggcctgcgggcgctggacacggcccgccccgcgcagcagcacaacctggtggagtgggccaagccgtacctggcggaccggcggaagctgccgcgcctcgtggacccgcggctcgaggggcagtacccgtccaaggcggcgctgcaggcggcccagctcacgctgcgctgcctcgagggggaccccaggagccgcccctccatggcggaggtcgtgctggccatcgaggcgatggagcagctcaggctactcactgtccaggaagaaattacatggactatttctgctggatcaggtcgattgtcagactggtcgattgtcagactgtcaagcccttgcgtcatgcgatctgaggaggatccaggcatcatcaggcgactcggctttgcctcttgctcgcttgcttccgtggacacgacgggtttcagtacatgtgcgcccccaaactcatcgcgacaacaatgcatcacgtcaccaagttcactcatcattggtgtggcggtgggtgcccagggcagttacacgtgcacggtgttcggagccgccgcggtgcgcagcgcagcacagtgcgcagccgcgccgcgccacgccggaagaggtccaggacaagggcaccgaaaaggcccacctgcctggcatagttcagtcctacagctcaccggtagctggcgccgcctggcaggggcggagccaggattatga

SEQ ID NO: 14956 - DNA, 1808 bp, Zea Mays
cagaggaacccaggacaggagaagaggggagggcggcagaccgcagtccaccggccagacagacaggggtgaggcgccgtcgaccgaccgagcgttccgctgctgcttccatggggaactgcctcggctcggacgaggccgccgaactggaggtcgtgaagaactcgggccagccacaagcagcagctacggcagctccagccatggcgccgcataaatccgagggttcgatgagctcagggtcagggccctccagcagcagcaggtccgctggctcgtccatgagcagcatcgccacgacgaccggtcgaagcggcggcagcaccagcaccagcagcggatcgaggcccctccgcgccgccgccgccgcctcgtaccgggaggaagaagaggaggaggaggaagagaaggaggggaggatcctggaggcgcccaacctccgcatcttcaccttcgcggagctgagggccgcgacgcgcaacttcaggcccgacacggtgctcggcgagggaggcttcgggcgggtgtacaagggctgggtcgacgagaggaccatgaacccgacgcgctccggcatcggcatggtcgtcgccgtcaagaagctcaaccaagagagcgtgcagggccttcaggagtggcagtccgaggtcaactttctggggaggctgtcgcatccgaacctggtgaggctgctgggctactgcgtggaggacagggagctcctgctcgtgtacgagtacatgcccaaaggcagcctggagaatcatctcttcagaaagggcggctccttcgaaccaatctcctggaaccttcggctgcgcatcgccattggcgcggcgcgtggcctggccttcctccactcgtccgaaaagcaggtcatctaccgagacttcaaggcctcgaacatcctcctcgacacgaattacaacgccaagctgtccgacttcggtctcgccaagaatggcccgaccggcggcgacagccacgtcaccacccgtgtgatgggcacgtacggctacgctgcgccggagtacgtcgccacagggcacctgtacgtgaagagcgacgtgtacggcttcggcgtggtgctgctggagatgctcacgggcctgcgggcgctggacacggcccgccccgcgcagcagcacaacctggtggagtgggccaagccgtacctggcggaccggcggaagctgccgcgcctcgtggacccgcggctcgaggggcagtacccgtccaaggcggcgctgcaggcggcccagctcacgctgcgctgcctcgagggggaccccaggagccgcccctccatggcggaggtcgtgctggccatcgaggcgatggagcagctcaggctactcactgtccaggaagaaattacatggactatttctgctggatcaggtcgattgtcagactggtcgattgtcagactgtcaagcccttgcgtcatgcgatctgaggaggatccaggcatcatcaggcgactcggctttgcctcttgctcgcttgcttccgtggacacgacgggtttcagtacatgtgcgcccccaaactcatcgcgacaacaatgcatcacgtcaccaagttcactcatcattggtgtggcggtgggtgcccagggcagttacacgtgcacggtgttcggagccgccgcggtgcgcagcgcagcacagtgcgcagccgcgccgcgccacgccggaagaggtccaggacaagggcaccgaaaaggcccacctgcctggcatagttcagtcctacagctcaccggtagctggcgccgcctggcaggggcggagccaggattatga

SEQ ID NO: 14957 - DNA, 3795 bp, Zea Mays
aaaaaagtccacacctccccagtccccacacgctagtctgtgctgtgcgggtgcccctcccgcgtcgcctccctccgcttcggcatttagcgctgccgcgagatatcgaggacgaaccggagacaggatggtcaccgtcgggcgccggcgcgggtttgtcaccttcgccgctgcggcgatcgctctgatgcagatcagttatctactgttcccgatcagtgcgcagcaatccaatggctcaagggttgtaccagcagaaggttactgttccatgtacggcatttgtgcacaacgaagtgacgggaaggtcttaaactgtgcaaatgcaaccaaagctgttaagccagacacattgttttcttcaaggatccaaagtttgtgcccaacaatcactggcgatgtctgttgtactgtagatcagtttgacacattacaccaacaagtccaacaggccgttccgtttcttgttggatgcccagcatgcttgaggaatttcttgaatctcttctgtgagatgtcttgttctccaaaccaaagcctcttcattaatgtgacttcagtaaagcagattaatagcactatgactgttgatggcatagattactatgtaactactaactacggtgaagagctatataactcatgcaaggatgttaagtttggcactctgaacacccgtgcaatggattttatcggtgctggtgctaaaacttacaaagattggttggcatttattgggcgacaagcaaaccttaatgagccagggtcaccttatttgataacatttggatcggattttagtgattcatctggtgtgaagcctctaaattctacaatttattcttgcggcgacccttctttgggttgttcatgtggtgattgcccttcttcttctgtttgcgcgggatccttgctgcctcagctgaatacagaaaccgcctgttcagttaaaatgggatctttaaaggccaaatgcttggacttctcactagtggttatttaccttgcactattatgcgcttttctgctatggggtttgttatacagaacacgaggaagaactgcttcccccttgcaagcaaagccattgaggaattcagataataagtcgaacatgaacaaaaatggcaagagccctcatgactcggttcaggtgcctgaagctgcatcctctactgccaaaccatccaatccttctatcgttcaaacttacatgtcaattttctttaggaagcatggaatttttgttgctagacaccctctccgtgtgttatgtgtgtcattgcttgtccctgtcctcttatgcattggtctctttcgcctcaaggttgaaacccgaccagaaaagctttgggttagccctggaagtgaagctgctaatgagaagaattattttgacagccatcttgcaccattttataggattgagcagcttgtgttggccacttctgcatctggtgggtccgaagctccttcaatagtaaatgacaacaatatgaaattactatttgagattcagaaaaaggttgatgatctacgtgcaaattattctgggtctaaagtagccctcgctgacatttgcttaaagccactcagtacagactgtgctactcaaagtgtcttgcagtatttccagctggatcctaaaaagtttgatgattctggaatagaccatgctaaattctgttttcagcattacacttctgaagagacatgtttgagcacttttcagtcacctgttgatccaagtacaattttaggtggttttccaggaagcaattttaccgaggcttcggcatttgtaataacttatcctgtgaacaacaaggttcaaacaacaggaaaagagaacgggaaggccatggcttgggaaagggcttttattaatcttgttaaggaagaaatacgtccaatggtattagcacagaatctaacgttgtccttttcgtccgagagctctatccaagatgaattaaacagagaaagtacagctgatgcaattacaataatgattagctatattgtgatgtttgcatatatatcattcacacttggagaccgtccttctcgttggctgttactatttgtttcatcaaaggtcctgcttggtttgtctggtgttgttctggtgatgctttcagttttaggatcaatgggattctttagtgctattggagtgaagtccacccttattattatggaagtgattccttttcttgtgcttgctgtcggtgtcgataacatgtgtatccttgtgcatgctgtcaaacgccaaccagatcagtcaaatttggaagagcggataagtgatgcactggtggaagttgggccatctattacattagccagttttgctgaagtactagcttttgctgtgagtgcaatcaatccaatgcctgcaaccagagtgttttccatgtttgctgcactggcggtcttcatggatttccttctgcaagtgacagcctttgtagcccttattgtatttgacattaggagggcacaggatggcagaattgattgtgttccttgtgcgagaatcacaccaagtacaggtgctggtgatggtggcgatgggcagaggcttcacttgcttgctagatatatgagggacgttcatggacgaattctcaggaaccgagcggtgaagttcgttgtaatcactgtatttgtaggattgacatttgcaagcatagcattatctactagactgcaaccaggattggagcagcaaattgttctgccacgaaattcctatttacaggattattttgatgaccttgcaaagtacatgaaagtaggtccaccattatactttgttgtgaaggacttcaattacagctctgcgtcggtggatacaaatcaaatatgttcaatcagccagtgtaattcaaattctcttttgaatgagatatcacgacaatcattatcccctgagactagttacattgctaaacctgctgcttcatggcttgatgacttcctaatttggatgtcccctgaagcatttggatgctgtagaaaatttgtgaatggaagttactgccctccagacgatcagcctccatgctgccaactcgatcaggtttcaggctcttgcatgacaagcaaaacctgcagtaactgtacaacgtgcttcctacactcagacttggataatgggcgtccatccacaacccaattcagagataaacttccatggtttcttgacgcacttccatcgagtgattgttctaaagggggaaaaggagcttattcaacaagtttagacctcagtggttatgaaagtggcattatacaagcttcggcattccgaacataccatactccccttaacaagcagagtgactatgttaactcaatgagagctgcccgggacttcagttctaaaatgtccagagatttgcagatgaaaattttcccatattccgtgttctatatattttttgagcaatacctgagcgtgtggaagacagctatcatgaacatatgtgtttgccttggtaccatttttgttgtttgcttcatagttaccagcagtttatgggcttcagcaataattttaactgtgctagcaatgatagtcttggatatgatgggggtgatggccatccttggtattcagctcaatgcaatttctgttgtaaaccttgttatgtcgataggaattgctgtcgagttctgtgttcatatcacgcatgcctttatgtctgcataagttcccatagcaaggaacaggataattctaatgctacacaatccattcaaacagaactgcatagctgcttggttctg

SEQ ID NO: 14958 - DNA, 1651 bp, Zea Mays
atcagtgcgcagcaatccaatggctcaagggttgtaccagcagaaggttactgttccatgtacggcatttgtgcacaacgaagtgacgggaaggtcttaaactgtgcaaatgcaaccaaagctgttaagccagacacattgttttcttcaaggatccaaagtttgtgcccaacaatcactggcgatgtctgttgtactgtagatcagtttgacacattacaccaacaagtccaacaggccgttccgtttcttgttggatgcccagcatgcttgaggaatttcttgaatctcttctgtgagatgtcttgttctccaaaccaaagcctcttcattaatgtgacttcagtaaagcagattaatagcactatgactgttgatggcatagattactatgtaactactaactacggtgaagagctatataactcatgcaaggatgttaagtttggcactctgaacacccgtgcaatggattttatcggtgctggtgctaaaacttacaaagattggttggcatttattgggcgacaagcaaaccttaatgagccagggtcaccttatttgataacatttggatcggattttagtgattcatctggtgtgaagcctctaaattctacaatttattcttgcggcgacccttctttgggttgttcatgtggtgattgcccttcttcttctgtttgcgcgggatccttgctgcctcagctgaatacagaaaccgcctgttcagttaaaatgggatctttaaaggccaaatgcttggacttctcactagtggttatttaccttgcactattatgcgcttttctgctatggggtttgttatacagaacacgaggaagaactgcttcccccttgcaagcaaagccattgaggaattcagataataagtcgaacatgaacaaaaatggcaagagccctcatgactcggttcaggaagcatggaatttttgttgctagacaccctctccgtgtgttatgtgtgtcattgcttgtccctgtcctcttatgcattggtctctttcgcctcaaggttgaaacccgaccagaaaagctttgggttagccctggaagtgaagctgctaatgagaagaattattttgacagccatcttgcaccattttataggattgagcagcttgtgttggccacttctgcatctggtgggtccgaagctccttcaatagtaaatgacaacaatatgaaattactatttgagattcagaaaaaggttgatgatctacgtgcaaattattctgggtctaaagtagccctcgctgacatttgcttaaagccactcagtacagactgtgctactcaaagtgtcttgcagtatttccagctggatcctaaaaagtttgatgattctggaatagaccatgctaaattctgttttcagcattacacttctgaagagacatgtttgagcacttttcagtcacctgttgatccaagtacaattttaggtggttttccaggaagcaattttaccgaggcttcggcatttgtaataacttatcctgtgaacaacaaggttcaaacaacaggaaaagagaacgggaaggccatggcttgggaaagggcttttattaatcttgttaaggttggccatgctaattcagtttctcttgtcgttgcatgtgcttag

SEQ ID NO: 14959 - DNA, 2008 bp, Zea Mays
cgagctgtcccgcccgtccaacgcctcacgctgcggcacactagccgttgccctccttcgctttttctcctttcaaattcgctcccttccctttcccttccctctcacgctgcctcgccgcatctagctaggctgatatccctgctccaaagaacaaaccaaaaacaaaataaaacccgctctaaatctttccagtactccctctctatctctctcatccttcgaatcccaaggaggaggccagagaggagagagtgtgtgggacactgggactagactagagagacgttgccgttgctggttgttgttattaacgccgccccctgcattcctatgctcctcgttctcccggggctcctccgtccgtcggcttcggggacgatggcggcgagggcggctgatgagaacagaaggccgggggtggggaggcccgcgccatgcgtccgagacatggggagccggcgcgcgctcacggacatcaagaacctcgtcggggttgccccgaacccctgcgccgtcgccaagaagcccgtgctgcagaagagcagaagggacgaaaagaagacagcgttgccaagcagccggccgatgacaaggaaattcgtcgcctccttggcgagcaaagggcaacctgaatgtcagccgaccggagctgatccagaacccggagttgatcaacggaaggaaccaatcggcgatggcatcattgatatcgacgtggaactggacgagccggtcgacgatagtgattgtgacgtcgacatgggtgatgagacagagaacaaggacattatgaaccaagatgaatcgctcatggatattgatagtgcagactcggggaacccgcttgcagcaacagaatatgttgaagagctttacaagttttacagagaaaatgaggctaagagttgtgtaaaccctgattacatgtccagtcagcaagatataaatgcaaagatgagagcaattctgattgactggctgattgaggttcactacaagtttgaactgatggacgagacgctatttcttacggtaaacgtaatagatagattcttggaaaaggaagtggttccaaggaagaagctacaactggttggaatcacagctctgcttcttgcttgcaaatatgaggaggtctcagttccagttgttgaggaccttgtgctcatttctgaccgtgcctacacaaaagggcaaattctagaaatggaaaagttgattctgaacacgctgcaattcaacatgtctgttccaacaccttatgtcttcatgaagaggtttctgaaagcagcagacgcagataaacagcttgagctagtgtcatttttcatgctggagctctgcttggtagagtaccaaatgctgaattataggccttcacatctggctgccgctgcggtttatactgcacaatgtgctattaaccgttgccagcagtggacaaaggtttgcgagtcacatagcagatacactggcgaccaactcctggagtgctcgaggatgatggtagactttcaccagaaggctggaaccggcaagctcactggcgtgcacaggaagtacagtacctacaagttcgggtgcgcggccaagattttgcccgcgcagttcatgctggagttaggagggacagcaccgcctccttcaggtgcaatctaattgaatcgccctgttttaactgggtggggtttttttaaaaagattttagcatactctccgtgaacaagatgcagaaaacatcgtgttgatgttgcccaaaagtgcatcgaattttcttggagaattatgattaactgttttttttttctatccgtgtcctgaatgacgagtgacggactgttttgttatactgcggctaataacgaactgtcctgttcatgaatgttgttggaaccttgtaaagaaaaacaagtcctgaatcaaatggtcaaatggatcctttgtccaaaatgttctctcgtttccatgttcactgatggtgtcgatgttgttgggtttggttgag

SEQ ID NO: 14960 - DNA, 1179 bp, Zea Mays
gctttatatataatgtgcttataagaatgaacaagttccttgcgaccctgaaaaaattagaccggaaacctgctaagagttgtgtaaaccctgattacatgtccagtcagcaagatataaatgcaaagatgagagcaattctgattgactggctgattgaggttcactacaagtttgaactgatggacgagacgctatttcttacggtaaacgtaatagatagattcttggaaaaggaagtggttccaaggaagaagctacaactggttggaatcacagctctgcttcttgcttgcaaatatgaggaggtctcagttccagttgttgaggaccttgtgctcatttctgaccgtgcctacacaaaagggcaaattctagaaatggaaaagttgattctgaacacgctgcaattcaacatgtctgttccaacaccttatgtcttcatgaagaggtttctgaaagcagcagacgcagataaacagcttgagctagtgtcatttttcatgctggagctctgcttggtagagtaccaaatgctgaattataggccttcacatctggctgccgctgcggtttatactgcacaatgtgctattaaccgttgccagcagtggacaaaggtttgcgagtcacatagcagatacactggcgaccaactcctggagtgctcgaggatgatggtagactttcaccagaaggctggaaccggcaagctcactggcgtgcacaggaagtacagtacctacaagttcgggtgcgcggccaagattttgcccgcgcagttcatgctggagttaggagggacagcaccgcctccttcaggtgcaatctaattgaatcgccctgttttaactgggtggggtttttttaaaaagattttagcatactctccgtgaacaagatgcagaaaacatcgtgttgatgttgcccaaaagtgcatcgaattttcttggagaattatgattaactgttttttttttctatccgtgtcctgaatgacgagtgacggactgttttgttatactgcggctaataacgaactgtcctgttcatgaatgttgttggaaccttgtaaagaaaaacaagtcctgaatcaaatggtcaaatggatcctttgtccaaaatgttctctcgtttccatgttcactgatggtgtcgatgttgttgggtttggttgag

SEQ ID NO: 14961 - DNA, 775 bp, Zea Mays
cccacatgcacctgtccttgtctcaaagacctcagacagctatgcgtgtgcaccaaacaacttaacaggatctgtccgagtgccccgaggaccccggataaacgacttaccaccaagatcgcaggattaagtaaacacaaatcacacaccaacatttgcagcggaaataaattctttattgcaaaatgattacatgttacaataagtttacattatacaattatcggagtgattacaaaagaaagtgattcaaaagaattacaatttaaaatgtataaaatatttataggttttaaaatacatgctagcttaagtgacaatcctcaataaagaagttaaagatgggatacacctatataagaaggccgagcccaccggcacttagcagcatccacaacagaacaaaattataacctgaaaaacaacagggaataaaaccctgagtacgcaattactcagcaagacttacccgactaaagaaaagactctcaagggtatgctggatttaagggattcaaggtaaagcttgtcaaatttcaaagactcgtttttgcataaaagcttactagtagtggatccttatacaaaatttttacttcacaaattaagtacttttcctgaatctagatttgcctggtctagagtattcacttgtcctacactagcttcattttatcaactttaatttcacttgttatctacgatgagggtcgaagatccagtcttcatatccgagaagttcggcgatccgaatcgattaatacccagctgggga

SEQ ID NO: 14962 - DNA, 1099 bp, Zea Mays
atttttttaaaaaaagaacaacttttaattatctaagcagggctaagcatctttagttctctttataaaacaggaatcaaggaagataatcaaattccaaggaatggcaatgcatcaattgtttcatcactcaactcctatcacctaatgcaacatataagtgataaaagttttataacaacaaggaggtggcaaatgcaccggggcttgcctgggataacactaagtcagtgttgttagatgacgtccgcttggggagcatctctcatcctggtacttgatcatattatcagattatccaagctttaggttctttcaccagcatcaccttgagagaaatctggttcttgtcctccgcatcacgtgatcgattaacacacccaaaattaaattcagctcggagactataagcaccacgtcgagctacaatttagcccatacgtcgagtacctaatgaacgacacctcgagacttcgctttcattcaaccaaacttccagggatttctctcctcacaagcacaccatacatacacatgattagcatctaataaatcggcgtcgaatacatgtaccggagagaaataaacacaaggaaaacaatgggtcctcaccgggattcgacaaggtcacaactggggctgcacaaatcgaggtggagcttgttgctgtatttcatcgagcatgccaagggcactacatagaggtgattctatatccgctgctgctgcgattgtacgaaaccctacgggagacgcagccatggggaggagtagatgcgtgggttttccatggaaaacaagaggagaaggggcgccatggcttcttgcatgggcagcagggagggcgctggacagagggcaggggcgagctccagggaggagcgtcaagctgcagcagggaggggcgaccatggcaggaaggggagggcgccatgggagagacgtcgagagagcagggatgaccagcgaggctctgtaggatcggcgcctagggaggaggcgacgtgaagaagctgacttcctatgcgcaggggatgagggagagatcacgggtgaagaaactagaagcctctgccctgcatacacggataagtagaag

SEQ ID NO: 14963 - DNA, 1326 bp, Zea Mays
atttttttaaaaaaagaacaacttttaattatctaagcagggctaagcatctttagttctctttataaaacaggaatcaaggaagataatcaaattccaaggaatggcaatgcatcaattgtttcatcactcaactcctatcacctaatgcaacatataagtgataaaagttttataacaacaaggaggtggcaaatgcaccggggcttgcctgggataacactaagtcagtgttgttagatgacgtccgcttggggagcatctctcatcctggtacttgatcatattatcagattatccaagctttaggttctttcaccagcatcaccttgagagaaatctggttcttgtcctccgcatcacgtgatcgattaacacacccaaaattaaattcagctcggagactataagcaccacgtcgagctacaatttagcccatacgtcgagtacctaatgaacgacacctcgagacttcgctttcattcaaccaaacttccagggatttctctcctcacaagcacaccatacatacacatgattagcatctaataaatcggcgtcgaatacatgtaccggagagaaataaacacaaggaaaacaatgggtcctcaccgggattcgacaaggtcacaactggggctgcacaaatcgaggtggagcttgttgctgtatttcatcgagcatgccaagggcactacatagaggtgattctatatccgctgctgctgcgattgtacgaaaccctacgggagacgcagccatggggaggagtagatgcgtgggttttccatggaaaacaagaggagaaggggcgccatggcttcttgctgcaggaaagaaaatcgtcatccatggaagaggaggtcggcggccatggctgatgaaggctctgcacggctggcagcattgggaacttgcgagcaaccattagggagcggctcgacgagcaggagagggcagcaccggcatggagagaaagatgaagggagacgtcgtgctcatcaacaggaagggaaggaacagggcagccgacgttggggctgtgcgtccataccatgggcagcagggagggcgctggacagagggcaggggcgagctccagggaggagcgtcaagctgcagcagggaggggcgaccatggcaggaaggggagggcgccatgggagagacgtcgagagagcagggatgaccagcgaggctctgtaggatcggcgcctagggaggaggcgacgtgaagaagctgacttcctatgcgcaggggatgagggagagatcacgggtgaagaaactagaagcctctgccctgcatacacggataagtagaag

SEQ ID NO: 14964 - DNA, 208 bp, Zea Mays
atctccctgaccatttgctcgtagagcacgtaatcttccatctgcttcaaaaaaaaactcgattcatcaagtcacacgaccgtaataagagctgaagaacatgatcatgccatcatgcttccttctcggcagcgagtcgccgctcctctgcttccacttccttcctgctccagaactcgtcgatctccgctcttgtgatgctgtagac

SEQ ID NO: 14965 - DNA, 154 bp, Zea Mays
tgcaagccgatttttaagaaggggagaatgttagggaatgtgagcccaaacggcccatgccagcccaggttgctaagagagtgccagcccaggttgctaagagagactacaaaagagcagggcggtcaggaggataggcatcgaatattcagag

SEQ ID NO: 14966 - DNA, 1581 bp, Zea Mays
ttgaaatcgtgaactacgtgcatgcgtgaacgaccttgtcgtacctccctccggtcaagcagagcgcgtccattcagtcaatcctctgcatcccggttatgggcggcgtgcttgagcttggtacaactgacacggtgccggaggccccggacttggtcagccgagcaaccgcggctttctgggagccgcagtgcccgacgtactcggaagagccgagctccagcccgtcaggacgagcaaacgagaccggcgaggccgcagcagacgacggcacgtttgcgttcgaggaactcgaccacaataatggcatggacatagaggcgatgaccgccgccgggggacacgggcaggaggaggagctaagactaagagaagccgaggccctgtcagacgacgcaagcctggagcacatcaccaaggagatcgaggagttctacagcctctgcgacgaaatggacctgcaggcgctaccactaccgctagaggacggctggaccgtggacgcgtccaatttcgaggtcccctgctcttccccgcagccagcgccgcctccggtggacagggctaccgctaacgtcgccgccgacgcctcaagggcacccgtctacggctctcgcgcgacgagtttcatggcttggacgaggtcctcgcagcagtcgtcgtgctccgacgacgcggcgcccgcagcagtagtgccggccatcgaggagccgcagagattgctgaagaaagtggtggccggcggcggtgcttgggagagctgtggcggcgcgacgggagcagcacaggaaatgagtggcactggcaccaagaaccacgtcatgtcggagcgaaagcgacgagagaagctcaacgagatgttcctcgtcctcaagtcactgcttccgtccattcacagggtgaacaaagcgtcgatcctcgccgaaacgatagcctacctcaaggagcttcagagaagggtgcaagagctggagtccagtagggaacctgcgtcgcgcccatccgaaacgacgacaaggctaataacaaggccctcccgtggcaataatgagagtgtgaggaaggaggtctgcgcgggctccaagaggaagagcccagagctcggcagagacgacgtggagcgccccccggtcctcatcatggacgccggcaccagcaacgtcaccgtcaccgtctcggacaaggacgtgctcctggaggtgcagtgccggtgggaggagctcctgatgacgcgagtgttcgacgccatcaagagcctccatttggacgtcctctcggttcaggcttcagcgccagatggcttcatggggcttaagatacgagctcagtttgctggctccggtgccgtcgtgccctggatgatcagcgaggctcttcgcaaagctatagggaagcggtgaaggggcagctggaaatttggacatcgacgggcatggaaggcttcatgggatcgaagcaaagatgtatttcttgtttctttagataacagacatgaatcggacctctatatcaacaattatattggcatgaatacttagactccagcccttaacacgtagaaactcaaaaaaagaagaaagg

SEQ ID NO: 14967 - DNA, 451 bp, Zea Mays
atggcgtatgcggaggggaggcaggggcgcggtgggtgggagccgcacgacacattgcgtaggtttttgcgatggcacgcacggtgtggtagagccatcgtggtggaggaggtcgcggagtcgtcgacgcaaatgtcatggagccacgatagcagtttacggaggttgcggaggtcgcgtgcggaggttggctatccgacgcaggtgggcgggggtttcgtggagtcagagctccgtgtgcgcggagtcggcgtggatgtcgcggaggcgagggcacggagatggtctacactattgccttaatagatagtagagaagtagagatagataaaaaaattgatacatcaaacagttgaacatgtgggaatgaagccatgctgggccagctgccccgcccgccgtacgataaaatagaggagcaaagtaggcgcacacgcatcgccaacgcgtg

SEQ ID NO: 14968 - DNA, 3761 bp, Zea Mays
ctttcccaaaactaaaacccttatctttccctctacgcactcgcgatgctccctccagtcaccgcaccgacccatccgcctccgccctgggaatcgacgaccaccactagaccgccgccgccacctcctcctccttccggcgccgagtccgaggtgccgccaaagaagcggaagctggagggggtggggtttcagcgctcgccctattacacgatcagagaaaccgttgcaaatctccgcgtccgcttccttcaggtttgccaaggaactgattcagaaaagaaagatactgctgtaggaatcttgaatgagatgaaatctgtgatggaattatccaagaaaacacggcttgatctgtccgcttctgctgaacctgtgaaaccgttgaacaaacatgcagctagagctcctgaggataagcgtgttgggaaagttctgtctgcagagaagagtttagttcctccgacaagcctgggcctggctggacattttgtgcacaatacaggtgggggtgtaccactcaagcctgataactcagacaccgcagcacatgggttaccggtgaagattaggaagtggcccggactaagtaagataacaggttttacaaagcgacagggtggacttcctcaaggttcttatgtcatcggtggatctcccattggctggaattttcttgtgtggcctggaagcaaagcagtctactatggtttgaccaaagcagagtgtcagaacaagggcgtaggggaccaagccaccaaggccccgcttctgtgtcttccattcttgtcggagcgtgctccgttgttgacggaagcaacgcttttggggcatggaaacgggcctgcagcgtcccaactcgcgattgggccctcgcagcacctgccaaaacaagaaaagcctagcccatgcgccgtgcggaggttccacagacatctcacgcctctgaggcaggttgctgtggacagaccgcagaagggaagggagcctgcgctagttgctaatgacggagagcgaggtagagagcttgatcttggtctcgggcgcgaaggagctcctggtgatggtgcagctgctggtgcgctgtcgaccccttgcttgctcccttgtcaagccccagatgtccaggaaggtggactccctcgtgctccccatggcgcggacccatgtgcagggttgggggatggcgtggtcgtggctgacgggaagcgtggcctctacaaccacgagcgttggccagcatgctttgtcactgtgcgccagtttggaagaagggaaaggtcctctacgtgggcctccagttgctccttgtgtgctaggttggtgaggcccccgagcatggtggacatggcggggtcctgcatcattgccctgcccagccgcttcgccatggccacgagctatggattctgcatcggatatgtacctaagtggttcaactggggttaccaccaggaagtggaagatgagtacggagatgagtactatgatcaagatgagtatgaggaggaaggttcgggtgctggggatgggtatgctgaggaggaagagcctacagagggacaaaaggagatccttgaattgagagaaagattaaaagagcagattaggcgaaaggcaaaggctgctgctgcctgcacagctggtcgatcatcttcttcacaaatacctcaagccagggacaaatttggctctttttttgggccatccaagccggtgatttctcgtcgagtgatagaagaaagaaaatcattgaaagaactgcatagcacggttgcaagggagccaaggccttctggagtacataaggatattccatcgtcctctaaagtgcaaagtagagtaaatggacatcagcataaacaaaagattgttaatcaggtaaagaagaaggctgaggcacttaaggataaccgggattattcatttctactctcggatgatgctgacctgtcatcctctccaaaggagaaacctgctgctagatcttccttgactcaaagggctgatcgtgaggtgacacaatcaacagtaaagaggaaggcaccaacaagtcaacctgcacgcttgtcaaatggatatggacctaagaacacaatgtcaactcaaaggcatgctgaaggtaaggtaaattccatgagaagggaggatttctcgaatacagaaagggttgtttcacgtgacaatgagaggatgtatgaaagggttgtttcacgtgacaatgagaggatgcatagtattgcaagaaatggatccaaccaggcaagtactagcaaaaccacaatccaaaagcatccaagcaggggtcccattgctaataagcaaccgtccaaggattcgaatgatgcaactctgaggaagagcagtgtagcctcaaagcaccatcccttagagattgacagaccaaaatcctcgcaaagtcagaggatgcagtcagctggtcagagaccacagcattcttcccatggtcagacgccacatcaatccatgcagcataggacgcagcagtcattgcagagtcggaggccacaacaaatgacacagggtcagaagccacaacagtctttgcagagtcaaaggactcaacagtccttgcagaatcgaaggccacagcagtcctcacatattcagaaatcgcaatcctcacaagcacacagaccacagtcattaagtaacaggtctcaggctttacaaggacaaaggcctctttcttcacagggtcaatatccggagcaaagaagagtacatgcaagtgacagagtcaaacaagctgaaaggcagattcggcctccttccaagtccatgccatcacggccagtctcttccaatggaattcgtgatgatcatgcaaaaaggaagcaagtggcaaaaagaagatttgatgaagatgatgaagaccccttagcaatgatcagaaatatgtttgggtatgatcctagtagatatgcaggcagagatgaagatgtcagtgacatggaagccgattttgctactatagaaatggaagagaaaaggagcgcgaggattgctaggcaggaggatgaagaacaacttcgcttgattgaggaagaagagagacgcgagcaggagagaaagaggcgaaagatggcacgaggccgatagtcgaatacactcctatttggatgttataatatactaccttcgttctcgaatatttgtcgtccgctggttcatttttgaactaaaccgtgacaaataaaaaagaacgcaggagtatctggcaggcctgattgcctgaatacgaagccccatggcggatcagacaggcacttctcttgcagtcctgtttacccttaccacgatgattatctggaggcaaatcaagggaaaacgacaggtgaccaacactgggcacgtgtaacagcagactgtagttgtagtggtttagttctcgaagctgacatggactatatttaagttctcgtcagattgtttggatagcagaaggtttccattgttgcagcgcctcaccagattgtttcttcatatgatatactgattctttcagtcaagcctatataaggatgcgtaatacaagtgcccctcttgtatatctttttcgggtgtaatagtgttgtaataaacgatgttcgaattttcggatatgattttgagctttgtcaggcgatcactgcaccacggtccacagagatgcgcttctggccgggagccaatcgaaggaagcgggaaaggggatgctgcacctttcgtagacaacattattattttgcaggttttgg

SEQ ID NO: 14969 - DNA, 3317 bp, Zea Mays
cttatctttccctctacgcactcgcgatgctccctccagtcaccgcaccgacccatccgcctccgccctgggaatcgacgaccaccactagaccgccgccgccacctcctcctccttccggcgccgagtccgaggtgccgccaaagaagcggaagctggagggggtggggtttcagcgctcgccctattacacgatcagagaaaccgttgcaaatctccgcgtccgcttccttcaggtttgccaaggaactgattcagaaaagaaagatactgctgtaggaatcttgaatgagatgaaatctgtgatggaattatccaagaaaacacggcttgatctgtccgcttctgctgaacctgtgaaaccgttgaacaaacatgcagctagagctcctgaggataagcgtgttgggaaagttctgtctgcagagaagagtttagttcctccgacaagcctgggcctggctggacattttgtgcacaatacaggtgggggtgtaccactcaagcctgataactcagacaccgcagcacatgggttaccggtgaagattaggaagtggcccggactaagtaagataacaggttttacaaagcgacagggtggacttcctcaaggttcttatgtcatcggtggatctcccattggctggaattttcttgtgtggcctggaagcaaagcagtctactatggtttgaccaaagcagagtgtcagaacaagggcgtaggggaccaagccaccaaggccccgcttctgtgtcttccattcttgtcggagcgtgctccgttgttgacggaagcaacgcttttggggcatggaaacgggcctgcagcgtcccaactcgcgattgggccctcgcagcacctgccaaaacaagaaaagcctagcccatgcgccgtgcggaggttccacagacatctcacgcctctgaggcaggttgctgtggacagaccgcagaagggaagggagcctgcgctagttgctaatgacggagagcgagggttaccaccaggaagtggaagatgagtacggagatgagtactatgatcaagatgagtatgaggaggaaggttcgggtgctggggatgggtatgctgaggaggaagagcctacagagggacaaaaggagatccttgaattgagagaaagattaaaagagcagattaggcgaaaggcaaaggctgctgctgcctgcacagctggtcgatcatcttcttcacaaatacctcaagccagggacaaatttggctctttttttgggccatccaagccggtgatttctcgtcgagtgatagaagaaagaaaatcattgaaagaactgcatagcacggttgcaagggagccaaggccttctggagtacataaggatattccatcgtcctctaaagtgcaaagtagagtaaatggacatcagcataaacaaaagattgttaatcaggtaaagaagaaggctgaggcacttaaggataaccgggattattcatttctactctcggatgatgctgacctgtcatcctctccaaaggagaaacctgctgctagatcttccttgactcaaagggctgatcgtgaggtgacacaatcaacagtaaagaggaaggcaccaacaagtcaacctgcacgcttgtcaaatggatatggacctaagaacacaatgtcaactcaaaggcatgctgaaggtaaggtaaattccatgagaagggaggatttctcgaatacagaaagggttgtttcacgtgacaatgagaggatgtatgaaagggttgtttcacgtgacaatgagaggatgcatagtattgcaagaaatggatccaaccaggcaagtactagcaaaaccacaatccaaaagcatccaagcaggggtcccattgctaataagcaaccgtccaaggattcgaatgatgcaactctgaggaagagcagtgtagcctcaaagcaccatcccttagagattgacagaccaaaatcctcgcaaagtcagaggatgcagtcagctggtcagagaccacagcattcttcccatggtcagacgccacatcaatccatgcagcataggacgcagcagtcattgcagagtcggaggccacaacaaatgacacagggtcagaagccacaacagtctttgcagagtcaaaggactcaacagtccttgcagaatcgaaggccacagcagtcctcacatattcagaaatcgcaatcctcacaagcacacagaccacagtcattaagtaacaggtctcaggctttacaaggacaaaggcctctttcttcacagggtcaatatccggagcaaagaagagtacatgcaagtgacagagtcaaacaagctgaaaggcagattcggcctccttccaagtccatgccatcacggccagtctcttccaatggaattcgtgatgatcatgcaaaaaggaagcaagtggcaaaaagaagatttgatgaagatgatgaagaccccttagcaatgatcagaaatatgtttgggtatgatcctagtagatatgcaggcagagatgaagatgtcagtgacatggaagccgattttgctactatagaaatggaagagaaaaggagcgcgaggattgctaggcaggaggatgaagaacaacttcgcttgattgaggaagaagagagacgcgagcaggagagaaagaggcgaaagatggcacgaggccgatagtcgaatacactcctatttggatgttataatatactaccttcgttctcgaatatttgtcgtccgctggttcatttttgaactaaaccgtgacaaataaaaaagaacgcaggagtatctggcaggcctgattgcctgaatacgaagccccatggcggatcagacaggcacttctcttgcagtcctgtttacccttaccacgatgattatctggaggcaaatcaagggaaaacgacaggtgaccaacactgggcacgtgtaacagcagactgtagttgtagtggtttagttctcgaagctgacatggactatatttaagttctcgtcagattgtttggatagcagaaggtttccattgttgcagcgcctcaccagattgtttcttcatatgatatactgattctttcagtcaagcctatataaggatgcgtaatacaagtgcccctcttgtatatctttttcgggtgtaatagtgttgtaataaacgatgttcgaattttcggatatgattttgagctttgtcaggcgatcactgcaccacggtccacagagatgcgcttctggccgggagccaatcgaaggaagcgggaaaggggatgctgcacctttcgtagacaacattattattttgcaggttttgg

SEQ ID NO: 14970 - DNA, 3484 bp, Zea Mays
tttccctctacgcactcgcgatgctccctccagtcaccgcaccgacccatccgcctccgccctgggaatcgacgaccaccactagaccgccgccgccacctcctcctccttccggcgccgagtccgaggtgccgccaaagaagcggaagctggagggggtggggtttcagcgctcgccctattacacgatcagagaaaccgttgcaaatctccgcgtccgcttccttcaggtttgccaaggaactgattcagaaaagaaagatactgctgtaggaatcttgaatgagatgaaatctgtgatggaattatccaagaaaacacggcttgatctgtccgcttctgctgaacctgtgaaaccgttgaacaaacatgcagctagagctcctgaggataagcgtgttgggaaagttctgtctgcagagaagagtttagttcctccgacaagcctgggcctggctggacattttgtgcacaatacaggtgggggtgtaccactcaagcctgataactcagacaccgcagcacatgggttaccggtgaagattaggaagtggcccggactaagtaagataacaggttttacaaagcgacagggtggacttcctcaaggttcttatgtcatcggtggatctcccattggctggaattttcttgtgtggcctggaagcaaagcagtctactatggtttgaccaaagcagagtggttggctcgtcaatctgcaaatagaaattcgaacatgctgtcccagtgatctaacagctacatggatcgatctttagaagataacatagtattccctaatccctagttattgtgatataagtagaaccaaatagtacatgacgcaccaggaaggtaacctctgacaccagagcatggtagcttggtaaggtactgaggtatattggttttgttgctcaataggggtaatcaacagtaaatactagataatagatatacggagaattttggtactgtaaactggatgggccggccaagtgtccatgttatgtcttctgttcagaagtggatacgaggaagaatttaaacacatgacagcgcattagcgccgatgcacacttcaaatcaactgggtattcggggaatttgagactgataagtcgggatcctgtcgataatgcggggctacgtgtacgagaccaatggttaccaccaggaagtggaagatgagtacggagatgagtactatgatcaagatgagtatgaggaggaaggttcgggtgctggggatgggtatgctgaggaggaagagcctacagagggacaaaaggagatccttgaattgagagaaagattaaaagagcagattaggcgaaaggcaaaggctgctgctgcctgcacagctggtcgatcatcttcttcacaaatacctcaagccagggacaaatttggctctttttttgggccatccaagccggtgatttctcgtcgagtgatagaagaaagaaaatcattgaaagaactgcatagcacggttgcaagggagccaaggccttctggagtacataaggatattccatcgtcctctaaagtgcaaagtagagtaaatggacatcagcataaacaaaagattgttaatcaggtaaagaagaaggctgaggcacttaaggataaccgggattattcatttctactctcggatgatgctgacctgtcatcctctccaaaggagaaacctgctgctagatcttccttgactcaaagggctgatcgtgaggtgacacaatcaacagtaaagaggaaggcaccaacaagtcaacctgcacgcttgtcaaatggatatggacctaagaacacaatgtcaactcaaaggcatgctgaaggtaaggtaaattccatgagaagggaggatttctcgaatacagaaagggttgtttcacgtgacaatgagaggatgtatgaaagggttgtttcacgtgacaatgagaggatgcatagtattgcaagaaatggatccaaccaggcaagtactagcaaaaccacaatccaaaagcatccaagcaggggtcccattgctaataagcaaccgtccaaggattcgaatgatgcaactctgaggaagagcagtgtagcctcaaagcaccatcccttagagattgacagaccaaaatcctcgcaaagtcagaggatgcagtcagctggtcagagaccacagcattcttcccatggtcagacgccacatcaatccatgcagcataggacgcagcagtcattgcagagtcggaggccacaacaaatgacacagggtcagaagccacaacagtctttgcagagtcaaaggactcaacagtccttgcagaatcgaaggccacagcagtcctcacatattcagaaatcgcaatcctcacaagcacacagaccacagtcattaagtaacaggtctcaggctttacaaggacaaaggcctctttcttcacagggtcaatatccggagcaaagaagagtacatgcaagtgacagagtcaaacaagctgaaaggcagattcggcctccttccaagtccatgccatcacggccagtctcttccaatggaattcgtgatgatcatgcaaaaaggaagcaagtggcaaaaagaagatttgatgaagatgatgaagaccccttagcaatgatcagaaatatgtttgggtatgatcctagtagatatgcaggcagagatgaagatgtcagtgacatggaagccgattttgctactatagaaatggaagagaaaaggagcgcgaggattgctaggcaggaggatgaagaacaacttcgcttgattgaggaagaagagagacgcgagcaggagagaaagaggcgaaagatggcacgaggccgatagtcgaatacactcctatttggatgttataatatactaccttcgttctcgaatatttgtcgtccgctggttcatttttgaactaaaccgtgacaaataaaaaagaacgcaggagtatctggcaggcctgattgcctgaatacgaagccccatggcggatcagacaggcacttctcttgcagtcctgtttacccttaccacgatgattatctggaggcaaatcaagggaaaacgacaggtgaccaacactgggcacgtgtaacagcagactgtagttgtagtggtttagttctcgaagctgacatggactatatttaagttctcgtcagattgtttggatagcagaaggtttccattgttgcagcgcctcaccagattgtttcttcatatgatatactgattctttcagtcaagcctatataaggatgcgtaatacaagtgcccctcttgtatatctttttcgggtgtaatagtgttgtaataaacgatgttcgaattttcggatatgattttgagctttgtcaggcgatcactgcaccacggtccacagagatgcgcttctggccgggagccaatcgaaggaagcgggaaaggggatgctgcacctttcgtagacaacattattattttgcaggttttgg

SEQ ID NO: 14971 - DNA, 3571 bp, Zea Mays
caagtacgtactgatacagaatgaaaattgaagttcctgggatgtatgtgatcttaactgatcaggtttgccaaggaactgattcagaaaagaaagatactgctgtaggaatcttgaatgagatgaaatctgtgatggaattatccaagaaaacacggcttgatctgtccgcttctgctgaacctgtgaaaccgttgaacaaacatgcagctagagctcctgaggataagcgtgttgggaaagttctgtctgcagagaagagtttagttcctccgacaagcctgggcctggctggacattttgtgcacaatacaggtgggggtgtaccactcaagcctgataactcagacaccgcagcacatgggttaccggtgaagattaggaagtggcccggactaagtaagataacaggttttacaaagcgacagggtggacttcctcaaggttcttatgtcatcggtggatctcccattggctggaattttcttgtgtggcctggaagcaaagcagtctactatggtttgaccaaagcagagtgtcagaacaagggcgtaggggaccaagccaccaaggccccgcttctgtgtcttccattcttgtcggagcgtgctccgttgttgacggaagcaacgcttttggggcatggaaacgggcctgcagcgtcccaactcgcgattgggccctcgcagcacctgccaaaacaagaaaagcctagcccatgcgccgtgcggaggttccacagacatctcacgcctctgaggcaggttgctgtggacagaccgcagaagggaagggagcctgcgctagttgctaatgacggagagcgaggtagagagcttgatcttggtctcgggcgcgaaggagctcctggtgatggtgcagctgctggtgcgctgtcgaccccttgcttgctcccttgtcaagccccagatgtccaggaaggtggactccctcgtgctccccatggcgcggacccatgtgcagggttgggggatggcgtggtcgtggctgacgggaagcgtggcctctacaaccacgagcgttggccagcatgctttgtcactgtgcgccagtttggaagaagggaaaggtcctctacgtgggcctccagttgctccttgtgtgctaggttggtgaggcccccgagcatggtggacatggcggggtcctgcatcattgccctgcccagccgcttcgccatggccacgagctatggattctgcatcggatatgtacctaagtggttcaactggggttaccaccaggaagtggaagatgagtacggagatgagtactatgatcaagatgagtatgaggaggaaggttcgggtgctggggatgggtatgctgaggaggaagagcctacagagggacaaaaggagatccttgaattgagagaaagattaaaagagcagattaggcgaaaggcaaaggctgctgctgcctgcacagctggtcgatcatcttcttcacaaatacctcaagccagggacaaatttggctctttttttgggccatccaagccggtgatttctcgtcgagtgatagaagaaagaaaatcattgaaagaactgcatagcacggttgcaagggagccaaggccttctggagtacataaggatattccatcgtcctctaaagtgcaaagtagagtaaatggacatcagcataaacaaaagattgttaatcaggtaaagaagaaggctgaggcacttaaggataaccgggattattcatttctactctcggatgatgctgacctgtcatcctctccaaaggagaaacctgctgctagatcttccttgactcaaagggctgatcgtgaggtgacacaatcaacagtaaagaggaaggcaccaacaagtcaacctgcacgcttgtcaaatggatatggacctaagaacacaatgtcaactcaaaggcatgctgaaggtaaggtaaattccatgagaagggaggatttctcgaatacagaaagggttgtttcacgtgacaatgagaggatgtatgaaagggttgtttcacgtgacaatgagaggatgcatagtattgcaagaaatggatccaaccaggcaagtactagcaaaaccacaatccaaaagcatccaagcaggggtcccattgctaataagcaaccgtccaaggattcgaatgatgcaactctgaggaagagcagtgtagcctcaaagcaccatcccttagagattgacagaccaaaatcctcgcaaagtcagaggatgcagtcagctggtcagagaccacagcattcttcccatggtcagacgccacatcaatccatgcagcataggacgcagcagtcattgcagagtcggaggccacaacaaatgacacagggtcagaagccacaacagtctttgcagagtcaaaggactcaacagtccttgcagaatcgaaggccacagcagtcctcacatattcagaaatcgcaatcctcacaagcacacagaccacagtcattaagtaacaggtctcaggctttacaaggacaaaggcctctttcttcacagggtcaatatccggagcaaagaagagtacatgcaagtgacagagtcaaacaagctgaaaggcagattcggcctccttccaagtccatgccatcacggccagtctcttccaatggaattcgtgatgatcatgcaaaaaggaagcaagtggcaaaaagaagatttgatgaagatgatgaagaccccttagcaatgatcagaaatatgtttgggtatgatcctagtagatatgcaggcagagatgaagatgtcagtgacatggaagccgattttgctactatagaaatggaagagaaaaggagcgcgaggattgctaggcaggaggatgaagaacaacttcgcttgattgaggaagaagagagacgcgagcaggagagaaagaggcgaaagatggcacgaggccgatagtcgaatacactcctatttggatgttataatatactaccttcgttctcgaatatttgtcgtccgctggttcatttttgaactaaaccgtgacaaataaaaaagaacgcaggagtatctggcaggcctgattgcctgaatacgaagccccatggcggatcagacaggcacttctcttgcagtcctgtttacccttaccacgatgattatctggaggcaaatcaagggaaaacgacaggtgaccaacactgggcacgtgtaacagcagactgtagttgtagtggtttagttctcgaagctgacatggactatatttaagttctcgtcagattgtttggatagcagaaggtttccattgttgcagcgcctcaccagattgtttcttcatatgatatactgattctttcagtcaagcctatataaggatgcgtaatacaagtgcccctcttgtatatctttttcgggtgtaatagtgttgtaataaacgatgttcgaattttcggatatgattttgagctttgtcaggcgatcactgcaccacggtccacagagatgcgcttctggccgggagccaatcgaaggaagcgggaaaggggatgctgcacctttcgtagacaacattattattttgcaggttttgg

SEQ ID NO: 14972 - DNA, 2761 bp, Zea Mays
atggagtcctggaagtttccattgacgcttgaacagaaaaacagtgtgctgacccctgaggtttgccaaggaactgattcagaaaagaaagatactgctgtaggaatcttgaatgagatgaaatctgtgatggaattatccaagaaaacacggcttgatctgtccgcttctgctgaacctgtgaaaccgttgaacaaacatgcagctagagctcctgaggataagcgtgttgggaaagttctgtctgcagagaagagtttagttcctccgacaagcctgggcctggctggacattttgtgcacaatacaggtgggggtgtaccactcaagcctgataactcagacaccgcagcacatgggttaccggtgaagattaggaagtggcccggactaagtaagataacaggttttacaaagcgacagggtggacttcctcaaggttcttatgtcatcggtggatctcccattggctggaattttcttgtgtggcctggaagcaaagcagtctactatggtttgaccaaagcagagtgtcagaacaagggcgtaggggaccaagccaccaaggccccgcttctgtgtcttccattcttgtcggagcgtgctccgttgttgacggaagcaacgcttttggggcatggaaacgggcctgcagcgtcccaactcgcgattgggccctcgcagcacctgccaaaacaagaaaagcctagcccatgcgccgtgcggaggttccacagacatctcacgcctctgaggcaggttgctgtggacagaccgcagaagggaagggagcctgcgctagttgctaatgacggagagcgaggtagagagcttgatcttggtctcgggcgcgaaggagctcctggtgatggtgcagctgctggtgcgctgtcgaccccttgcttgctcccttgtcaagccccagatgtccaggaaggtggactccctcgtgctccccatggcgcggacccatgtgcagggttgggggatggcgtggtcgtggctgacgggaagcgtggcctctacaaccacgagcgttggccagcatgctttgtcactgtgcgccagtttggaagaagggaaaggtcctctacgtgggcctccagttgctccttgtgtgctaggttggtgaggcccccgagcatggtggacatggcggggtcctgcatcattgccctgcccagccgcttcgccatggccacgagctatggattctgcatcggatatgtacctaagtggttcaactggggttaccaccaggaagtggaagatgagtacggagatgagtactatgatcaagatgagtatgaggaggaaggttcgggtgctggggatgggtatgctgaggaggaagagcctacagagggacaaaaggagatccttgaattgagagaaagattaaaagagcagattaggcgaaaggcaaaggctgctgctgcctgcacagctggtcgatcatcttcttcacaaatacctcaagccagggacaaatttggctctttttttgggccatccaagccggtgatttctcgtcgagtgatagaagaaagaaaatcattgaaagaactgcatagcacggttgcaagggagccaaggccttctggagtacataaggatattccatcgtcctctaaagtgcaaagtagagtaaatggacatcagcataaacaaaagattgttaatcaggtaaagaagaaggctgaggcacttaaggataaccgggattattcatttctactctcggatgatgctgacctgtcatcctctccaaaggagaaacctgctgctagatcttccttgactcaaagggctgatcgtgaggtgacacaatcaacagtaaagaggaaggcaccaacaagtcaacctgcacgcttgtcaaatggatatggacctaagaacacaatgtcaactcaaaggcatgctgaaggtatgatcctagtagatatgcaggcagagatgaagatgtcagtgacatggaagccgattttgctactatagaaatggaagagaaaaggagcgcgaggattgctaggcaggaggatgaagaacaacttcgcttgattgaggaagaagagagacgcgagcaggagagaaagaggcgaaagatggcacgaggccgatagtcgaatacactcctatttggatgttataatatactaccttcgttctcgaatatttgtcgtccgctggttcatttttgaactaaaccgtgacaaataaaaaagaacgcaggagtatctggcaggcctgattgcctgaatacgaagccccatggcggatcagacaggcacttctcttgcagtcctgtttacccttaccacgatgattatctggaggcaaatcaagggaaaacgacaggtgaccaacactgggcacgtgtaacagcagactgtagttgtagtggtttagttctcgaagctgacatggactatatttaagttctcgtcagattgtttggatagcagaaggtttccattgttgcagcgcctcaccagattgtttcttcatatgatatactgattctttcagtcaagcctatataaggatgcgtaatacaagtgcccctcttgtatatctttttcgggtgtaatagtgttgtaataaacgatgttcgaattttcggatatgattttgagctttgtcaggcgatcactgcaccacggtccacagagatgcgcttctggccgggagccaatcgaaggaagcgggaaaggggatgctgcacctttcgtagacaacattattattttgcaggttttgg

SEQ ID NO: 14973 - DNA, 3407 bp, Zea Mays
atggagtcctggaagtttccattgacgcttgaacagaaaaacagtgtgctgacccctgaggtttgccaaggaactgattcagaaaagaaagatactgctgtaggaatcttgaatgagatgaaatctgtgatggaattatccaagaaaacacggcttgatctgtccgcttctgctgaacctgtgaaaccgttgaacaaacatgcagctagagctcctgaggataagcgtgttgggaaagttctgtctgcagagaagagtttagttcctccgacaagcctgggcctggctggacattttgtgcacaatacaggtgggggtgtaccactcaagcctgataactcagacaccgcagcacatgggttaccggtgaagattaggaagtggcccggactaagtaagataacaggttttacaaagcgacagggtggacttcctcaaggttcttatgtcatcggtggatctcccattggctggaattttcttgtgtggcctggaagcaaagcagtctactatggtttgaccaaagcagagtggttggctcgtcaatctgcaaatagaaattcgaacatgctgtcccagtgatctaacagctacatggatcgatctttagaagataacatagtattccctaatccctagttattgtgatataagtagaaccaaatagtacatgacgcaccaggaaggtaacctctgacaccagagcatggtagcttggtaaggtactgaggtatattggttttgttgctcaataggggtaatcaacagtaaatactagataatagatatacggagaattttggtactgtaaactggatgggccggccaagtgtccatgttatgtcttctgttcagaagtggatacgaggaagaatttaaacacatgacagcgcattagcgccgatgcacacttcaaatcaactgggtattcggggaatttgagactgataagtcgggatcctgtcgataatgcggggctacgtgtacgagaccaatgaagtggaagatgagtacggagatgagtactatgatcaagatgagtatgaggaggaaggttcgggtgctggggatgggtatgctgaggaggaagagcctacagagggacaaaaggagatccttgaattgagagaaagattaaaagagcagattaggcgaaaggcaaaggctgctgctgcctgcacagctggtcgatcatcttcttcacaaatacctcaagccagggacaaatttggctctttttttgggccatccaagccggtgatttctcgtcgagtgatagaagaaagaaaatcattgaaagaactgcatagcacggttgcaagggagccaaggccttctggagtacataaggatattccatcgtcctctaaagtgcaaagtagagtaaatggacatcagcataaacaaaagattgttaatcaggtaaagaagaaggctgaggcacttaaggataaccgggattattcatttctactctcggatgatgctgacctgtcatcctctccaaaggagaaacctgctgctagatcttccttgactcaaagggctgatcgtgaggtgacacaatcaacagtaaagaggaaggcaccaacaagtcaacctgcacgcttgtcaaatggatatggacctaagaacacaatgtcaactcaaaggcatgctgaaggtaaggtaaattccatgagaagggaggatttctcgaatacagaaagggttgtttcacgtgacaatgagaggatgtatgaaagggttgtttcacgtgacaatgagaggatgcatagtattgcaagaaatggatccaaccaggcaagtactagcaaaaccacaatccaaaagcatccaagcaggggtcccattgctaataagcaaccgtccaaggattcgaatgatgcaactctgaggaagagcagtgtagcctcaaagcaccatcccttagagattgacagaccaaaatcctcgcaaagtcagaggatgcagtcagctggtcagagaccacagcattcttcccatggtcagacgccacatcaatccatgcagcataggacgcagcagtcattgcagagtcggaggccacaacaaatgacacagggtcagaagccacaacagtctttgcagagtcaaaggactcaacagtccttgcagaatcgaaggccacagcagtcctcacatattcagaaatcgcaatcctcacaagcacacagaccacagtcattaagtaacaggtctcaggctttacaaggacaaaggcctctttcttcacagggtcaatatccggagcaaagaagagtacatgcaagtgacagagtcaaacaagctgaaaggcagattcggcctccttccaagtccatgccatcacggccagtctcttccaatggaattcgtgatgatcatgcaaaaaggaagcaagtggcaaaaagaagatttgatgaagatgatgaagaccccttagcaatgatcagaaatatgtttgggtattgtctagacaagcttactctatcctttctgttttggactttgtggctttttgaagatgttgcttatagatatttggattctaattttggcatactttgcaggtatgatcctagtagatatgcaggcagagatgaagatgtcagtgacatggaagccgattttgctactatagaaatggaagagaaaaggagcgcgaggattgctaggcaggaggatgaagaacaacttcgcttgattgaggaagaagagagacgcgagcaggagagaaagaggcgaaagatggcacgaggccgatagtcgaatacactcctatttggatgttataatatactaccttcgttctcgaatatttgtcgtccgctggttcatttttgaactaaaccgtgacaaataaaaaagaacgcaggagtatctggcaggcctgattgcctgaatacgaagccccatggcggatcagacaggcacttctcttgcagtcctgtttacccttaccacgatgattatctggaggcaaatcaagggaaaacgacaggtgaccaacactgggcacgtgtaacagcagactgtagttgtagtggtttagttctcgaagctgacatggactatatttaagttctcgtcagattgtttggatagcagaaggtttccattgttgcagcgcctcaccagattgtttcttcatatgatatactgattctttcagtcaagcctatataaggatgcgtaatacaagtgcccctcttgtatatctttttcgggtgtaatagtgttgtaataaacgatgttcgaattttcggatatgattttgagctttgtcaggcgatcactgcaccacggtccacagagatgcgcttctggccgggagccaatcgaaggaagcgggaaaggggatgctgcacctttcgtagacaacattattattttgcaggttttgg

SEQ ID NO: 14974 - DNA, 2792 bp, Zea Mays
tgggccctggcccctgtgctccccttgccaccgaacgagagccaaaagcctcccgccccacgacgcgcccgccccggcggcgacgccccggaggacgtttcccgcagcgaccggcgaccaagccttgattgcctccgccccatggctacccgggcgcgggcgtagccgccgcctcggccgcagcaggctcggtccgcccccctcggcgatttctgttccagtcgcatcgcgcgacagctcgtcgtccgattcggatccccgccaccgcggcggaacgaggcgtctccggtccccgagggtattcggggaatttgagactgataagtcgggatcctgtcgataatgcggggctacgtgtacgagaccaatggttaccaccaggaagtggaagatgagtacggagatgagtactatgatcaagatgagtatgaggaggaaggttcgggtgctggggatgggtatgctgaggaggaagagcctacagagggacaaaaggagatccttgaattgagagaaagattaaaagagcagattaggcgaaaggcaaaggctgctgctgcctgcacagctggtcgatcatcttcttcacaaatacctcaagccagggacaaatttggctctttttttgggccatccaagccggtgatttctcgtcgagtgatagaagaaagaaaatcattgaaagaactgcatagcacggttgcaagggagccaaggccttctggagtacataaggatattccatcgtcctctaaagtgcaaagtagagtaaatggacatcagcataaacaaaagattgttaatcaggtaaagaagaaggctgaggcacttaaggataaccgggattattcatttctactctcggatgatgctgacctgtcatcctctccaaaggagaaacctgctgctagatcttccttgactcaaagggctgatcgtgaggtgacacaatcaacagtaaagaggaaggcaccaacaagtcaacctgcacgcttgtcaaatggatatggacctaagaacacaatgtcaactcaaaggcatgctgaaggtaaggtaaattccatgagaagggaggatttctcgaatacagaaagggttgtttcacgtgacaatgagaggatgtatgaaagggttgtttcacgtgacaatgagaggatgcatagtattgcaagaaatggatccaaccaggcaagtactagcaaaaccacaatccaaaagcatccaagcaggggtcccattgctaataagcaaccgtccaaggattcgaatgatgcaactctgaggaagagcagtgtagcctcaaagcaccatcccttagagattgacagaccaaaatcctcgcaaagtcagaggatgcagtcagctggtcagagaccacagcattcttcccatggtcagacgccacatcaatccatgcagcataggacgcagcagtcattgcagagtcggaggccacaacaaatgacacagggtcagaagccacaacagtctttgcagagtcaaaggactcaacagtccttgcagaatcgaaggccacagcagtcctcacatattcagaaatcgcaatcctcacaagcacacagaccacagtcattaagtaacaggtctcaggctttacaaggacaaaggcctctttcttcacagggtcaatatccggagcaaagaagagtacatgcaagtgacagagtcaaacaagctgaaaggcagattcggcctccttccaagtccatgccatcacggccagtctcttccaatggaattcgtgatgatcatgcaaaaaggaagcaagtggcaaaaagaagatttgatgaagatgatgaagaccccttagcaatgatcagaaatatgtttgggtattgtctagacaagcttactctatcctttctgttttggactttgtggctttttgaagatgttgcttatagatatttggattctaattttggcatactttgcaggtatgatcctagtagatatgcaggcagagatgaagatgtcagtgacatggaagccgattttgctactatagaaatggaagagaaaaggagcgcgaggattgctaggcaggaggatgaagaacaacttcgcttgattgaggaagaagagagacgcgagcaggagagaaagaggcgaaagatggcacgaggccgatagtcgaatacactcctatttggatgttataatatactaccttcgttctcgaatatttgtcgtccgctggttcatttttgaactaaaccgtgacaaataaaaaagaacgcaggagtatctggcaggcctgattgcctgaatacgaagccccatggcggatcagacaggcacttctcttgcagtcctgtttacccttaccacgatgattatctggaggcaaatcaagggaaaacgacaggtgaccaacactgggcacgtgtaacagcagactgtagttgtagtggtttagttctcgaagctgacatggactatatttaagttctcgtcagattgtttggatagcagaaggtttccattgttgcagcgcctcaccagattgtttcttcatatgatatactgattctttcagtcaagcctatataaggatgcgtaatacaagtgcccctcttgtatatctttttcgggtgtaatagtgttgtaataaacgatgttcgaattttcggatatgattttgagctttgtcaggcgatcactgcaccacggtccacagagatgcgcttctggccgggagccaatcgaaggaagcgggaaaggggatgctgcacctttcgtagacaacattattattttgcaggttttgg

SEQ ID NO: 14975 - DNA, 3261 bp, Zea Mays
ctggcccctgtgctccccttgccaccgaacgagagccaaaagcctcccgccccacgacgcgcccgccccggcggcgacgccccggaggacgtttcccgcagcgaccggcgaccaagccttgattgcctccgccccatggctacccgggcgcgggcgtagccgccgcctcggccgcagcaggctcggtccgcccccctcggcgatttctgttccagtcgcatcgcgcgacagctcgtcgtccgattcggatccccgccaccgcggcggaacgaggcgtctccggtccccgagggtattcggggaatttgagactgataagtcgggatcctgtcgataatgcggggctacgtgtacgagaccaataccgcagaagggaagggagcctgcgctagttgctaatgacggagagcgaggtagagagcttgatcttggtctcgggcgcgaaggagctcctggtgatggtgcagctgctggtgcgctgtcgaccccttgcttgctcccttgtcaagccccagatgtccaggaaggtggactccctcgtgctccccatggcgcggacccatgtgcagggttgggggatggcgtggtcgtggctgacgggaagcgtggcctctacaaccacgagcgttggccagcatgctttgtcactgtgcgccagtttggaagaagggaaaggtcctctacgtgggcctccagttgctccttgtgtgctaggttggtgaggcccccgagcatggtggacatggcggggtcctgcatcattgccctgcccagccgcttcgccatggccacgagctatggattctgcatcggatatgtacctaagtggttcaactggggttaccaccaggaagtggaagatgagtacggagatgagtactatgatcaagatgagtatgaggaggaaggttcgggtgctggggatgggtatgctgaggaggaagagcctacagagggacaaaaggagatccttgaattgagagaaagattaaaagagcagattaggcgaaaggcaaaggctgctgctgcctgcacagctggtcgatcatcttcttcacaaatacctcaagccagggacaaatttggctctttttttgggccatccaagccggtgatttctcgtcgagtgatagaagaaagaaaatcattgaaagaactgcatagcacggttgcaagggagccaaggccttctggagtacataaggatattccatcgtcctctaaagtgcaaagtagagtaaatggacatcagcataaacaaaagattgttaatcaggtaaagaagaaggctgaggcacttaaggataaccgggattattcatttctactctcggatgatgctgacctgtcatcctctccaaaggagaaacctgctgctagatcttccttgactcaaagggctgatcgtgaggtgacacaatcaacagtaaagaggaaggcaccaacaagtcaacctgcacgcttgtcaaatggatatggacctaagaacacaatgtcaactcaaaggcatgctgaaggtaaggtaaattccatgagaagggaggatttctcgaatacagaaagggttgtttcacgtgacaatgagaggatgtatgaaagggttgtttcacgtgacaatgagaggatgcatagtattgcaagaaatggatccaaccaggcaagtactagcaaaaccacaatccaaaagcatccaagcaggggtcccattgctaataagcaaccgtccaaggattcgaatgatgcaactctgaggaagagcagtgtagcctcaaagcaccatcccttagagattgacagaccaaaatcctcgcaaagtcagaggatgcagtcagctggtcagagaccacagcattcttcccatggtcagacgccacatcaatccatgcagcataggacgcagcagtcattgcagagtcggaggccacaacaaatgacacagggtcagaagccacaacagtctttgcagagtcaaaggactcaacagtccttgcagaatcgaaggccacagcagtcctcacatattcagaaatcgcaatcctcacaagcacacagaccacagtcattaagtaacaggtctcaggctttacaaggacaaaggcctctttcttcacagggtcaatatccggagcaaagaagagtacatgcaagtgacagagtcaaacaagctgaaaggcagattcggcctccttccaagtccatgccatcacggccagtctcttccaatggaattcgtgatgatcatgcaaaaaggaagcaagtggcaaaaagaagatttgatgaagatgatgaagaccccttagcaatgatcagaaatatgtttgggtattgtctagacaagcttactctatcctttctgttttggactttgtggctttttgaagatgttgcttatagatatttggattctaattttggcatactttgcaggtatgatcctagtagatatgcaggcagagatgaagatgtcagtgacatggaagccgattttgctactatagaaatggaagagaaaaggagcgcgaggattgctaggcaggaggatgaagaacaacttcgcttgattgaggaagaagagagacgcgagcaggagagaaagaggcgaaagatggcacgaggccgatagtcgaatacactcctatttggatgttataatatactaccttcgttctcgaatatttgtcgtccgctggttcatttttgaactaaaccgtgacaaataaaaaagaacgcaggagtatctggcaggcctgattgcctgaatacgaagccccatggcggatcagacaggcacttctcttgcagtcctgtttacccttaccacgatgattatctggaggcaaatcaagggaaaacgacaggtgaccaacactgggcacgtgtaacagcagactgtagttgtagtggtttagttctcgaagctgacatggactatatttaagttctcgtcagattgtttggatagcagaaggtttccattgttgcagcgcctcaccagattgtttcttcatatgatatactgattctttcagtcaagcctatataaggatgcgtaatacaagtgcccctcttgtatatctttttcgggtgtaatagtgttgtaataaacgatgttcgaattttcggatatgattttgagctttgtcaggcgatcactgcaccacggtccacagagatgcgcttctggccgggagccaatcgaaggaagcgggaaaggggatgctgcacctttcgtagacaacattattattttgcaggttttgg
